United States Patent Application Publication US 2014/0259212 A1 - sequence listing, part 29

SEQ ID NO: 96898 - protein, 1146 aa, Rhodospirillum rubrum ATCC 11170
MGQKIKRLMVANRSEIAIRVFRAAAELGIRTVALYAEEDRLSLHRFKADEAYRVGAGKGPLQAYLAIDDIIDIATREKIDAIHPGYGFLSEDPAFAEACAAAGIRFIGPTPETLRQLGNKVAARNLARSLGVPVMPATGPLPTDPGVIHRLAKDIGYPVMLKASWGGGGRGMRPIDSEEHLLDAVTTSRREAAAAFGKDEVYLEKLVRAARHVEVQLLGDSHGTLVHLFERDCSIQRRHQKVIERAPAPYLDSETRRRLTDAALKIGRATGYVGAGTVEFLMDVATNDFFFIEVNPRIQVEHTVTEVVTGLDLVKAQIRIAEGGHIGQTAETGIPAQEAICLNGHAMQCRITTEDPERGFVPDYGRISAYRGASGFGIRVDGGTAYSGAVVTPFYDAMLEKVTAWAPTPDEVIARMERVLREYRIRGIATNLPFLEAILAHPDFRATRYTTRFIDETPALFNSPRRRDRATKLLTYIADITVNGHPEMAGRPPRAVARIPEPPRLGTTRREGTKQGLDRLGADGFARWMRAQDRVLITDTTLRDAHQSLLATRLRSYDIVRAAEAYATGLPDLLSLECWGGATFDVALRFLSEDPWERLAAIRERVPNILLQMLLRGANGVGYTNYPDNVVRFFVARAAEGGIDLFRIFDCLNWIDNMRVAIDAVCEAGKIAEGAICYTGDILDPDRAKYSLRYYVDLAQQLDAAGCHVIAIKDMAGLLSPKAAKVLVRVLRNVTDRPLHLHTHDTSGTAAATLIAAIDAGVDAVDLAMDALSGTTSQPCLGSVVAAIGKSDRDSGLDAEAIRRMSLYWEDVRALYGAFESDLRAGASEVYLHEMPGGQFTNLKEQARALGLANRWHDVAAAYRQANDLFGDIVKVTPSSKVVGDMALMMVSQGLTPEDVLNPDRDIAFPASVVDMLKGDLGQPYGGWPEALRKKVLKGQAPLTVRPGALLGTADLGALRAKTAAEIGRPVDNRDLASALMYPKVFADFARATETWGPVAVLPTPTFFGGMKVGEEIVVEIEPGKSLIIVLQAIGAAEPDGKVKLFFELNGQPRVIRVADRSRVAAPPRPKAIEGDDRQVAAPMAGAVSSILAHKGQAVAAGDPLLTLEAMKMETTLHAPRDGIVADLLVQVQETVESKDLLLLLQ

SEQ ID NO: 96899 - DNA, 3411 bp, Frankia sp. CcI3
  CDS (1)..(3411): transl_table=11
gtgcgtaaggtactggttgcaaatcgtagcgagatcgccgtccgtgttttccgagccgctcaggaactgggcctgcgcacggtggcggtctacacgcccgaagacgtttccgcgctgcaccggacaaaggcgtccgaggcctacgagatcggtggccccgggcacccggtgcgcggatacctggacatcgatgccctgctcaccgtggccaagcaggcggaggccgacgcgctgcaccccggctacggcttcctgtcggagtcggcggtgctcgccgatgcgtgcgccaccgccggcgtcaccttcgtcggaccgcccccggcggtcctgcggctgaccggagacaaggtcgccgcccgggacgccgcgctggccgccgggctgccggtgctgcgcgcctcggtgccgctgccggagggcgccggggcgctcgccgccgccgaggaggtcggcttcccgctgttcgtcaaggcctccgccggtggtggggggcgcggcctgcggcgggtggaacgccccgccgacctcgccgacgcggtggcgagcgcgtcccgggaggccgccgccgccttcggggacggcacgatcttcctggagcaggcggtggaccggccgcgccacatcgaggtccagatcctggccgacgcctacggcaacatcatccatctgtacgagcgggactgctcggtgcagcgccggcaccagaaggtcgtggagatcgccccggcgccgcagctcgacgaggcggtccgggcgagcatctgcgccgacgcggtgcggttcgcccggcatgtcggctatgtcaatgcgggcacggtcgagtttcttctcggcgccgacgaccggtacacgttcatggagatgaatccccggatccaggtcgagcacacggtcaccgaggaggtcaccggggttgatctggtcgcggcgcagctgcggatcgctgatggggagagcctggccggcctcaacctcacccaggagcagatcgtcctgcgcagcaccgccatccagtgccgggtcaccaccgaggatccctcggatggcttccggcccgacatcgggacgatcagcttctaccagtcacccggcggtccgggggtgcgcctcgacggcgccacgtacccgggggccgaagtcagcccgtacttcgactcgttgctggtgaagctgacgacccggggtaacacgctggagaaggcggcgcggcgcgcccggcgggcgctgaacgagttccgggtccgcggggtgcgcacgaacatcgacttcctggtgcggctcctcgctgaccccggcttcctcgccggcggggtgagcacgtcgttcatcgatgaacggccggagctgctcgctcccggcaagggggcggacccgaccagccggctgctggctcgcctcgccgagagcacggtgaacggattcccgcgcccggcggtcgccctgaccgacccccgggagttgctgccgcccgcgcccgcgcaggtggcggcgtccggcggcacggcgtccggcggcacgcagccgccggcgggatcccggcagctgctgacggagctcgggccggcgggctgggcggcgtggctgcgcgcccaggaggcgctggccgtcaccgacaccaccctgcgtgacgcccaccagtcgctgctggccacgaggctgcgcagcttcgacatcctggcggccgccccgtcgtacgccgcgctgacgccgaacctgctgagcctggaggcctggggcggggcgacctacgatgtcgcgctgcgctttctcgcggaggatccgtgggagcggctcgccgcgctgcgccaggccgcgccgaacatctgcctgcagatgctgctgcgggggcgcaacgcggtcgggtacaccccctacccggacgacgtcgtccgggcgttcgtcgccgaggccgcggcgaccggcgtcgacatcttccggatcttcgatgcgctgaacgacatcgagcagatgcgcccggcgatcgaggcggtgctcggtaccggggcgatcgccgaagggacgctctgctacaccggtgacctctccgacccggcggagcggatctacaccctcgactactacctgcgcctcgccgaagagctcgtcgagacgggtgtgcatgtgcttgccgtgaaggacatggcgggactgctgcgcccggcggcggcggccacgctggtgacggccctgcgggagcgtttcgaccggcccgtccacctgcatacccacgacaccgcgggcggccagctcgccaccctgctcgcggcgtccgcggccggggtggacgcggtggacgccgccgccgcgccgatgtccggcggcaccagccaggtcaacatgtccgcgctggtggcggcgaccgaccacactccccgggcgaccggcatcgcgctgtccgcgctgtccgcgatggagccgtactgggaggctgtgcgcgacctctacgccccgttcgaggcggggctgcgggccccgaccggggccgtgtaccggcacgagattcccggcggccagctgacgaacctgcgtcagcaggcgatcgcgctgggactgggggaccggtgggccgaggtcaccgagtgctacgcgatcgccaacgagctgctcggcaagcccatcaaggtgacgccgaccagcaaggtcgtcggtgacctggctctgttcatcgccggcggatccgtcgacgtggaccggttgcgtgcgcatcccgaggagttcgacctgccggccagcgtgctcggctacctcgcgggtgaactcggcacgccgccggcaggcttcgccgaaccgttccgggaacgggcgctggccgggcgccgtccgtcgccgccgtccgtcgacctcgacgcggcggacgccgacgagctctccttcccgggggcccggcgggtggccctgtccaggctgctcttccccggcccgtggaaggactatctgcgggcggtggacgcctacggggactcctccgtggtcccgaccgacggctttttgtacgggctgcggcctggcgttccgctcaccgtcaccctggagcccggggtagagatcatcgtggagctggagacgctctccgaaccggacgactccgcgatgcgcaccctgtacctgcgggtcaacggccagccccggccggtgcgggtccgggacgcgtccatcacggccaccaccacggcggcccgtcgggcggacgccgccgatccgaaccaggtgggcgccgggctgccgggcatcgtcacgttcagcgtcgcggtgggcgacacggtgacgaagggccagcggctggcggtggtggaggcgatgaagatggaggccgcggtgaccagcccggtgggcgggaccgtcgtggagctcgtccgctccagcggcgactccgtcgaggtcggcgacctgctgcttactctgcgttcctga

SEQ ID NO: 96900 - protein, 1136 aa, Frankia sp. CcI3
MRKVLVANRSEIAVRVFRAAQELGLRTVAVYTPEDVSALHRTKASEAYEIGGPGHPVRGYLDIDALLTVAKQAEADALHPGYGFLSESAVLADACATAGVTFVGPPPAVLRLTGDKVAARDAALAAGLPVLRASVPLPEGAGALAAAEEVGFPLFVKASAGGGGRGLRRVERPADLADAVASASREAAAAFGDGTIFLEQAVDRPRHIEVQILADAYGNIIHLYERDCSVQRRHQKVVEIAPAPQLDEAVRASICADAVRFARHVGYVNAGTVEFLLGADDRYTFMEMNPRIQVEHTVTEEVTGVDLVAAQLRIADGESLAGLNLTQEQIVLRSTAIQCRVTTEDPSDGFRPDIGTISFYQSPGGPGVRLDGATYPGAEVSPYFDSLLVKLTTRGNTLEKAARRARRALNEFRVRGVRTNIDFLVRLLADPGFLAGGVSTSFIDERPELLAPGKGADPTSRLLARLAESTVNGFPRPAVALTDPRELLPPAPAQVAASGGTASGGTQPPAGSRQLLTELGPAGWAAWLRAQEALAVTDTTLRDAHQSLLATRLRSFDILAAAPSYAALTPNLLSLEAWGGATYDVALRFLAEDPWERLAALRQAAPNICLQMLLRGRNAVGYTPYPDDVVRAFVAEAAATGVDIFRIFDALNDIEQMRPAIEAVLGTGAIAEGTLCYTGDLSDPAERIYTLDYYLRLAEELVETGVHVLAVKDMAGLLRPAAAATLVTALRERFDRPVHLHTHDTAGGQLATLLAASAAGVDAVDAAAAPMSGGTSQVNMSALVAATDHTPRATGIALSALSAMEPYWEAVRDLYAPFEAGLRAPTGAVYRHEIPGGQLTNLRQQAIALGLGDRWAEVTECYAIANELLGKPIKVTPTSKVVGDLALFIAGGSVDVDRLRAHPEEFDLPASVLGYLAGELGTPPAGFAEPFRERALAGRRPSPPSVDLDAADADELSFPGARRVALSRLLFPGPWKDYLRAVDAYGDSSVVPTDGFLYGLRPGVPLTVTLEPGVEIIVELETLSEPDDSAMRTLYLRVNGQPRPVRVRDASITATTTAARRADAADPNQVGAGLPGIVTFSVAVGDTVTKGQRLAVVEAMKMEAAVTSPVGGTVVELVRSSGDSVEVGDLLLTLRS

SEQ ID NO: 96901 - DNA, 3453 bp, Staphylococcus aureus subsp. aureus NCTC 8325; identical to SEQ ID NO: 9806
  CDS (1)..(3453): transl_table=11

SEQ ID NO: 96902 - protein, 1150 aa, Staphylococcus aureus subsp. aureus NCTC 8325; identical to SEQ ID NO: 9807

SEQ ID NO: 96903 - DNA, 3504 bp, Ralstonia metallidurans CH34
  CDS (1)..(3504): transl_table=11
atggacttcgccccgatcaagtcgttgttgattgccaaccgttccgagatcgcgattcgcgtgatgcgggccgccgccgagatgagcatccgcacagtcgctatctactcgaaggaggaccggctcgcgcttcatcgcttcaaggccgatgagagctatctggttggcgacggcaagaagccgctggcggcttacctcgatatcgaagacgttctgcggatcgcccggcaggcaaaggtcgacgcgattcacccggggtatggttttctgtccgagaacccggacttcgcccaggcggtcatcgacgctggcattcgctggatcgggccatcgcctgaagtcatgcggatgctcggcaacaaggtggcggcgcgtaatgcggccattgcggcgggtgtgcccgtcatgccggcgaccgatccgctgccgctcgatctggccgagtgcaagcgcctggcggccggcattggctatccgttgatgctcaaggcgagctggggtggtggtggccgtggcatgcgggtactggagagcgaacaggacctggagccttcgctggcggcggcccgtcgcgaggcgctggccgcgtttggcaacgacgaggtgtacctggagaagctggtgcgcaacgcgcgccacgtcgaggtgcagatcctgggcgacacgcacggcaatctcgtgcatctgcacgagcgtgactgcacggtgcagcggcgcaaccagaaggttatcgaacgcgcgcctgcgccatacatggatgcggccggtcgcgcgtcactgtgcgacgcggcgctgcgcctgatgggcgcggtcggctattcgcacgccggcacggtggaattcctgatggatgcggacacgaacaagttctacttcatcgaggtcaatccacgtatccaggtggaacacacggtcaccgaaatgatcacggggatcgacatcgtcaaggcacagatccgcgtcacggaaggcggccggatcggcatgaccgaagacacgctcgacgagaacggcgatatcaccacgcgcgcggcgggcgtgccgccgcaggcccagattccgctcaatggccacgcgctgcaatgccggatcacgtccgaggaccctgagaatggcttcctgccggactatggccgtctcaccgcgtatcgcagcgcggccggcttcggggtgcgcctggatgccggcaccgcctatggcggcgcggtgatcacgccgtactacgattcgctgctggtcaaggtcaccacctgggcgccgacggccgccgagtcgatccgccgcatggatcgcgccctgcgcgagttccgcattcgcggggtgtcctccaacctgcagttcctggagaacgtcatcaaccatcccgcgtttgggagcggtgacgtcaccacgcgctttatcgacctgacgccggaactgctggccttcaccaaacggcgtgataccgccaccaagctgttgagctatctgggcgacgtcagcatcaacggtcatcaggaaatgacgggccgcgcggtgccgcagttgccgcttccgaggccagtcctgccggtggttgacaccaccagaccgcttcccctcggcacgcgcgatcgactgcgtgaactgggcgcggagaaattcgcaagctggatgctggatcagaagcaggtgctgctgaccgacaccaccatgcgcgatgcgcaccagtcgttgtttgccacacggatgcgtacggcagacatgctgccgatcgcgccgttctacgccagcgagctgtcgcaactgttttcgatggagtgctggggcggcgccacgttcgacgtggccttgcgcttcctgaaggaagacccgtggcagcgcctggcgcaactgcgcgagcgcgtgccgaacatcctgttccagatgctgctgcgcggctcgaatgccgtcggttacacgaactacgcggacaacgtggtgcgtttcttcgtcaagcaggccgccagtaccggcgtggacgtattccgcgtgttcgattcgttgaactgggtgcgcaacatgcgcgtggcgatcgacgccgtaggcgaaaccggcgcgctgtgcgaaggtgcgatttgctatacgggcgatctgttcgatggctcccgccccaagtacgacctgaagtactacgtgggcatcgcccgcgaactgcaacgcgctggcgtgcacgtgctcggcatcaaggacatggcgggtatctgccgcccccaggccgctgcggcgctggtcaaggcgctgaaggaagagaccgggctgcccgtgcatttccacacacacgataccagcggcatttcagcggcatcggcactggctgccatcgaggcgggctgcgatgccgtcgacggcgcgctggacgcgatgagcgggctcacgtcgcaaccgaacctgtcgagtattgtcgccgcgctggccggcagcgagcgcgatcccggactcagtctggaccgcctgcacgaagcgtcgatgtattgggagggcgtgcgccgctactacgcgccgttcgagtccgaaattcgcgctggtactgccgacgtctatcgccacgagatgccgggtggccagtacacgaacctgcgcgagcaggctcgctcgcttggcatcgagcatcgatggaccgaagtgtcgcgcgcctacgccgacgtcaaccggatgttcggtgacatcgtgaaggtgacgcctacgtcgaaggtggttggcgatctggcgctgatgatggtggccaacgatatgacggcagcggatgtgtgcgatccgaacaaggaggtggcattccccgaatccgtggtgtcgctgttcaagggcgaactgggcttcccgccggatggcttcccggccgagctttcgcgcaaggtgctccgaggtgagccgcccgcgccgtaccgtccgggcgacctgatcccggccgtcgatctcgatgtcgtccgcgcacagggtgaggccgcctgcgagcagccgctcgatgacatgcaactggcgtcgtacctgatgtatccgaagcagacggtcgagtaccacgcgcatgtgcgcgcctatagcgatacatcggtgctgccgaccccggcctatctgtacgggctgcagccccaggaagaagtggccgtcgacattgcggcgggcaagacactcctcgtctcgctgcaaggcactcaccccgatgccgaagagggcgtgatcaaggtccagttcgagctgaacggccagtcgcgcacggccctgatcgagcagcgcagtacggtcagcgtggccacggcccgacagggccgccaggttgcggatcccgagaacccgttgcacatcgccgcgccgatgccgggctcgatcgtgaccgtggcggtgcagcccgggcagcgtgtggcagccggcacgacgctgctcgcgctggaggcgatgaagatggagacccacatcgcggccgatcgcgacggcgagatcgctgccgtgcacgtcaagcctggcgaccgcgtggcagcgaaggatctgctgatcgagttgaagggttga

SEQ ID NO: 96904 - protein, 1167 aa, Ralstonia metallidurans CH34
MDFAPIKSLLIANRSEIAIRVMRAAAEMSIRTVAIYSKEDRLALHRFKADESYLVGDGKKPLAAYLDIEDVLRIARQAKVDAIHPGYGFLSENPDFAQAVIDAGIRWIGPSPEVMRMLGNKVAARNAAIAAGVPVMPATDPLPLDLAECKRLAAGIGYPLMLKASWGGGGRGMRVLESEQDLEPSLAAARREALAAFGNDEVYLEKLVRNARHVEVQILGDTHGNLVHLHERDCTVQRRNQKVIERAPAPYMDAAGRASLCDAALRLMGAVGYSHAGTVEFLMDADTNKFYFIEVNPRIQVEHTVTEMITGIDIVKAQIRVTEGGRIGMTEDTLDENGDITTRAAGVPPQAQIPLNGHALQCRITSEDPENGFLPDYGRLTAYRSAAGFGVRLDAGTAYGGAVITPYYDSLLVKVTTWAPTAAESIRRMDRALREFRIRGVSSNLQFLENVINHPAFGSGDVTTRFIDLTPELLAFTKRRDTATKLLSYLGDVSINGHQEMTGRAVPQLPLPRPVLPVVDTTRPLPLGTRDRLRELGAEKFASWMLDQKQVLLTDTTMRDAHQSLFATRMRTADMLPIAPFYASELSQLFSMECWGGATFDVALRFLKEDPWQRLAQLRERVPNILFQMLLRGSNAVGYTNYADNVVRFFVKQAASTGVDVFRVFDSLNWVRNMRVAIDAVGETGALCEGAICYTGDLFDGSRPKYDLKYYVGIARELQRAGVHVLGIKDMAGICRPQAAAALVKALKEETGLPVHFHTHDTSGISAASALAAIEAGCDAVDGALDAMSGLTSQPNLSSIVAALAGSERDPGLSLDRLHEASMYWEGVRRYYAPFESEIRAGTADVYRHEMPGGQYTNLREQARSLGIEHRWTEVSRAYADVNRMFGDIVKVTPTSKVVGDLALMMVANDMTAADVCDPNKEVAFPESVVSLFKGELGFPPDGFPAELSRKVLRGEPPAPYRPGDLIPAVDLDVVRAQGEAACEQPLDDMQLASYLMYPKQTVEYHAHVRAYSDTSVLPTPAYLYGLQPQEEVAVDIAAGKTLLVSLQGTHPDAEEGVIKVQFELNGQSRTALIEQRSTVSVATARQGRQVADPENPLHIAAPMPGSIVTVAVQPGQRVAAGTTLLALEAMKMETHIAADRDGEIAAVHVKPGDRVAAKDLLIELKG

SEQ ID NO: 96905 - DNA, 3441 bp, Silicibacter sp. TM1040
  CDS (1)..(3441): transl_table=11
atgactgagttcaacaaaatcttgatcgccaaccgtggtgagatcgccatccgcgtgatgcgcgccgccaacgagatgggcaaacgcaccgttgctgtctacgcggaggaggacaaactgggcctgcaccgcttcaaggcggacgaagcctatcgtattggcgagggtcttggcccggtcgccgcttatctctcgattgacgagatcatccgcgtggccaaggaatgcggcgcggatgcgatccatccgggctatggccttttgtcggagaaccccgactttgtggatgcctgcgcccgcaacggtatcacctttatcggccccaaggccgagaccatgcgcgcccttggcgacaaggccagcgcgcgccgcgtcgccattgaggcgggcgtgccagtgatccccgccaccgaggtgctgggcgatgacatggacgcgatccgcaaagaagcggcagaggtcggctatcccctgatgctcaaggcgagctggggcggcggcggacgcgggatgcgcccgatccactccgaggacgagctcgaggaaaaggttctggaaggtcgccgcgaggccgaagccgcattcggcaatggcgaaggctatcttgagaagatgatcacccgcgcccgtcacgtcgaggtgcagatccttggcgacaagcacggcgagatctatcacctctatgagcgcgactgttcggtgcagcgccgcaaccagaaggtcgtggaacgcgcgcccgcgccctatctcacggatgcgcaacgcgccgagatctgcgatctgggccgcaagatctgccagcatgtgaactatgaatgtgcgggcaccgtcgaattcctaatggatatggagacggagaagttctacttcatcgaggtgaacccgcgggtgcaggtggaacacaccgtcaccgaagaagtcaccggcatcgacatcgtgcaggcgcagatcctgattgccgagggcaagaccctcgcagaggccaccggcaaggccagccaggaagagatttcgctcaacgggcatgcgctgcagacccgtgtgaccaccgaagatcctctcaacaacttcatcccggactatggccgcattaccgcctatcgctcggccaccggcatgggcatccgtctggatggcggcaccgcctatgcgggtggggtgatcacgcgctactatgacagcctgctgaccaaggtaacggccaaagcgccaacgccggagaaggccatcgcccgtatggaccgcgcgctgcgcgagttccgggtgcgcggtgtcagcacaaacatcgcctttgtcgagaacctgctgaagcaccccacgttcctcaacaatgaatacaccaccaaattcatcgacgagacgccggagctgttccaattcgccaagcggcgcgaccggggcaccaaggtgctgacctatatcgcggatatttccgttaacggtcatcccgagaccgaaggccgcgccgcgccagctgccgacctcaaagagccgcgcgcgccgcgcgccgatacgggcaacctgccctatggcacgcggaacctgctggagcaaaagggcgcaaaggcggttgccgactggatgaaagcgcagcgtcagctgctcttgaccgacaccaccatgcgcgacgggcaccagtcgctgctcgccacccgcatgcggtccatcgacatgatcaaggtcgcgcctgcctatgcacagaacctcagccagctgttctcggtcgagtgctggggcggggcgacgttcgatgtggcctatcgctttttgcaggaatgcccctggcagcgtctgcgcgacctgcgcgaggcgatgccgaacctgatgacgcagatgttgctgcgcgcctccaacggggtggggtacaccaactatcccgacaacgtggtgcagttcttcgtcaaggaagcggccaagggtatcgacgtcttccgcgtgtttgacagcctcaactgggtcgagaacatgcgcgtcgccatggacgccgtggtcgagagcggcaagatctgcgaaggcaccatctgctacaccggcgacatccttgacccggcccgcgccaaatatgacgtgaaatactacgtcggcatggccaaggaactggaagccgcaggcgcgcatgtgctgggcctcaaggacatggcgggtctgttgaaaccagcctcggccaagctcttgatcaaggcgctgaaggaagaggtcggcctgccgatccacttccacacccatgacacctctggcatcgcgggcgcgaccattctggccgcggcagatgcgggcgttgatgcggtcgatgcggcgatggacgcgttttccggcggcacctcgcagccctgtctggggtcgatcgtggaggcgctcaagaacacagaccgcgacaccggtctggacattggcaacatccgcgagatctcggaatactgggagcaggtgcgcgcgcaatacgccgcctttgaatccgggctgcaagcgcccgcgtctgaggtctatctccatgagatgcccggcggtcagttcaccaacctcaaggcacaggcccgcagccttggacttgaggagcgctggcacgaggttgcgcagacctatgcggatgtgaaccagatgtttggcgacatcgtcaaagtgaccccctcctccaaggtggtgggtgacatggcgctgatgatggtctctcaggggcttacccgcgcgcaggtcgaagatcccaaatccgaagtctccttccccgactcggtggtggacatgatgcgcggcaacctgggccagcctccgggcggtttccccgaaagcatcgtcaagaaggtgctgaaaggcgaagcccccaatgttgagcgccccggtgcgcatctggagccggtcgacatcgagagcacccgcgccgaactctccaaagagctcgaaggcttcaaggtcgatgacgaggatctcaacggctatctaatgtatccgaaggtgttcctcgattacatgggccgccatcgccaatacggcccggtgcgcgcgctgccgaccaagacgttcttttacgggatggaacccggtgacgagatcaccgctgagatcgaccccggcaagacgctggaaatccgcctgcaagccattggcgagacggatgaaaaaggcgaagtgaaggtgtttttcgagctgaacggccagccgcgcgtcatccgcgtgcccaaccgtctggtgaaatcctccaccacccagcgcccaaaggccgaagtagggaacatcaaccacatcggtgcgccgatgccgggtgttgtggcctccatcggggttcaggtgggccagcaggtgcacgagggcgatctcttgctgaccatcgaggcgatgaagatggagaccggcctgcacgccgagcgcgacgcggtggtcaaggccgtccacgtccagcccggtggtcagatcgacgccaaggatctgctggtcgaactggaatga

SEQ ID NO: 96906 - protein, 1146 aa, Silicibacter sp. TM1040
MTEFNKILIANRGEIAIRVMRAANEMGKRTVAVYAEEDKLGLHRFKADEAYRIGEGLGPVAAYLSIDEIIRVAKECGADAIHPGYGLLSENPDFVDACARNGITFIGPKAETMRALGDKASARRVAIEAGVPVIPATEVLGDDMDAIRKEAAEVGYPLMLKASWGGGGRGMRPIHSEDELEEKVLEGRREAEAAFGNGEGYLEKMITRARHVEVQILGDKHGEIYHLYERDCSVQRRNQKVVERAPAPYLTDAQRAEICDLGRKICQHVNYECAGTVEFLMDMETEKFYFIEVNPRVQVEHTVTEEVTGIDIVQAQILIAEGKTLAEATGKASQEEISLNGHALQTRVTTEDPLNNFIPDYGRITAYRSATGMGIRLDGGTAYAGGVITRYYDSLLTKVTAKAPTPEKAIARMDRALREFRVRGVSTNIAFVENLLKHPTFLNNEYTTKFIDETPELFQFAKRRDRGTKVLTYIADISVNGHPETEGRAAPAADLKEPRAPRADTGNLPYGTRNLLEQKGAKAVADWMKAQRQLLLTDTTMRDGHQSLLATRMRSIDMIKVAPAYAQNLSQLFSVECWGGATFDVAYRFLQECPWQRLRDLREAMPNLMTQMLLRASNGVGYTNYPDNVVQFFVKEAAKGIDVFRVFDSLNWVENMRVAMDAVVESGKICEGTICYTGDILDPARAKYDVKYYVGMAKELEAAGAHVLGLKDMAGLLKPASAKLLIKALKEEVGLPIHFHTHDTSGIAGATILAAADAGVDAVDAAMDAFSGGTSQPCLGSIVEALKNTDRDTGLDIGNIREISEYWEQVRAQYAAFESGLQAPASEVYLHEMPGGQFTNLKAQARSLGLEERWHEVAQTYADVNQMFGDIVKVTPSSKVVGDMALMMVSQGLTRAQVEDPKSEVSFPDSVVDMMRGNLGQPPGGFPESIVKKVLKGEAPNVERPGAHLEPVDIESTRAELSKELEGFKVDDEDLNGYLMYPKVFLDYMGRHRQYGPVRALPTKTFFYGMEPGDEITAEIDPGKTLEIRLQAIGETDEKGEVKVFFELNGQPRVIRVPNRLVKSSTTQRPKAEVGNINHIGAPMPGVVASIGVQVGQQVHEGDLLLTIEAMKMETGLHAERDAVVKAVHVQPGGQIDAKDLLVELE

SEQ ID NO: 96907 - DNA, 3396 bp, Mycobacterium sp. MCS
  CDS (1)..(3396): transl_table=11
gtgatctccaaagtcctggttgccaatcgtggagaaatcgcgatccgcgcgttccgtgcggcctatgagatgggtatcgcgaccgttgcggtgtacccgtacgaggaccgcaactcgctgcaccggctgaaggccgacgagtcctatcagatcggcgagatgggccatccggtgcgggcgtatctgtcggtcgacgagatcatccgggtcgccaagcacgccggcgccgatgcggtgtatcccggctacggattcctgtcggagaacccggagttggcggccgcgtgcgcggaggccggcatcacgttcatcggcccgcgggccgaactgctggagctgaccggcaacaagtcgcgggccatcgaggccgcccgcgccgccggcctgccggtgctgcgatcgtcggcgccgtcgtcatcggtcgacgaactcgtcgcggcggccgccgacatggagttcccggtgttcgtcaaggcggtctccggcggcgggggccgcgggatgcggcgggtcaccgaccccgacgcgctggccgaggcgatcgaggcggccagccgggaggcggagtcggcgttcggcgatccgatggtctacctggagcaggcggtcgtcaatccccgccacatcgaggtacagatcctcgccgatcggcagggcgacatcatgcacctgttcgaacgcgactgcagcgtgcagcggcgccaccagaaggtcatcgagctggcgcccgcgccgaacctggatcccgaactgcggaggcggatctgcgccgacgcggtggccttcgcgcgcgagatcggctacagctacgcaggcacggtcgagttcctgctcgacgaacgcggcaggcacgtcttcatcgagatgaacccgcgcatccaggtcgagcacacggtgaccgaggagatcaccgacgtggacctggtggcgtcgcagatgcggatcgccgacggcgagacgctggccgacctcggattgagccaggagaagttggcggcgccaaggggtttcgccatgcagtgccggatcaccaccgaggacccggccaacggcttccgccccgacaccggacgcatcaccggctaccgctcgcccggcggtgcggggatccgcctggacggcggcaccgtgctcggcgcggagatcagcgcccacttcgactccatgctggtcaagctgacctgccggggccgggacttctccaccgcggtgtcgcgggcccggcgcgcgctggccgagttccgggtgcgcggggtgtcgacgaacatcccgttcctgcaggccgtcgtcaacgatccggatttccgcgcgggccgcgtcaccacgtcgttcatcgacgaacggccctacctgctgacctcccgcacacccgcggaccggggcaccaagatcctcaactacctggccgacgtgaccgtcaaccagccgcacggcccgcgcccgtcgacggtgtatccgcaggacaagctcccgcagatcgaccacacgacaccgccgccggccggcagcaagcagaagctcgtcgagctcgggcccgaaggcttcgcccgctggatgcgggattcaccggcggtcgggttgaccgacaccacgttccgggacgcccaccagtcgctgctggccacccgcatccgcacgaccgggctgctgatggtcgcaccgcacatcgcccggatgacaccggagttgctgtcgctcgaatgctggggtggggcgacctacgatgtggcgctgcgcttcctgaaggaagacccgtgggagcggctggccgccctgcgcgaggcggtgccgaacatctgcctgcagatgctgctgcgcggccggaacacggtgggctacacgccctatccggagacggtgaccacggcgttcgtcgaggaggcgaccgcgaccggtatcgacatctaccgcatcttcgacgcactcaacaacgtcgagtcgatgcgtccggcgatcgacgccgtgcgccaaaccggtacggccgtcgccgaagtcgcgatgtcctacaccggtgacctgtcgaacccggcggagaacctctacacgctggactactacctgcgactggccgaacagatcgtcgaggccggcgcccatgtgctggcgatcaaggacatggcggggctgctgcgcccgcaggccgcggcgaaactggtcggggcgctgcgctcgcgcttcgacctgccggtgcacgtgcacacccacgacaccccgggtggtcaactggccacctatctggccgcgtggcaggcgggtgcgtccgcggtcgacggcgccgcggccccgctggcgggcaccaccagccagccggcgttgagttcgatcgtcgccgctgcggcgcacaccgaatacgacaccggagtgtcgctggaagcggtgtgcgaactggagccgtactgggaagcgctgcgaaaggtgtacgcccccttcgacgttgcggcatccggccctcctacccccaccgggcgggtctaccgacacgagatcccgggcggtcagctgagcaacctgcgccagcaggcgatcgcactggggctgggggaccgcttcgaggagatcgaggaggcctacgccgccgccgaccgcatcctgggccggctggtgaaggtgaccccgtcgagcaaggtggtcggcgacctcgcgctggcgctggtcggtgcgggtatcaccgccgacgaattcgccgaggacccggcccggttcgacatccccgacagcgtgatcggtttcctgcgaggcgaactcggtgacccgcccggaggatggccggaaccgctgcgcagcaaggcgctggccggacgcgccccggccaaacccgtcgaggaactgtccgccgaggacgaggcggtgctggcccagcccggcgtcaaacgccaggcggcgctcaaccgcctgctgttccccgggcccaccaaggaattcgaggcgcaccgcgagacctacggggacacttcgcggttgagcgccaaccagttcttctacggcctgcgccacggtgacgagcaccgcgtcgtgctcgaacgcggtgtggaactgctgatcggactcgaggcggtctccgatccggacgaacgcggcatgcgcacggtgatgtgcatcctcaacgggcagctgcgccccgtactggtgcgcgaccacagcgtcgcgagcgacgtgccgaccgccgagaaggccgaccgcgccaatcccgaccacatcgccgccccgttcgccggggtggtcaccgtcggcgtcgaggtcggtgacaccgtgagcgccggggagaccatcgcgaccatcgaggcgatgaagatggaggccgcgatcaccgcaccgaaggccggcaccgtcgagcgggtcgcggtctcggccaccgcccaggtcgagggcggcgacctgctggtggtcgtcagctga

SEQ ID NO: 96908 - protein, 1131 aa, Mycobacterium sp. MCS
MISKVLVANRGEIAIRAFRAAYEMGIATVAVYPYEDRNSLHRLKADESYQIGEMGHPVRAYLSVDEIIRVAKHAGADAVYPGYGFLSENPELAAACAEAGITFIGPRAELLELTGNKSRAIEAARAAGLPVLRSSAPSSSVDELVAAAADMEFPVFVKAVSGGGGRGMRRVTDPDALAEAIEAASREAESAFGDPMVYLEQAVVNPRHIEVQILADRQGDIMHLFERDCSVQRRHQKVIELAPAPNLDPELRRRICADAVAFAREIGYSYAGTVEFLLDERGRHVFIEMNPRIQVEHTVTEEITDVDLVASQMRIADGETLADLGLSQEKLAAPRGFAMQCRITTEDPANGFRPDTGRITGYRSPGGAGIRLDGGTVLGAEISAHFDSMLVKLTCRGRDFSTAVSRARRALAEFRVRGVSTNIPFLQAVVNDPDFRAGRVTTSFIDERPYLLTSRTPADRGTKILNYLADVTVNQPHGPRPSTVYPQDKLPQIDHTTPPPAGSKQKLVELGPEGFARWMRDSPAVGLTDTTFRDAHQSLLATRIRTTGLLMVAPHIARMTPELLSLECWGGATYDVALRFLKEDPWERLAALREAVPNICLQMLLRGRNTVGYTPYPETVTTAFVEEATATGIDIYRIFDALNNVESMRPAIDAVRQTGTAVAEVAMSYTGDLSNPAENLYTLDYYLRLAEQIVEAGAHVLAIKDMAGLLRPQAAAKLVGALRSRFDLPVHVHTHDTPGGQLATYLAAWQAGASAVDGAAAPLAGTTSQPALSSIVAAAAHTEYDTGVSLEAVCELEPYWEALRKVYAPFDVAASGPPTPTGRVYRHEIPGGQLSNLRQQAIALGLGDRFEEIEEAYAAADRILGRLVKVTPSSKVVGDLALALVGAGITADEFAEDPARFDIPDSVIGFLRGELGDPPGGWPEPLRSKALAGRAPAKPVEELSAEDEAVLAQPGVKRQAALNRLLFPGPTKEFEAHRETYGDTSRLSANQFFYGLRHGDEHRVVLERGVELLIGLEAVSDPDERGMRTVMCILNGQLRPVLVRDHSVASDVPTAEKADRANPDHIAAPFAGVVTVGVEVGDTVSAGETIATIEAMKMEAAITAPKAGTVERVAVSATAQVEGGDLLVVVS

SEQ ID NO: 96909 - DNA, 3387 bp, Rubrobacter xylanophilus DSM 9941
  CDS (1)..(3387): transl_table=11
atgctgcggaaggtgcttgtggccaaccggggggagatcgccatccgggccttcagggcggcctacgagctgggtatccggacggtcgcggtctacacccccgacgaccgggcctcaatgcaccgccagaaggccgacgaggcctacgagataggcgagccggggcacccggtgcgggcctatctggacatcggggcgctggtcggcaccgccgcgcgggtgggggcggacgccatctaccccggctacggctttctctcggagagcgcaaagttcgccgccgcctgcgaggaggccgggataaccttcgtggggccgccgccggaggtgctctcgctcaccggggacaaggtgcgcgcccgggaggccgcccgcgaggccggggtgccggtgctgcgggcctcggggcccgtggcgaccgccgaggaggcgctcgccgccgccgaggaggtgggctatccggtcttcgtgaaggccgccgggggcgggggcgggagggggctcaggatggtccgccgggcgcgggatctcccgggggcggtgcagaccgccatgcgggaggcccaggcggccttcgggaaccccaccgtgtttctggagcaggcgctggagcacccgcggcacatagaggtgcagatcctcggggacgctggcggggaggtcatccacctcttcgagcgcgactgctcggtgcagcggcgccaccagaaggtgctggagatggcccctgcccccaacctggacccgcagctgcgcgagaggctgtgcgaggacgcggtgcgcttcgggcgggcggtgggctaccgcaatgcggggacggtggagtttctggtgggcgaggacggctcccacgtcttcatcgagatgaaccccaggatccaggtcgagcacaccgtcaccgaggagaccaccgacgtggacatcgtccacgcccagctgaggatcgccgggggcgagacgctcgccgacctggggctgcgccaggaggagatccgccagcggggggtcgccctgcagtgccgggtgaccaccgaggaccccgcccagggcttccggccggacacgggcaggatctcggtctaccgctcgccgggcggggcgggcatccggctcgacggcggcaactccttcgccggggcggaggtcaccccgtacttcgactccctcctggtgaagctcaccacccgcggcccggacctcgccgccgcggcccgtagggccaggagggcgctggcggagttcagggtgcggggggtggccaccaacatcgcctttctgcgggccgtcctcgacgacccggactttctggccggcaggatagacacctcgttcatagaccggcggccgcacctcacggccgtgggcaccggcagggaccgggcgagccgcctgctctcgctgctggccgacgtcacggtgaaccggccccacggtccgccgcccgacctcccggacccccgggggaagctccccccgctgccttccgcggacccccccgccggcagcaggcagcgcctgcgggagctcgggcccgagggcttcgcccgctggatgcgggaggagcggcgggtgctcgtcaccgacaccaccctgcgggacgcccaccagtcgcttctggccacccggatgcgcaccttcgacatgctcgccgccgcgccccacatcgcccggaggctgcccgcgctcctctccgccgaggtgtggggcggggccaccttcgacgtggcgctgcgctttctgcacgaggacccctgggagcggctggcccgcctgcgggaggcgatgcccaacgtctgcctgcagatgctgctgcgcggtcagaacgtcgtgggctacacccgctacccgccggaggtggtccgggccttcgtggaggaggcccgcagcaccggcatagacatcttccgcatcttcgacgccaacaacgacgtcgagcagatgcgcggggccatagaggccgcggcggaggccggggcgctcgccgagggctgcctgtgctacaccgcagacctctccgacccggacgagcccctctacaccctggactactacctgaggctggccgaggggctcgtggaggccggctgccacgtgctgtgcataaaggacatggccggccttttgcgggccccggccgcccgcgcgctcgtcggggcgctgcgggagcgcttcgacctgccggtgcacctgcacacccacgacacctccggggggcagctcgccacctacctcgccgccatcgaggccggggtggacgccgtggacggggcggcggccccgctctccgggatgaccagccagcccagcctctccgccatcgtggccgccaccgagcacaccgcgcgcgccaccgggctctccctcgacgccctgggagacatggagccctactgggaggcggtgcgcagcctgtacgcccccttcgaggcggggctgcgctcgcccaccggcaccgtctacaggcacgagatccccggcggccagctctccaacctgcgccagcaggcgatctcgctgggcctcggcgaccgcttcgaggaggtcgaggagtactacgcccgctgcgaccggctgctcgggcgcctggtgaaggtaacccccaccagcaaggtggtgggggatctcgcgctctacctgctctcggcgggcgtggacccggaggagttcgcgcgggacccgggctcctacgacctgccggagagcgtgatcggctttctgcgcggggacctcggcgaccccccgggcggctggcccgagcccctccggacgcgggccctctccgggcgctccctccctaaggaggacggggcgctctctggggaggatctcaaggccctctctgcggaggagggccgccgggaggcgctcaaccggctcatgctgcccggcccggcccgcgagcagaaacaggccgaggagcgctacggggacgtctccgtcatccccagccgggcctttctctacgggctcgagaccggggaggagctcgccgtggacctcgagcccggcgtcaggctctacgtgcggctcgaggccatcaccgagcccgacgagcagggcatacgcaccctcatgatgaccctcaacggccagccgcgcccggtggacgcccgcgaccgctcgctggcgccggaggccccggcccgcgagaaggccgacccctcggagcccgggcacgtcgccgccccgatgagcggggtggtgagcctggcggtgcgggagggccaggcggtcgaggagggcgaggagatcgggagcatagaggcgatgaagatggagtccgccatccgctccccgctctccggcacggtgcggcgcatcgccgtgctccccgggaccaacgtggagccgggggacctcctcgtggtgatctccggtggggggtga

SEQ ID NO: 96910 - protein, 1128 aa, Rubrobacter xylanophilus DSM 9941
MLRKVLVANRGEIAIRAFRAAYELGIRTVAVYTPDDRASMHRQKADEAYEIGEPGHPVRAYLDIGALVGTAARVGADAIYPGYGFLSESAKFAAACEEAGITFVGPPPEVLSLTGDKVRAREAAREAGVPVLRASGPVATAEEALAAAEEVGYPVFVKAAGGGGGRGLRMVRRARDLPGAVQTAMREAQAAFGNPTVFLEQALEHPRHIEVQILGDAGGEVIHLFERDCSVQRRHQKVLEMAPAPNLDPQLRERLCEDAVRFGRAVGYRNAGTVEFLVGEDGSHVFIEMNPRIQVEHTVTEETTDVDIVHAQLRIAGGETLADLGLRQEEIRQRGVALQCRVTTEDPAQGFRPDTGRISVYRSPGGAGIRLDGGNSFAGAEVTPYFDSLLVKLTTRGPDLAAAARRARRALAEFRVRGVATNIAFLRAVLDDPDFLAGRIDTSFIDRRPHLTAVGTGRDRASRLLSLLADVTVNRPHGPPPDLPDPRGKLPPLPSADPPAGSRQRLRELGPEGFARWMREERRVLVTDTTLRDAHQSLLATRMRTFDMLAAAPHIARRLPALLSAEVWGGATFDVALRFLHEDPWERLARLREAMPNVCLQMLLRGQNVVGYTRYPPEVVRAFVEEARSTGIDIFRIFDANNDVEQMRGAIEAAAEAGALAEGCLCYTADLSDPDEPLYTLDYYLRLAEGLVEAGCHVLCIKDMAGLLRAPAARALVGALRERFDLPVHLHTHDTSGGQLATYLAAIEAGVDAVDGAAAPLSGMTSQPSLSAIVAATEHTARATGLSLDALGDMEPYWEAVRSLYAPFEAGLRSPTGTVYRHEIPGGQLSNLRQQAISLGLGDRFEEVEEYYARCDRLLGRLVKVTPTSKVVGDLALYLLSAGVDPEEFARDPGSYDLPESVIGFLRGDLGDPPGGWPEPLRTRALSGRSLPKEDGALSGEDLKALSAEEGRREALNRLMLPGPAREQKQAEERYGDVSVIPSRAFLYGLETGEELAVDLEPGVRLYVRLEAITEPDEQGIRTLMMTLNGQPRPVDARDRSLAPEAPAREKADPSEPGHVAAPMSGVVSLAVREGQAVEEGEEIGSIEAMKMESAIRSPLSGTVRRIAVLPGTNVEPGDLLVVISGGG

SEQ ID NO: 96911 - DNA, 3477 bp, Mesorhizobium sp. BNC1
  CDS (1)..(3477): transl_table=11
gtgcagattaagaaactccttgtcgccaatcgttccgagattgccattcgcatcttccgcgccgcgaacgagcttggcatccgaacggtcgccatatgggcggaggaggacaaatacgcgctgcaccgtttcaaggcggacgagtcttatcaggtcggccgcggcccgcatctggagcgcgaccttggcccgatcgagagctatctctcgattgacgaggtgatccgcgtcgccaggctttcgggtgccgacgccatccatccaggctacggcctcctttccgaaagcccggaattcgccgaggcctgcgcggcaaacggcatcgtctttatcggcccctcccctgaaaccatgcgccggctcggcaacaaggtggccgcgcgcaacctggcagttgaagtgggcgtgcccgtcgtcccggcaacggaacccttgccggacgacatggacgcggtcgcgaaaatggcggcggagatcggcttccccgtcatgctgaaagcctcctggggcggcggcgggcgcggcatgcgcgtcatccgttccgaggccgaccttaaacgcgaggtaatggaagccaagcgcgaggcgaaggcggccttcggaaaggacgaggtctatctggagaagctggtcgagcgcgcccgtcacgtggaagtgcaggtgctgggcgatacgcacggcaatgccgtccatctcttcgagcgcgactgctcgatccagcgccgcaaccagaaggtcgtcgagcgcgctccggcgccctatctcgacaatgcaaaacgcggggaattgtgcggttacgcgctgaagatcgccgaagccaccaagtatatcggcgccggcacggtcgagttcctgatggacgccgatacgagcgccttctatttcatcgaggtcaatccgcgcatccaggtcgagcatacggtgaccgaggaggtgaccggcatcgacatcgtcaaggcccagatccgcatcctcgaaggcgagcgcatcggcgatcctcgctccggcgtcccggcgcaggagaatatcaagcttaacggccatgctctccagtgccgcatcaccaccgaagacccggagcagaatttcatccccgactatggccgcatcaccgcctatcgcggcgccaccggcttcggcatccggctcgatggcggcacggcctattccggcgcggtcatcacccgcttttacgatccgcttctggagaaggtgacggcctgggcgccggcgccggaagaggcgatcgcccgcatggaccgcgcgctgcgcgagttccgcatacgcggcgtggcgacgaacctcacctttctcgaggcaatcatcggccatccgcatttccgcgacgcttcctacacgacacgcttcatcgacgagaccccggagctcttcgcgcaggtcaagcgccgcgaccgggcaacgaagcttctcaattatctcgcggacgtgaccgtgaacggccatcccgaagcacgcgaccggccacggcccaatccggatgcagctgcgccatgcgtgccctatatcgacgcgccgctgcaggacgggacaaagcagcttctcgacaggctcgggccggacgagttttccaaatggatgcgcgcgcagacccgagcgctcgttaccgacacgaccatgcgcgatgcacaccagtcgctgctggcaacgcgcatgcgcacattcgatatcgctcgcatcgccaatgtctatgcgcgcgccctgccgcagcttctctcgctcgaatgctggggcggagcgacgttcgacgtcgccatgcgcttcctcaccgaggacccgtgggagcgtctgcatctcatccgtgagggggcgccgaacctgctcctgcagatgcttctgcgcggggcaaacggcgtcggctacacgaactatcccgacaatgtggtgcgttatttcgtgaagcaggcggcgcagggcgggattgacctcttccgcgtgttcgactgcctcaactgggttgagaacatgcgcgtcgccatggatgcggtgcgcgaggaaggaaagctctgcgaggcgacgatctgctatacgggtgacatccttgattccgcccgtgccaaatacgacctcaaatattatctcagccttgccaaggagctcgaaaaggccggagcccatatcatcgccatcaaggatatggccgggctcttgaagccggcggcggcgcgtgtgctcttcaaagcgctgcgcgaggagacgaatctgccgatccatttccacacgcacgacacatccggcatctccgccgccacggtgctggcggcggtggaaagcggcgcggatgcagtcgatgccgcgatggatgcgctttccggcaacacttcccagccgtgcctcggctcgatcgccgaggcgctgaaaggcaccgagcgcgaccccggcctcgacacggaatggatccgccggatctccttctattgggaagcggtgcgcaaccagtacgccgccttcgagagcgatctcaagggaccggcttcagaggtctatctccacgagatgccgggcggccagttcaccaatttgaaggagcaggcccggtcgctggggcttgagacccgctggcatgaggtggcccgcgcctatcatgacgtgaacatgatgttcggcgatatcgtcaaggtcaccccctcctccaaggtcgtgggcgacatggcattgatgatggtgagccaggatttgaaggtcgctgacgtggagaaccctcagaaggatatagccttcccggattcggtggtctccatgctgcgcggcgatctcggccagtcgccgggcggttggccgaaggcactgcagaagaaggctctcaagggcgaaaagccaatcaccgtgcgccccggctccctgctcaggcccgccgacctcgacgccagccgcaaggaactggaggaaaagcttggccgcaaggtcagcgatttcgagttcgcctcctggcttatgtatcccaaggtctttgtcgatttcgccaccgcctcggagatctacggtccagtcagcgtcctgccgacgccggtctatttctacggcatgagccaggaagacgagattttcgttgagatcgagcgcggtaagacgctggttatccgctgcctcgccgtgggcgagccaaatgaaaagggcatggtgacggtcttcttcgagcttaacggccagccgcgtcgcgccaaggtgccggaccgccgccgtggagcttccgcgcttgccgtacgccggaaggcggagaccggcaacgacagccatgtcggggcaccgatgccaggcgttgtctcatcggttgccgtatcgcccggccaggaggtctcggcaggcgacgtgctcctctccatcgaggcgatgaagatggagactgcgctgcatgcggagcgcgacggcaggatagccgaggtcctggtgaaggcgggtgaccagattgacgccaaagacctgctcattgtcttgcaaaacggcagttccggtgattga

SEQ ID NO: 96912 - protein, 1158 aa, Mesorhizobium sp. BNC1
MQIKKLLVANRSEIAIRIFRAANELGIRTVAIWAEEDKYALHRFKADESYQVGRGPHLERDLGPIESYLSIDEVIRVARLSGADAIHPGYGLLSESPEFAEACAANGIVFIGPSPETMRRLGNKVAARNLAVEVGVPVVPATEPLPDDMDAVAKMAAEIGFPVMLKASWGGGGRGMRVIRSEADLKREVMEAKREAKAAFGKDEVYLEKLVERARHVEVQVLGDTHGNAVHLFERDCSIQRRNQKVVERAPAPYLDNAKRGELCGYALKIAEATKYIGAGTVEFLMDADTSAFYFIEVNPRIQVEHTVTEEVTGIDIVKAQIRILEGERIGDPRSGVPAQENIKLNGHALQCRITTEDPEQNFIPDYGRITAYRGATGFGIRLDGGTAYSGAVITRFYDPLLEKVTAWAPAPEEAIARMDRALREFRIRGVATNLTFLEAIIGHPHFRDASYTTRFIDETPELFAQVKRRDRATKLLNYLADVTVNGHPEARDRPRPNPDAAAPCVPYIDAPLQDGTKQLLDRLGPDEFSKWMRAQTRALVTDTTMRDAHQSLLATRMRTFDIARIANVYARALPQLLSLECWGGATFDVAMRFLTEDPWERLHLIREGAPNLLLQMLLRGANGVGYTNYPDNVVRYFVKQAAQGGIDLFRVFDCLNWVENMRVAMDAVREEGKLCEATICYTGDILDSARAKYDLKYYLSLAKELEKAGAHIIAIKDMAGLLKPAAARVLFKALREETNLPIHFHTHDTSGISAATVLAAVESGADAVDAAMDALSGNTSQPCLGSIAEALKGTERDPGLDTEWIRRISFYWEAVRNQYAAFESDLKGPASEVYLHEMPGGQFTNLKEQARSLGLETRWHEVARAYHDVNMMFGDIVKVTPSSKVVGDMALMMVSQDLKVADVENPQKDIAFPDSVVSMLRGDLGQSPGGWPKALQKKALKGEKPITVRPGSLLRPADLDASRKELEEKLGRKVSDFEFASWLMYPKVFVDFATASEIYGPVSVLPTPVYFYGMSQEDEIFVEIERGKTLVIRCLAVGEPNEKGMVTVFFELNGQPRRAKVPDRRRGASALAVRRKAETGNDSHVGAPMPGVVSSVAVSPGQEVSAGDVLLSIEAMKMETALHAERDGRIAEVLVKAGDQIDAKDLLIVLQNGSSGD

SEQ ID NO: 96913 - DNA, 3405 bp, Rhodococcus sp. RHA1
  CDS (1)..(3405): transl_table=11
atgttctccaaagtcctggtcgccaaccgtggcgaaattgcgatccgcgctttccgtgccgcctacgaactaggtgctggaacggtcgcggtgttcccgtacgaggatcggaactcgatccaccgtctgaaagctgatgagagttatcagatcggcgaggagggacacccggttcgggcgtacctctccgtcgacgagatcgtctccgcggccaagcaggcaggcgccgacgccatctaccccggctacggcttcctttccgagaacccggatctcgccgccgcgtgcgccgaggcgggcatcacgttcgtgggtccctccgccgaggtgctcgagctcaccggcaacaaggcgcgtgcgatcgccgcggcgaaggccgccggtctgccggtgctggcgtcgtcggagccgtccgccgatgtggacgagttgctggccgcggccgagaccatgcagttcccgctgttcgtgaaggccgtcgccggcggcggtggccgcggcatgcgccgcgtcgccgagcgggctcagctcaaggagtccatcgaggccgccgcgcgtgaggccgagtcggccttcggcgacccgacggtattcctcgaacaggccgtcgtcgacccgcgtcacatcgaggtccagatcctggccgacggtcagggcaacgtcatccacctgttcgagcgggactgctcgctgcagcgccgccaccagaaggtgatcgagctcgcgccggccccgaacctttcggaagagctgcgggcgaagatttgcgcggacgcagtggcgttcgcgaaggagatcaactactcctgcgcgggcaccgtcgaattcctcctcgacacccgcggcaaccacgtcttcatcgagatgaacccccgcatccaggtcgagcacaccgtcaccgaagaggtcacggacgtcgacctcgtgcagtcgcagctgcggatcgcgtcgggggagaccctcgcggacctgggcctgagccaggacaagatcacgctgcgcggtgcggctctgcagtgccgcatcaccaccgaggaccccgccaacgggttccgcccggacaccggccggatcaccgggtaccgcaccccgggtggtgccggcatccgcctcgacggcgggacgtcggtcggcgcggaggtttccgcgtacttcgattcgatgctcgtcaagctgacgtgccgcggccgcgacttcgagaccgccgtcgcccgggcccgccgcgcggtcaccgagttccgcattcgcggtgtgtcgacgaacatcccgttcctgcaggcggtgctcgacgaccccgatttcaaggccggccgggtcaccacgtcattcatcgaggagcgcccccagctgctcacgctgcgcagctccgccgaccgtggcaccaagatcctcacctacctcgccgacgtgacggtcaacaagccgcacggcgagcggccgtcggcggtgtacccgcgcgacaagctgccccagatcgacctgtccaccccgccgccggacggcagccgtcagaagctgctcgccctcgggccggagggattcgccaaggcactgcgggagcagaaggccctcgccgtcaccgagaccacgttccgtgacgcacaccagtcgctgctcgcgacccgcgtgcggaccagcggtctgctcgacgtcgccgggcacgtcgcccggctgacccccgagctgctgtccatcgaggcgtggggtggtgcgacctacgacgtggcgctgcggttcctgcacgaggacccctggtaccggctggccgctctgcgcgaggccgtgccgaacatctgtttgcagatgctgctgcgcggacggaacaccgtcggctacaccccgtacccggagaaggtgacgcgggcgttcgtcgaggaggccaccaacagcggcatcgacatcttccgcatcttcgacgccctcaacaacgtcgaccagatgcgaccggccatcgacgccgtccgcgagaccggcaccgctctcgccgaggtcgccctgtcctacaccggcgacctgtcgaacccggacgagaagctgtacaccctcgactactacctgcgcctggcggaggagatcgtcgaggccggtgcgcacatcatcgcgatcaaggacatggccggactgctccgcgcccccgccgccacgaccctggtgacggcgctgcgcgagaacttcgacctgcccgtgcacgtgcacacccacgacaccccgggtggtcagctcgcgacgtacctggccgcatggcaggcaggcgcggatgcggtcgacggtgcctcggccgcgatggcgggcaccaccagccagccggcgttgtcggcgatcgtggccgcggccgcgcactccgagtacgacaccggcctggacctgcaggccgtgtgcgacctcgagccgtactgggaagcgctgcgcaaggtgtacaagccgttcgagtccgggctgccggccccgaccggacgcgtctacacgcacgagatccccggcggccagctgtcgaacctgcgcacccaggccgttgcgctcggtctcggtgacaagttcgaggaggtcgaggccaagtacgcggccgccgaccggatgctcgggcgcctcgtcaaggtcaccccgtcgtcgaaggtggtcggcgacctcgccctgcacctcgtcggatccggagcgtccaccgaggaattcaaggagaacccggcgaagttcgacatccccgattcggtggtcgggttcctgcgcggcgaactgggcaccccgcccggcggctggcccgaaccgttccgtacccgggccctcgaaggtcgcggagccgccaagcccgaggtggctctgtccgcggacgacgagaaggcactcgcgggcacgtccgcggaacgtcgggcgacgctcaaccggttgctgttccccggcccgacgaaggaattcctcgagcaccgggacaagtacggcgacacgtcgcagctctcggcgaaccagttcttctacggcctgcgccgcggcgacgagcaccgggtccgcctcgcaccgggtgtcgagctgatcatcgggctcgaggccatttccgaacccgacgagcggggataccgcaccgtcatgtgcatcctcaacggtcagctgcgtccggtgtcggtgcgcgaccggtccatttccagtgagctcccggccgccgagaaggccgacaagaacaaccccggccatgtgccggcgccgttcgccggtgtggtgaccctcgccgtgaccgagggccagcacatcgccgccggcgacacgatcgcgaccatcgaggccatgaagatggaagcggccatcaccgccccgcgaagtggcacggtctcccggctggccatcggatcggtccagcaggtggagggcggcgacctcctcgccgtcgtgtcgacgggggagtccgcgagcgagtga

SEQ ID NO: 96914 - protein, 1134 aa, Rhodococcus sp. RHA1
MFSKVLVANRGEIAIRAFRAAYELGAGTVAVFPYEDRNSIHRLKADESYQIGEEGHPVRAYLSVDEIVSAAKQAGADAIYPGYGFLSENPDLAAACAEAGITFVGPSAEVLELTGNKARAIAAAKAAGLPVLASSEPSADVDELLAAAETMQFPLFVKAVAGGGGRGMRRVAERAQLKESIEAAAREAESAFGDPTVFLEQAVVDPRHIEVQILADGQGNVIHLFERDCSLQRRHQKVIELAPAPNLSEELRAKICADAVAFAKEINYSCAGTVEFLLDTRGNHVFIEMNPRIQVEHTVTEEVTDVDLVQSQLRIASGETLADLGLSQDKITLRGAALQCRITTEDPANGFRPDTGRITGYRTPGGAGIRLDGGTSVGAEVSAYFDSMLVKLTCRGRDFETAVARARRAVTEFRIRGVSTNIPFLQAVLDDPDFKAGRVTTSFIEERPQLLTLRSSADRGTKILTYLADVTVNKPHGERPSAVYPRDKLPQIDLSTPPPDGSRQKLLALGPEGFAKALREQKALAVTETTFRDAHQSLLATRVRTSGLLDVAGHVARLTPELLSIEAWGGATYDVALRFLHEDPWYRLAALREAVPNICLQMLLRGRNTVGYTPYPEKVTRAFVEEATNSGIDIFRIFDALNNVDQMRPAIDAVRETGTALAEVALSYTGDLSNPDEKLYTLDYYLRLAEEIVEAGAHIIAIKDMAGLLRAPAATTLVTALRENFDLPVHVHTHDTPGGQLATYLAAWQAGADAVDGASAAMAGTTSQPALSAIVAAAAHSEYDTGLDLQAVCDLEPYWEALRKVYKPFESGLPAPTGRVYTHEIPGGQLSNLRTQAVALGLGDKFEEVEAKYAAADRMLGRLVKVTPSSKVVGDLALHLVGSGASTEEFKENPAKFDIPDSVVGFLRGELGTPPGGWPEPFRTRALEGRGAAKPEVALSADDEKALAGTSAERRATLNRLLFPGPTKEFLEHRDKYGDTSQLSANQFFYGLRRGDEHRVRLAPGVELIIGLEAISEPDERGYRTVMCILNGQLRPVSVRDRSISSELPAAEKADKNNPGHVPAPFAGVVTLAVTEGQHIAAGDTIATIEAMKMEAAITAPRSGTVSRLAIGSVQQVEGGDLLAVVSTGESASE

SEQ ID NO: 96915 - DNA, 3465 bp, Rhizobium leguminosarum bv. viciae 3841
  CDS (1)..(3465): transl_table=11
ttgcccatttccaagattctcgttgccaatcgctccgaaattgccattcgcgtgttccgcgcggccaacgagcttggaataaaaaccgtggcgatctgggcggaagaggacaagctggcgctgcaccgcttcaaggcggacgagagctaccaggtcggccgcggcccgcatctttccaaggacatgggtccgatcgagagctatctgtcgatcgacgaggtgatccgcgtcgccaaactctccggtgctgatgccatccatcccggctacggcctgctgtcggaaagccccgaattcgtcgatgcctgcaacaaggcgggcatcatcttcatcggcccgaaggccgatacgatgcgccagctcggcaataaggtcgcagcgcgcaacctggcgatctcggtcggcgttcccgtggtgccggccaccgggccgttgccggaggacatggccgaagtggcaaagatggcggacgggatcggctaccccgtcatgctgaaggcctcctggggcggcggcgggcgcggcatgcgcgcgatccgcgatccaaaggatctcgcccgcgaggtgacggaagccaagcgcgaggcgatggcggccttcggcaaggacgaggtctacctggaaaagctcgtcgagcgcgcccgccatgtcgaaagccaggttctcggcgatacgcatggcaatgtcgtgcatctcttcgagcgtgactgctcgatccagcgccgcaaccagaaggtcgtcgagcgcgcgccggcgccctatctctctgaggcgcagcgccaggaactcgccgcctattcgctgaagatcgcagctgccaccaattatatcggtgccggcaccgtcgaatatctgatggatgccgataccggcaaattctacttcatcgaagtcaatccgcgcatccaggtcgagcatacggtgactgaagtcgtcaccggcatcgatatcgtcaaggcgcagatccacattctcgacggttttgcgatcgggacggcggaatcgggcgtgccgcgccaggaagatatccgtctcaacggccatgcgctgcagtgccgcatcaccacggaagatccggagcataatttcattccggattacggccgcatcaccgcctatcgctcagcgtccggtttcggcatccgcctcgatggcggcacctcctattcgggcgccatcatcacccgcttttatgatccgcttctcgtcaaggtcacggcatgggcgcccaatccgtccgaagcgatcgcccgcatggaccgggcgctgcgcgaattccgcattcgcggcgtggcaaccaacctgaccttcctcgaagcgatcatcggccatcccaagttcagggataacagctacacgacacgcttcatcgacacgacgccggaactcttccagcaggtcaagcgccaggatcgcgccacgaagctcctgacctatctcgccgacgtcaccgtcaatggccatcccgaggccaaggataggccgaggccgctggaaaacgctgccgagccggtggttccctacgccaacggcaatgcggtcaaggatggtacgaagcaactcctcgacacgctcggcccgaagaaattcggcgaatggatgcgcaacgaaaagcgcgtgcttttgaccgacacgacgatgcgcgacggccaccagtcgctgctcgccacccgcatgcgcacctatgacatcgcgcgcattgccgacacctatgcgcatgcgctgccaagccttttgtcgctcgaatgctggggcggcgcgacctttgacgtctccatgcgctttctgaccgaggacccgtgggagcgcctggcgctgatccgcgaaggcgcgccgaaccttctgctgcagatgctgctgcgcggcgccaacggcgtcggctacaccaattatcccgacaatgtcgtcaaatatttcgtccgccaggcggccaggggcggcatcgatctcttccgcgtcttcgactgcctgaactgggtcgagaacatgcgcgtttcgatggatgccattgccgaggagaacaagctctgcgaggcggcgatctgctataccggcgatatcctgaactcggcccgtccgaaatacgatctgaaatactacaccgaccttgcggtcgagctcgagaaggcgggggcgcatatcatcgcgctcaaggatatggcgggccttctcaagcctgcggctgcgaaggttctgttcaaggcgctgcgcgaggcgaccagcctgccgatccatttccacacgcatgatacatcgggtattgcggccgcgaccgttcttgccgccgtcgacgcaggcgtcgatgccgtcgatgccgccatggatgcgctttccggcaatacctcgcagccctgtctcggctcgatcgtcgaggcgctgcgcggtacggagcgtgatccgggcctcgatccggaatggatccgccgcgtctccttctattgggaagcggcgcgtaaccagtatgccgccttcgaaagcgatctgaggggcccggcatccgaagtctatctgcacgaaatgccgggcggccagttcaccaacctcaaggaacaggcccgctcgctcggcctcgagacccgctggcatcaggtggcgcaggcctatgccgacgccaaccagatgttcggcgatatcgtcaaggtgacgccgtcttccaaggtcgtcggcgacatggcgctgatgatggtgtcccaggacctgacggttgccgacgtcgtcagccctgataaggaagtctccttcccggaatcggtggtctcgatgctgaagggcgatctcggccagccgccgtcaggatggccagaagcgctgcagaagaaggcgctgaagggcgacaagccctataccgtgcgccccggctcgctgctcaaggaggcggatctcgatgcggagcgcaaagtcatcgagacgaaactcgagcgcgaggtcagcgactttgaatttgcctcctacctgatgtatccgaaggtcttcaccgacttcgcgctcgcctccgatacctacggtccggtctcggtgctgccgacgcccgcctatttctatggtctcaaggatggcgaggagctgtttgccgatatcgagcgcggcaagacgctcgtcatcgtcaaccaggcgatgagcgccaccgacagccaaggcatggtgaccatcttcttcgagctcaacggccagccgcgccgtatcaaggtgccggaccgggcccatggggcgacgggtgccgccgtccgccgcaaggccgaaccgggcaatgccgttcatgtcggcgcgccgatgccgggtgtgatcagccgtgtcttcgtctcgcccggccaggccgtcaatgccggtgacgtgctcgtctcgatcgaggcgatgaagatggaaacggcgctgcatgcggaaaaggatgggacgatttccgaagtactggtgcgggctggcgatcagatcgatgccaaggacctgctcgtcgtctacgcaggctga

SEQ ID NO: 96916 - protein, 1154 aa, Rhizobium leguminosarum bv. viciae 3841
MPISKILVANRSEIAIRVFRAANELGIKTVAIWAEEDKLALHRFKADESYQVGRGPHLSKDMGPIESYLSIDEVIRVAKLSGADAIHPGYGLLSESPEFVDACNKAGIIFIGPKADTMRQLGNKVAARNLAISVGVPVVPATGPLPEDMAEVAKMADGIGYPVMLKASWGGGGRGMRAIRDPKDLAREVTEAKREAMAAFGKDEVYLEKLVERARHVESQVLGDTHGNVVHLFERDCSIQRRNQKVVERAPAPYLSEAQRQELAAYSLKIAAATNYIGAGTVEYLMDADTGKFYFIEVNPRIQVEHTVTEVVTGIDIVKAQIHILDGFAIGTAESGVPRQEDIRLNGHALQCRITTEDPEHNFIPDYGRITAYRSASGFGIRLDGGTSYSGAIITRFYDPLLVKVTAWAPNPSEAIARMDRALREFRIRGVATNLTFLEAIIGHPKFRDNSYTTRFIDTTPELFQQVKRQDRATKLLTYLADVTVNGHPEAKDRPRPLENAAEPVVPYANGNAVKDGTKQLLDTLGPKKFGEWMRNEKRVLLTDTTMRDGHQSLLATRMRTYDIARIADTYAHALPSLLSLECWGGATFDVSMRFLTEDPWERLALIREGAPNLLLQMLLRGANGVGYTNYPDNVVKYFVRQAARGGIDLFRVFDCLNWVENMRVSMDAIAEENKLCEAAICYTGDILNSARPKYDLKYYTDLAVELEKAGAHIIALKDMAGLLKPAAAKVLFKALREATSLPIHFHTHDTSGIAAATVLAAVDAGVDAVDAAMDALSGNTSQPCLGSIVEALRGTERDPGLDPEWIRRVSFYWEAARNQYAAFESDLRGPASEVYLHEMPGGQFTNLKEQARSLGLETRWHQVAQAYADANQMFGDIVKVTPSSKVVGDMALMMVSQDLTVADVVSPDKEVSFPESVVSMLKGDLGQPPSGWPEALQKKALKGDKPYTVRPGSLLKEADLDAERKVIETKLEREVSDFEFASYLMYPKVFTDFALASDTYGPVSVLPTPAYFYGLKDGEELFADIERGKTLVIVNQAMSATDSQGMVTIFFELNGQPRRIKVPDRAHGATGAAVRRKAEPGNAVHVGAPMPGVISRVFVSPGQAVNAGDVLVSIEAMKMETALHAEKDGTISEVLVRAGDQIDAKDLLVVYAG

SEQ ID NO: 96917 - DNA, 3426 bp, Pediococcus pentosaceus ATCC 25745
  CDS (1)..(3426): transl_table=11
atgcaccgtattttaattgccaaccgaggcgaaattgcgacccgaattattcgggcaacgcatgaactcggaaaaacagctgtagcaatttatgctaaagcggatgaattttctatgcatcgttttaaagcagatgaagcttaccaagttggtgaagatagtgatccaattggagcatatttaaatattgatgacattattcgtattgcaaaagaaaataatattgatgcaattcaccccggctatggatttttgtcggaaaatgctgtatttgcgcgagcagttgaagcagctgggattaagttcattggacctcgacccgaattactagaaatgtttggtgataaattacaagctaaaaatgcagccattaaggccggtgtaccaactattccgggaacggaaaaaccagttaaagatgtcgatgacgcgctaaattttgcagagcaatttggctatcctatatttgttaagtcagcggcaggtggcggtggaaaagggatgcggattgtacatcatcaacaagaaatgcgcgaagcatttaagatggctcagtcagaagcttcttcgtcttttggtgacgatgagatttacctagaacgttacttagttgatccgatccatattgaggttcaagtagtcgcggatgaacacggtgagatggttcatttgtatgaacgaaattcatcgattcagcgacgccatcaaaaaatcattgaatttgctccagcggtgggaatttctgccaccgtccgtgatcaaataagaaaagctgctttaaaattattgaagtcggtcgattatagtaacgctgcaaccattgagtttttggtagaaggtaatcaattttactttatggaagtgaacccacgaattcaggttgaacatacagttaccgaagaagtcacgggaattgatattgtgcaaacccaaattaaggttgcagaaggccaaagattgcacgaagaaatcggtgttcctcaacaagcccaaattgaagctgtgggagtggcaattcaagctcgaattaccactgaagatccaatgaataactttattccagatgtcggtagaatccagacgtatcgttcacctggtggaacaggtgtgagattggatgctggaaatgcctttgctggcgccattgtaactccgcattatgattcacttctgaccaaggcgattgtccatgcgccaacctttgacgaagccttggtaaagatggatcgggtgctcaatgaatttgtaattgctggggttaaaactaatatcccatttttaaagaaattaattcatcatcctatttttagatcggaattagctccgacaaactttgtggatgagacaccagaactctttgatttaaaagctgaaaccccggtagttactcaacttttgagttacattgctaatactaccatcaatggttatccaggcttagaaaagcagaatccagtagtgttaactcggccagtccgtccacattttgaagcacaagtaccgcatgaaaatgcgaaacagatcttggatagtaagggacctgatgccatgatcaattggctgttaaaacaaaagcaggtcttgctaaccgatacgaccatgcgggatgcccaccaatcattatttgctacgcgaatgcggaccaaagacatggtagaaattgccgatcaagtccagaaaggtctgcctaacctattttcagctgaagtttggggcggtgcgacctttgatgttgcttatcggttcctaggtgaggatccatgggtaagactccaacaattgcgggctaaaatgccaaatacgatgctccaaatgcttttacgtgggtcaaatgcagtagggtatcaaaattatccagacaacgccattgacgaatttattcgattggctgccaaaaatggaattgatgttttccgaatctttgattcccttaattgggttccacagcttgaagaatctatccaacgggtgcgtgataatggaaaagtggctgaagcagccatggcatatactggcgatattttagatactaatcgtactaaatataatttgaaatattatgtggatttggctcaagaactccaagcagcaggtgctcatattattggaatcaaagatatgtcaggaattttaaaaccacaagctgcttatgcattaatttcagagttaaaaaatcatctggatgtgccaattcatttgcatacgcacgatactacaggcaacggcattttcttatattctgaagcaatacgagctggagttgatgtggtcgacgttgccacttctgcgctagcgggaacgacttctcagccttcaatgcagtctctttactatgcgttgtctaataaccagcgtcaaccagatttagacattcaaaaagcggaaaaactagatgaatattgggctggaattcgaccatattacgaaggatttggcacccaattaaatggaccacaaactgaaatttatcgaattgaaatgcctggtggacagtataccaacctgcgccagcaagctaatgcagttcatttgggtaagcgttgggatgagattaaggaaatgtacgcgaccgtcaatcaaatgtttggcgatattccaaaggttacgccttcttctaaagtagttggcgatatggcactattcatggtccaaaatgatttgacgcctgaaatggtaatgaacgataagggacaattaagttttcccgaatcagtggtaaactttttccgtggtgatttaggacaaccggcgggtggttttccaaaacagctccaaaagatgattctaaaagagcaagccccattgacagtacgaccaggagctttagccgatccagttgattttgatcaagttcgtaaacaggcaactaaggttttaggtcaccaagcaagtgatgaagaagttatgtcgtttattatgtatccagatgtgatgaccgaatacgttcaacgtcaaaatgaatatggtccagtaccattattagatactccaatctttttccaaggcatgcatattggtcaacgcattgatttacaattgggacgcggaaaatcggtcattattgtccttcgagaaattagtgaagcagatgaggcgggccaaaggtcacttttctttgatataaatggacaaagtgaagaagtgattgtttatgatgttaatgcgcaggtaacgaaagcaaagaagattaaagctgatcctactaaagccgaacagattggagctactatggcgggttcggtcattgaagttcaagtagaagcgggccaaaaggtccagcaaggtgataacttaattgtcactgaggcgatgaaaatggagaccgcgttaagagcacctttcgacgcgaccattaagaagatttatgctacccctgaaatgcaaatcgagacgggagatttattgattgaactagaaaaggagtaa

SEQ ID NO: 96918 - protein, 1141 aa, Pediococcus pentosaceus ATCC 25745
MHRILIANRGEIATRIIRATHELGKTAVAIYAKADEFSMHRFKADEAYQVGEDSDPIGAYLNIDDIIRIAKENNIDAIHPGYGFLSENAVFARAVEAAGIKFIGPRPELLEMFGDKLQAKNAAIKAGVPTIPGTEKPVKDVDDALNFAEQFGYPIFVKSAAGGGGKGMRIVHHQQEMREAFKMAQSEASSSFGDDEIYLERYLVDPIHIEVQVVADEHGEMVHLYERNSSIQRRHQKIIEFAPAVGISATVRDQIRKAALKLLKSVDYSNAATIEFLVEGNQFYFMEVNPRIQVEHTVTEEVTGIDIVQTQIKVAEGQRLHEEIGVPQQAQIEAVGVAIQARITTEDPMNNFIPDVGRIQTYRSPGGTGVRLDAGNAFAGAIVTPHYDSLLTKAIVHAPTFDEALVKMDRVLNEFVIAGVKTNIPFLKKLIHHPIFRSELAPTNFVDETPELFDLKAETPVVTQLLSYIANTTINGYPGLEKQNPVVLTRPVRPHFEAQVPHENAKQILDSKGPDAMINWLLKQKQVLLTDTTMRDAHQSLFATRMRTKDMVEIADQVQKGLPNLFSAEVWGGATFDVAYRFLGEDPWVRLQQLRAKMPNTMLQMLLRGSNAVGYQNYPDNAIDEFIRLAAKNGIDVFRIFDSLNWVPQLEESIQRVRDNGKVAEAAMAYTGDILDTNRTKYNLKYYVDLAQELQAAGAHIIGIKDMSGILKPQAAYALISELKNHLDVPIHLHTHDTTGNGIFLYSEAIRAGVDVVDVATSALAGTTSQPSMQSLYYALSNNQRQPDLDIQKAEKLDEYWAGIRPYYEGFGTQLNGPQTEIYRIEMPGGQYTNLRQQANAVHLGKRWDEIKEMYATVNQMFGDIPKVTPSSKVVGDMALFMVQNDLTPEMVMNDKGQLSFPESVVNFFRGDLGQPAGGFPKQLQKMILKEQAPLTVRPGALADPVDFDQVRKQATKVLGHQASDEEVMSFIMYPDVMTEYVQRQNEYGPVPLLDTPIFFQGMHIGQRIDLQLGRGKSVIIVLREISEADEAGQRSLFFDINGQSEEVIVYDVNAQVTKAKKIKADPTKAEQIGATMAGSVIEVQVEAGQKVQQGDNLIVTEAMKMETALRAPFDATIKKIYATPEMQIETGDLLIELEKE

SEQ ID NO: 96919 - DNA, 3525 bp, Solibacter usitatus Ellin6076
  CDS (1)..(3525): transl_table=11
atgttccggacatcgccggtcccacctctccacgcagtccccctccctcctgttatcctcaaaaaagcagttctcacgcacgcccccatgaaaaaactccttgcactgaatcgcagcgaaattgctatccgcattctgcgcgccgccaacgagctcggcctgcgcacggtggccatctattccaaggaagacaagctcgccttgcaccgcttcaaagccgacgaggcgtacctggtcggcgaaggcaaagggccggtggaagcctacctggacgtggagggcatcgtcgcgcttgccaaggagaagggcgtcgacgcgattcatcccggctacggatttctttcggagaacccggcgctgccgcgcgcctgcgaacgggccggcatcacattcgtcggcccctcggcggagctgctcgatctgctcggcgacaaaacggcggcgcggcgcctagcccagaaggcggggatcccgcgcgtgcccggcacggaagaggcggtgaccagtcccaagcaggccgagaagatcgcggccacgatcgggtatccgctgattatcaaggcggccttcggcggcggcggccgcggcatgcgcgtggtggacaaggctccggatttcgcgggcaagctggaagaggcacgccgcgaatcggccgcggccttcggcaacgacgcagtcttcctggagcgcttcgtccgccgcgccaagcacatcgaagtgcagattctgggcgaccggcacggcaacattctgcatctttacgagcgcgattgctcggtgcagcgccgccatcagaaggtggtcgaagtggcgcccgccgtcggattggatccgaagatccgcgcgcagttggcggatgcggcggtgacgctggcgcgcgcggcgggctatacgaacgccggcaccgtcgaattcctggtggacgccgactccggcgagtggttcttcattgaggtcaacccgcgcattcaggtggaacacaccgtcaccgaaatggtgaccggcatcgacctggtgcgcagccagatccaggtggcccaggggctgcaattgcacggccccgagatgaacctgcccacgcaggacaaggtgccgctttacggctacgcgctgcaatgccggatcaccaccgaggatccggcgaacggcttcgtgccggattacggcaagatccacacctaccgttcgccggccggcttcggcatccggctggacggcgggtcggcctactcgggcgcggtgatcacgcccttctacgattcgctgctggtgaagacaaccgcatggggccgcgagtttccgcacgcctgccagcgcatggatcgcagcctgcgcgagttccgcgtgcgcggcgtgaagacgaacattcccttcctcgaaaacgtagtcaatcatgcggatttccaggccgggaaagtcagcacccgctggctggaagagactccggcgctcttcaagttcgaggcacgtcgcgaccgcgccaccaagctgctcacgtatctcgcggaagtgatcgtcaatggaaatccgcaggtcgcaggaaaattgcggccggcgaagatcggcacgccgccgatcccggcgcacgatagttccgaggcgcccaaaggcacgcgccaactgctgcgcgagctcgggcccagtggcttcgccgagtggaccgggaagcagaagcgcctgctgctgaccgacaccaccttccgcgacgcgcaccaatcgctgctggcgacgcgggtgcgctcgtacgatatgctggcaatcgccaacttcgtttcgcacaggctgcacaatctgtacagcgtcgaaatgtggggcggcgcaaccttcgacgtgaccatgcgcttcctgcatgaggatcccttcgcgcgcctgcgccaactgcgcgcggcaatcccgaacatctgcttccagatgctgctgcgcgcttcgaacgcagtcggctatacggcgtatccggataacgcggtcgcggagttcatttacgaagcctccgctcagggcatcgatatcttccggattttcgattcgctcaactggctgcccaacatgaaggcgtccatggcggcggtccgcaagacgcgctcggtctgcgaagcggccatctgctacaccggcgatatcctcgacccgaagcgcgataaatactcgctggattattacgtgcgcatggccaaagagttggagaagatgggcgctcacgtgctcgcgattaaggacatggcgggcctgtgccgtccttacgcagccgagaagctggtgaaggcgctgcggcaggaggtgggcattccgattcacttccacacgcacgataccagcggtttgaacgctgcgtcgatcttgaaggcggccgaatccggcgtacacgtggccgatggcgcggcggcctcgatgagcggcaccaccagccaaccgaatctcaactccatcgtcgccgcgctggcgcacaccaagcgcgacaccgggctcgatctggacgcgctcaatcaatacgcggactactgggaagtcgtgcgggagttctacgcgcctttcgatacgggtccgaaatcgggctcggccgaggtctacgagcacgagatgccgggcggccagtacacgaatctgaaggaacaggccgaatcgatgggcctgggcgcgcgctggcacgaaatcgcgcgaacgtacgcggaggtcaacctggccttcggcgacatcgtcaaggtgacgccttccagcaaggtggtcggcgacatggcgatcttcctggtcaatcacaatatgaccatcgggcagttcgagaagctgacgcccgatcacaatttgacgctgccggcgagcgtgatcgacatgttcatgggatcgctcggcgagcctgagggcgggtggccgaagcatctgcagaagatcatcctcaagggcgccaagccgcaacgcggccgtccaggcgcacaactgccgccggtgaacctcgacgagaccgccgcctcgttggagaagaagatcgcgcgcaagccttcgcacgatgaagtgctgagctatctcatgtaccccgacgtcttcctgaagttcgcgcgcgcccggcagaattggggcgacgtggacgtactgcccacgccggaattttattacggcatggagcgcagcgccgatatcgccgtggaactggaaccgggcaaggcgctggtcatcaagttcctgaccgtcggcgaaccgcatcccgacggcacgcgcaccgtcttcttcgaactcaacggccagccgcgcgaagtgactgtgcgcgatagcagcctggaagtcaaagaacagggacgcccgaaggccgaccctggaaagcccggcaacatcggcgcgccgatcccaggcgtggtttccaccgtcgccgtggagttgaaccagatcctgaagaagggcgatcgtttgctggtgatggaagccatgaaaatgcagagcaccgtctacgctcccgtcgccggcaaggtgacgcagctgctggtaacgcccggccagcaggtggaggcgaaggatctgctgctagtcatcgagtag

SEQ ID NO: 96920 - protein, 1174 aa, Solibacter usitatus Ellin6076
MFRTSPVPPLHAVPLPPVILKKAVLTHAPMKKLLALNRSEIAIRILRAANELGLRTVAIYSKEDKLALHRFKADEAYLVGEGKGPVEAYLDVEGIVALAKEKGVDAIHPGYGFLSENPALPRACERAGITFVGPSAELLDLLGDKTAARRLAQKAGIPRVPGTEEAVTSPKQAEKIAATIGYPLIIKAAFGGGGRGMRVVDKAPDFAGKLEEARRESAAAFGNDAVFLERFVRRAKHIEVQILGDRHGNILHLYERDCSVQRRHQKVVEVAPAVGLDPKIRAQLADAAVTLARAAGYTNAGTVEFLVDADSGEWFFIEVNPRIQVEHTVTEMVTGIDLVRSQIQVAQGLQLHGPEMNLPTQDKVPLYGYALQCRITTEDPANGFVPDYGKIHTYRSPAGFGIRLDGGSAYSGAVITPFYDSLLVKTTAWGREFPHACQRMDRSLREFRVRGVKTNIPFLENVVNHADFQAGKVSTRWLEETPALFKFEARRDRATKLLTYLAEVIVNGNPQVAGKLRPAKIGTPPIPAHDSSEAPKGTRQLLRELGPSGFAEWTGKQKRLLLTDTTFRDAHQSLLATRVRSYDMLAIANFVSHRLHNLYSVEMWGGATFDVTMRFLHEDPFARLRQLRAAIPNICFQMLLRASNAVGYTAYPDNAVAEFIYEASAQGIDIFRIFDSLNWLPNMKASMAAVRKTRSVCEAAICYTGDILDPKRDKYSLDYYVRMAKELEKMGAHVLAIKDMAGLCRPYAAEKLVKALRQEVGIPIHFHTHDTSGLNAASILKAAESGVHVADGAAASMSGTTSQPNLNSIVAALAHTKRDTGLDLDALNQYADYWEVVREFYAPFDTGPKSGSAEVYEHEMPGGQYTNLKEQAESMGLGARWHEIARTYAEVNLAFGDIVKVTPSSKVVGDMAIFLVNHNMTIGQFEKLTPDHNLTLPASVIDMFMGSLGEPEGGWPKHLQKIILKGAKPQRGRPGAQLPPVNLDETAASLEKKIARKPSHDEVLSYLMYPDVFLKFARARQNWGDVDVLPTPEFYYGMERSADIAVELEPGKALVIKFLTVGEPHPDGTRTVFFELNGQPREVTVRDSSLEVKEQGRPKADPGKPGNIGAPIPGVVSTVAVELNQILKKGDRLLVMEAMKMQSTVYAPVAGKVTQLLVTPGQQVEAKDLLLVIE

SEQ ID NO: 96921 - DNA, 3384 bp, Mycobacterium avium 104
  CDS (1)..(3384): transl_table=11
gtgttagcgaaagtcctggtcgccaaccgcggggagatcgcgatccgcgcgttccgcgcggcctacgagctggaaatggccaccgtggcggtgtatccctacgaggaccgcaattcggtgcaccggttgaaggccgacgagtcctaccagatcggtgaggagggccacccagtccgcgcctacctgtccgtcgacgagatcgtcggcacggcgctggcctgcggcgcggatgcgatctaccccggctacggcttcctgtcggagaaccccgatctggcggcggcgtgcgcggcggccggcatcacgttcgtcggccccagcgccgaggtgctcgagctcaccggcgacaagtcgcgggccatcgcggcggcgcgggccgcgggtcttccggtgctggcctcctcgccgccgtcgacctcggtgcaggagttgctgagcgccgccgagacgatgacgttcccgctgttcgtcaaggcggtcgccggcggcggcggccgggggatgcgccgggtcaccgatccgggggcgctggccgaggcgatcgaggcggccagccgtgaggccgagtccgcgttcggggacgcctcggtgtttctcgagcaggcggtgatcaatccgcggcacatcgaggtccagatcctggccgacacgcacggcaacgtgatgcacctctacgagcgggactgcagcgtgcagcgccggcaccagaaggtgatcgagatcgccccggcgcccaacctggatccggcgctgcgcgaacgtatctgcgccgacgcggtggcgttcgcacgcagcatcggctacacctgcgcgggcactgtggagttcctgctcgacgaacgcggcaaccacgtgttcatcgagatgaacccgcgcatccaggtggagcacacggtgaccgaggagatcaccgacgtcgacctggtgtccgcgcagctgcgcatcgcctccggccagacgctggaagagattggcctgagccaggattcggtcatctcacgcggcgcggccctgcagtgccggatcaccaccgaggaccccgccaacggtttccgcccggacaccggccgcatcaccgcctaccgcaccccgggtggcgcgggcatccggctggacggcggcaccacgctgggcgcggagatcagcgcgcacttcgattcgatgctgatcaagctgacctgccggggacgcgacttccccacggcggtgcggcgggcgcggcgcgcggtcgccgaattccgcatccgcggcgtctcgacgaatatcccgttcctgcaagcggttctggacgacccggattttcaggctgggcgcatcaccacctcgttcatcgaacagcggccgcagttgctcaccgcgcgcagttcggccgaccgcggcaccaagatcctcaactacctggccgacgtgaccgtcaacaagccgcacggcgagcgcccgtcggcggtgtacccgcatgacaagctgcccgacatcgacctggcggcgagcccgccggcgggctccaagcagcggttgaccgaactcgggccggagcgattcgcggcctggctgcgcgagtcgggcggcgtcggcgtcaccgacaccacgttccgcgacgcgcaccagtcgctgctggcgacccgggtccgcaccagcgggctgctcaaggtggcaccctacatcgcacggaccatgccgcagctgttgtcggtggagtgttggggcggagcgacttacgacgtggcgctgcggtttctcaaggaggacccgtgggagcggctgacggcgctgcgcgaggcgatgccgaacatctgccttcagatgctgctgcgtgggcgtaacaccgtggggtacacgccctatccggagacggtcacgacggccttcgtcgcggaggcgaccgagaccggcatcgacatcttccgcatcttcgacgcgttgaacaacgtcgactcgatgcgcccggccatcgacgcggtccgcgaaaccggaagcgccatagccgaagtggcgatgtcctacaccggcgacctgtccgatccggccgaaaagctttacacgctggactattacctgaagctggccgaccagatcgtcgaagcgggcgcgcacgtgctggcgatcaaggacatggccggcctgctgcgcgcaccggcggccgcgacgctggtgtcggcgctgaagtcgcggttcgacctgccggtgcacgtgcacacccatgacacgccgggcggacagctggcgacctacgtggcggcctggcaggccggggccgatgcggtcgacggcgccgccgcgccgctcgccggaaccaccagccagccggcactatcgtcgatcgtggccgccgcggccaacacggagtatgacaccgggttgtccctgccggcggtgtgcgatctggagccgtactgggaggcgctgcgaaaggtatacgctcccttcgaatccggtcttccggcgccgaccgggcgggtgtatcaccacgagatcccgggcggccaattgtcgaatctgcgtcagcaggcgattgcgctgggactcggcgaccggttcgaggacatcgaaaacgcctacgccggcgccgacgcgattttgggacacctggtcaaggtcacaccgtccagcaaggtggtgggcgacctggcgctggccctggtgggtgcgggtgtgggcgcgcaggacttcgccgaagacccctcccgctacgacatcccggattcggtgatcggctttctgcgcggcgagctcggtgacccgccgggcggctggccggagccgttgcgcaccaaggccttacagggccgggggccggccaagccggagcagccgctgacggccgaggacgaagcggcgttggccgccccgggtgcgcgacggcaggcagcgctgaaccggctgctgttcccgggaccgaccaaggagctcgaggagcaccgcgagcagtacggtgacacctcggggctgagcgccaaccagttcttctacggattgcggcagggcgacgaacaccgcgtcgaactcgagcgcggcgtggagttgctgatcggcctggaggccatctccgatcccgacgaacgcggcatgcgcaccgtgatgtgcattctcaacgggcagctgcggccggtggtggtgcgcgaccgcagcatcgccatcgacgtgcccgccgccgagaaggccgaccgcgccaacccggaccacatcgctgccccgttcgccggggtggtgacggtcgccgccgaggtcggccggcaggtcgaggccggccagaccatcgcgacgatcgaggcgatgaagatggaagccgcggtcaccagcccgaagtcgggcaaggtggcgcgaatcgccgtgtcgcggaccgctcaagtcgagggcggcgacctcctgatggtgatcgactag

SEQ ID NO: 96922 - protein, 1127 aa, Mycobacterium avium 104
MLAKVLVANRGEIAIRAFRAAYELEMATVAVYPYEDRNSVHRLKADESYQIGEEGHPVRAYLSVDEIVGTALACGADAIYPGYGFLSENPDLAAACAAAGITFVGPSAEVLELTGDKSRAIAAARAAGLPVLASSPPSTSVQELLSAAETMTFPLFVKAVAGGGGRGMRRVTDPGALAEAIEAASREAESAFGDASVFLEQAVINPRHIEVQILADTHGNVMHLYERDCSVQRRHQKVIEIAPAPNLDPALRERICADAVAFARSIGYTCAGTVEFLLDERGNHVFIEMNPRIQVEHTVTEEITDVDLVSAQLRIASGQTLEEIGLSQDSVISRGAALQCRITTEDPANGFRPDTGRITAYRTPGGAGIRLDGGTTLGAEISAHFDSMLIKLTCRGRDFPTAVRRARRAVAEFRIRGVSTNIPFLQAVLDDPDFQAGRITTSFIEQRPQLLTARSSADRGTKILNYLADVTVNKPHGERPSAVYPHDKLPDIDLAASPPAGSKQRLTELGPERFAAWLRESGGVGVTDTTFRDAHQSLLATRVRTSGLLKVAPYIARTMPQLLSVECWGGATYDVALRFLKEDPWERLTALREAMPNICLQMLLRGRNTVGYTPYPETVTTAFVAEATETGIDIFRIFDALNNVDSMRPAIDAVRETGSAIAEVAMSYTGDLSDPAEKLYTLDYYLKLADQIVEAGAHVLAIKDMAGLLRAPAAATLVSALKSRFDLPVHVHTHDTPGGQLATYVAAWQAGADAVDGAAAPLAGTTSQPALSSIVAAAANTEYDTGLSLPAVCDLEPYWEALRKVYAPFESGLPAPTGRVYHHEIPGGQLSNLRQQAIALGLGDRFEDIENAYAGADAILGHLVKVTPSSKVVGDLALALVGAGVGAQDFAEDPSRYDIPDSVIGFLRGELGDPPGGWPEPLRTKALQGRGPAKPEQPLTAEDEAALAAPGARRQAALNRLLFPGPTKELEEHREQYGDTSGLSANQFFYGLRQGDEHRVELERGVELLIGLEAISDPDERGMRTVMCILNGQLRPVVVRDRSIAIDVPAAEKADRANPDHIAAPFAGVVTVAAEVGRQVEAGQTIATIEAMKMEAAVTSPKSGKVARIAVSRTAQVEGGDLLMVID

SEQ ID NO: 96923 - DNA, 3384 bp, Mycobacterium smegmatis str. MC2 155
  CDS (1)..(3384): transl_table=11
gtgatctccaaggtgctcgtcgccaaccgcggcgaaatcgcgatccgcgcattccgtgctgcgtacgagatgggcatcgccacggtggcggtgtatccgtacgaggaccggaattcgctccatcggctcaaggccgacgagtcatatcagatcggcgaggtgggtcatcccgtccgcgcgtatctgtcggtcgacgagatcatccgcgtcgccaagcattcgggcgccgacgcggtgtacccgggctacggcttcctgtcggagaaccccgatctggcggccaagtgcgccgaggcgggtatcacgttcgtgggaccgtccgccgaggtgctgcagctcacgggtaacaaggcacgcgcgatcgccgcggcgcgcgccgcgggccttcccgtgctgagttcgtcggagccgtcgtcgtcggtggacgagttgatggccgctgccgccgacatggagttcccgctgttcgtcaaggcggtctcgggtggcggcgggcgcggcatgcgccgcgtcaccgaccgcgagtccctggccgaggcgatcgaggcggcctcgcgggaggccgagtcggcgttcggcgacgcgtcggtgtacctggagcaggccgtgctcaacccgcgtcacatcgaggtgcagatcctcgccgacggcgcgggcaacgtcatgcacctgttcgagcgtgactgcagcgtgcagcgcaggcatcagaaggtcgtcgagctggcgcccgcgcccaacctgagtgacgaactgcgccaacagatctgcgccgacgccgtggccttcgcgcgccagatcgggtactcgtgcgcgggcaccgtcgagttcctgctcgacgagcgcggccatcacgtgttcatcgagtgcaatccgcgaatccaggtggagcacacggtgaccgaggagatcaccgacgtggacctggtgtcctcgcagttgcgcatcgccgcgggcgagacgctcgccgatctcggtctgtcccaggaccggctcgtggtgcgtggcgcggccatgcagtgccgcatcaccaccgaggacccggccaacggcttccgacccgacaccggccgcatcaccgcgtaccgctcgccgggcggcgcgggcatccgcctcgacggcggcaccaacctgggtgcggagatctcggcgcacttcgactccatgctggtcaagctgacgtgccggggacgcgacttctcggccgcggcctcgcgcgcgcgccgcgccctggcggagttccgcatccgcggtgtgtcgaccaacatcccgttcctgcaggcggtcatcgacgatccggacttccgcgccggacgggtgacgacgtcgttcatcgacgaccggccgcatctattgacctcgcggtctcctgccgaccgcggcaccaggatcctcaactacctggccgacatcacggtcaacaagccgcacggcgaacggccttcgacggtttacccgcaggacaagctgccgccgctggatctgcaggcgccgccgcccgcgggatccaaacagcgcctcgtggaactggggcccgagggtttcgcgggctggctgcgcgaatccaaggccgtcggcgtcaccgacacgacgttccgcgacgcgcaccagtcgctgctggccacgcgtgtgcgcaccaccggtctgctgatggtggcgccgtacgtcgcacgctccatgccgcagttgctgtcgatcgagtgctggggcggcgcgacctacgatgtggcccttcgcttcctgaaggaagacccgtgggagcggctggcggcgctgcgcgagagcgtgcccaacatctgcctgcagatgctgctgcggggacgcaacaccgtgggctacacgccgtacccggaactggtcacctcggcgttcgtcgaggaggccgcggcgaccggtatcgacatcttccggatcttcgacgcgctcaacaacgtcgagtcgatgcggcccgcgatcgacgcggtgcgggaaaccggttcgaccatcgccgaagtcgcgatgtgctacacgggcgacctcagcgatcccgcggagaacctctacacgctcgactactacctgaagctggccgagcagatcgtcgaggccggcgcccacgtgctggcgatcaaggacatggccggtctgctgcgcgccccggccgcccacacgctcgtgagcgcgttgcgcagccggttcgatctgcccgtgcacgtgcacacccacgacaccccgggcggtcagctcgcgacgtacctcgcggcgtggtcggccggcgcggacgcggtggacggcgcctcggcgccgatggccgggaccacgagccagcccgcgctgagctcgatcgtcgcggcggccgcgcacacccagtacgacacgggcctggacctgcgtgcggtgtgcgaccttgagccctactgggaggcggtgagaaaggtctacgcgccgttcgagtccgggctgcccgggccaaccggccgcgtctacacccacgagattcccggtgggcagttgagcaacctgcgtcagcaggccatcgcgttgggcctcggcgaccggttcgaggagatcgaggccaattacgctgcggccgaccgggttctgggacggctcgtgaaggtgaccccgtcgtcgaaggtggtcggggacctggcgctggcgctcgtgggtgcgggcatcaccgccgaggagttcgccgaggatcccgcgaagtacgacatccccgacagcgtgatcggcttcctgcgcggtgaactcggggatccgccgggcggatggccggaaccgttgcgcaccaaggcgctccagggccgcggaccggcccggccggtcgagaagctgaccgccgacgacgaggcgttgctcgcccagcccgggcccaagcggcaggccgcgttgaaccgcctgcttttccccgggcccaccgccgagttcgaggcgcaccgcgaaacctacggcgacacctcatccctcagcgcgaaccagttcttctacgggctgcgctacggcgaggagcaccgcgtgcaactcgaacgtggcgtggaactgctgatcgggcttgaggcgatctcggaggccgacgagcgcggcatgcgcaccgtgatgtgcatcatcaacggtcagctgcgcccggttctcgtgcgcgaccgcagcatcgccagcgaggtgcccgccgccgaaaaggccgaccgcaacaatgccgaccacatcgccgcgcccttcgccggtgtggtgaccgtcggtgtcgcagaaggtgactcggtggacgcgggacaaaccatcgcgacgatcgaggcgatgaagatggaggccgccatcaccgcgcccaaggcaggcaccgtcgcgcgcgtcgcggtcgcggcgaccgcccaggtcgagggcggcgatctgctggtggtggtcagctga

SEQ ID NO: 96924 - protein, 1127 aa, Mycobacterium smegmatis str. MC2 155
MISKVLVANRGEIAIRAFRAAYEMGIATVAVYPYEDRNSLHRLKADESYQIGEVGHPVRAYLSVDEIIRVAKHSGADAVYPGYGFLSENPDLAAKCAEAGITFVGPSAEVLQLTGNKARAIAAARAAGLPVLSSSEPSSSVDELMAAAADMEFPLFVKAVSGGGGRGMRRVTDRESLAEAIEAASREAESAFGDASVYLEQAVLNPRHIEVQILADGAGNVMHLFERDCSVQRRHQKVVELAPAPNLSDELRQQICADAVAFARQIGYSCAGTVEFLLDERGHHVFIECNPRIQVEHTVTEEITDVDLVSSQLRIAAGETLADLGLSQDRLVVRGAAMQCRITTEDPANGFRPDTGRITAYRSPGGAGIRLDGGTNLGAEISAHFDSMLVKLTCRGRDFSAAASRARRALAEFRIRGVSTNIPFLQAVIDDPDFRAGRVTTSFIDDRPHLLTSRSPADRGTRILNYLADITVNKPHGERPSTVYPQDKLPPLDLQAPPPAGSKQRLVELGPEGFAGWLRESKAVGVTDTTFRDAHQSLLATRVRTTGLLMVAPYVARSMPQLLSIECWGGATYDVALRFLKEDPWERLAALRESVPNICLQMLLRGRNTVGYTPYPELVTSAFVEEAAATGIDIFRIFDALNNVESMRPAIDAVRETGSTIAEVAMCYTGDLSDPAENLYTLDYYLKLAEQIVEAGAHVLAIKDMAGLLRAPAAHTLVSALRSRFDLPVHVHTHDTPGGQLATYLAAWSAGADAVDGASAPMAGTTSQPALSSIVAAAAHTQYDTGLDLRAVCDLEPYWEAVRKVYAPFESGLPGPTGRVYTHEIPGGQLSNLRQQAIALGLGDRFEEIEANYAAADRVLGRLVKVTPSSKVVGDLALALVGAGITAEEFAEDPAKYDIPDSVIGFLRGELGDPPGGWPEPLRTKALQGRGPARPVEKLTADDEALLAQPGPKRQAALNRLLFPGPTAEFEAHRETYGDTSSLSANQFFYGLRYGEEHRVQLERGVELLIGLEAISEADERGMRTVMCIINGQLRPVLVRDRSIASEVPAAEKADRNNADHIAAPFAGVVTVGVAEGDSVDAGQTIATIEAMKMEAAITAPKAGTVARVAVAATAQVEGGDLLVVVS

SEQ ID NO: 96925 - DNA, 3396 bp, Mycobacterium smegmatis str. MC2 155
  CDS (1)..(3396): transl_table=11
ttgtctgagcgcgcgatcaccaaactgcttgtcgccaatcgcggcgagatcgccatccgcgcgtttcgggccgcctacgagctcggaatctcgacggtcgcggtgtttgcctacgaggaccgcaattcgccgcaccgtctcaaagcggacgaggcataccagatcggcgaaacaggtcatccggtccgcgcatacctgtctgtcgatgagataatccgggtagcaaagcattccggtgctgacgcaatctatccggggtacggattcctctcggagaatcctgaactggctgcggcgtgtcaccaggccggcatcgtgttcgtcgggccgcgtgcacacgttctcgagctgacgggaaacaagttcaaggcgatcaccgcggcgcgggaggccggcttgccggtactggcgtcatcggcgccgtcggcgaacgtcgccgaactggtttctgccgccgaggcgatggacttcccgctcttcgtcaaggcagtctccggcggcggcggtaggggaatgcggcgcgtgaccgagccggccgcgctggccgagtcgatcgaggcggccagccgcgaagcggagtcggcattcggtgatccgatggtctatctcgagcaggccgtcctcaacccacgccacatcgaggtgcaggtcctggccgaccgcaccggcgagatcatccacctcttcgaacgtgactgcagcatgcaacgccggcatcaaaaggtcatcgagctcgcgccggcgccgaacctgagcgacacacagcgccaacggatctgtgccgatgccgtctccttcgcccggcagatcgactacttctgcgccggcaccgtggagttccttctcgacgagcgcggtcatcatgtgttcatcgagtgcaatccgcgtatccaggtcgagcacaccgtcaccgaggagatcaccgacgtcgacctggtggcgagtcagctgcggctggcgtccggagaaacgctcggcgatctcggtctgagccaggacgccgtccgtatccgcggcacggcgatgcagtgccgcatcacgacggaggaccctgccaacggcttccgtccggacaccggcagggtcacggcctaccggtcgccaggcggcgctggtgttcggctcgacggcggtacccacaccggcgccgagatcagcgcacacttcgactcgatgttggtgaaattgacttgtcgtggacaggatttcaccggatcggcagcgcgggcacgcagggcgctggctgagttccggatccgcggcgtcgcgaccaacattggcttcctgctcgcggtcctcgatgatcccgacttccgggccggccgggtcaccacgtcattcatcgacgagcgcccgcacctactggccgcacacacccccgcggatcgcggttctcgcatcctgaactacctggccgacgtcacggtcaacaagccccacggcgagcgcccgtcggcggtgtacccgcatgacaagctccccgccatcgacctgtcggagccgccgccgccgggcacccgccagcgcttggaaagcttgggcccgcagggattttcggattggttgagggacagccccgcagtcggcgtcaccgacactaccttccgcgatgcacaccaatccctgctggcgacgcgggttcgcacctcggggttggtgacagtagccccatacatcgcccgcatgatgccggagctgctgtcgatcgaatgttggggcggagcgacgtacgacgttgccctgcgcttcctgaaggaggacccgtgggagcggttggccgtgctgcgtgaggcggcgccgaacatctgcctgcagatgctgcttcgtggacgcaataccgtgggttacacgccgtaccccgaatcggtcaccgatgcgttcgtggcggaggccacggcaacgggtatcgacatcttccggatcttcgatgcgctcaacaacgtcgagtcgatgcgaccggcgatcgacgccgtgcgcgccacgggcaccgcggtcgccgaggtcgctatgtcctacacgtccgacttgtccgacccggcagagaacctttacacgctcgactactacctgaagctggccgaacagatcgtcgaggccggagctcatgtcctggcgatcaaggacatggccgggctgctgcgtccgccggcggcggcaacattggtctccgcgctgcggagtcgcttcgacctgccggtgcatgtccacacccacgacacccccggaggccagttggccacctatctggcggcgtggcaggcaggcgcgagcgcggtcgacggtgccgcggcgccgttggcggggaccaccagtcagccggcgctcagctcgatcgtggcggccaccgcgcacaccgagtacgacaccgggctgccgctgcaggcggtgtgcgatctggagccgtactgggaggcgctgcgaaaggtatacgcgcccttcgagagtgggctgcccgcgccgacgggtcgggtgtaccaccacgagattccaggcgggcagctgtcgaatcttcggcagcaggcgatcgcgctcggactgggcgaccgcttcgaggagatcgaggccagctacgccgccgcggaccgggtgctgggcagactggtgaaggtgaccccgtcgagcaaggtcgtcggcgacctggcgctggccctcgtcggcgccggcgtgagcgccgaggagttaggggccgacccggcccggtacaacatccccgactcggtgatcgggttcctgcgcggtgaactcggcgacccgccgggcggctggccggaaccactgcgcagcaaggcgctggcaggtaggccgcccgccaaaccgcaggtggagctcggcgccgaggacgaggcggtgctggcgcaggccgggcccaaacgtcaggccgcgctgaaccggttgctgttccccagtccgacaaaggaattcgaacagcaccgcgaggcctacggtgacaccagccagctcagtgccaaccagttcttctacggactgcggtccggcgaggaacaccgcgtccagctggagcgcggtgtcgagctgctgatcgggctggaggcgatctccgaacccgacgaacgcggtatgcgcacggtgatgtgcatcctcaacggccagctgcgcccggtgctggtgcgcgaccgcagtatcgccagcgacatcccggccgccgagaaggccgaccggtccaaccccgaccacatcgccgcaccgttcgccggcgtggtcacggtcaacgtcgagcccggcgacgacgtcaccgccggccagaccgtcgcgaccatcgaggcgatgaaaatggaggcagccatcaccgcacccaagcgcggggtcgtcgaccggctggccgtgtcgggaaccacccaggtggaaagcggggacctgttgttggtcatccgctga

SEQ ID NO: 96926 - protein, 1131 aa, Mycobacterium smegmatis str. MC2 155
MSERAITKLLVANRGEIAIRAFRAAYELGISTVAVFAYEDRNSPHRLKADEAYQIGETGHPVRAYLSVDEIIRVAKHSGADAIYPGYGFLSENPELAAACHQAGIVFVGPRAHVLELTGNKFKAITAAREAGLPVLASSAPSANVAELVSAAEAMDFPLFVKAVSGGGGRGMRRVTEPAALAESIEAASREAESAFGDPMVYLEQAVLNPRHIEVQVLADRTGEIIHLFERDCSMQRRHQKVIELAPAPNLSDTQRQRICADAVSFARQIDYFCAGTVEFLLDERGHHVFIECNPRIQVEHTVTEEITDVDLVASQLRLASGETLGDLGLSQDAVRIRGTAMQCRITTEDPANGFRPDTGRVTAYRSPGGAGVRLDGGTHTGAEISAHFDSMLVKLTCRGQDFTGSAARARRALAEFRIRGVATNIGFLLAVLDDPDFRAGRVTTSFIDERPHLLAAHTPADRGSRILNYLADVTVNKPHGERPSAVYPHDKLPAIDLSEPPPPGTRQRLESLGPQGFSDWLRDSPAVGVTDTTFRDAHQSLLATRVRTSGLVTVAPYIARMMPELLSIECWGGATYDVALRFLKEDPWERLAVLREAAPNICLQMLLRGRNTVGYTPYPESVTDAFVAEATATGIDIFRIFDALNNVESMRPAIDAVRATGTAVAEVAMSYTSDLSDPAENLYTLDYYLKLAEQIVEAGAHVLAIKDMAGLLRPPAAATLVSALRSRFDLPVHVHTHDTPGGQLATYLAAWQAGASAVDGAAAPLAGTTSQPALSSIVAATAHTEYDTGLPLQAVCDLEPYWEALRKVYAPFESGLPAPTGRVYHHEIPGGQLSNLRQQAIALGLGDRFEEIEASYAAADRVLGRLVKVTPSSKVVGDLALALVGAGVSAEELGADPARYNIPDSVIGFLRGELGDPPGGWPEPLRSKALAGRPPAKPQVELGAEDEAVLAQAGPKRQAALNRLLFPSPTKEFEQHREAYGDTSQLSANQFFYGLRSGEEHRVQLERGVELLIGLEAISEPDERGMRTVMCILNGQLRPVLVRDRSIASDIPAAEKADRSNPDHIAAPFAGVVTVNVEPGDDVTAGQTVATIEAMKMEAAITAPKRGVVDRLAVSGTTQVESGDLLLVIR

SEQ ID NO: 96927 - DNA, 3387 bp, Nocardioides sp. JS614
  CDS (1)..(3387): transl_table=11
atgttctccaaggtcctggtcgccaaccgcggcgagatcgcgatccgggcgttccgcgccgcctacgagctcggcgcgcgcacggtggccgtcttcccgtacgaggaccgctggtccgagcaccggctcaaggccgacgaggcctacgagatcggtgagcgcggccacccggtacgcgcctacctcgaccccgaggcgatcgtcgcggtcgcgatccgcgccggcgcggacgccgtctaccccgggtacggcttcctctcggagaaccccgccctcgcggaggcgtgcgcgaacgccggcatcaccttcgtcggcccgaccgccgacgtgctcacgctgaccggcaacaaggcccgggcgatcgcggcggcgacggccgcgggggtcccgaccctcgccagcgtcgagccgtccaccgatgtcgacgcgctggtggagtccgccggggagctgccgtacccgctgttcgtgaaggccgtcgccgggggcggcggccggggcatgcggcgcgtggacgcgcccgggcagctgcgcgaggcggtcgagacctgcatgcgtgaggccgagggcgcgttcggcgacccgacggtcttcatcgagcaggccgtggtcgacccgcgccacatcgaggtgcaggtcctcgccgacggcgagggccacgtgatgcacctcttcgagcgcgactgctcggtgcagcggcgccaccagaaggtcatcgagatcgcgcccgcacccaatctcgaccccgagctgcgggaccggatctgcgcggacgccgtgcgcttcgcgaaggagatcggctaccgcaacgccggcaccgtcgagttcctgctggacgccaagggcacctaccacttcatcgagatgaacccccgcatccaggtggagcacaccgtgaccgaggaggtcaccgacgtcgacctcgtgcagtcccagctgcggatcgcgtccggcgagacgctggcggacctcgggctctcccaggagaccgtgaccctgcgcggggcggcgctccagtgccggatcaccaccgaggacccggccaacaacttccgccccgacaccggggtgatcaccacctaccgctcccccggcggcggcggcgtccgcctcgacgggggcaccgtgtacaccggcgccgaggtgtccgcccacttcgactcgatgctggccaagctcacctgtcggggccgcacgttcgagaaggcggtcgagaaggcccgccgggcggtcgccgagttccggatccggggcgtctccacgaacatcccgttcctccaggcggtgctggtcgacccggacttctcctcgggccacgtcaccacctccttcatcgagacccacccacagctgctgcaggcgcggagctcgggcgaccgcggcagcaggctgctgcactacctcgccgacgtgaccgtgaaccagccgcacggccccgcgccggtgagcatcgacccggtgaccaagctgccggaggtcaacctcgacgtcccggccccggacggcacccgccagctgctgctcgacgtcggtcccgaggagttcgcgcgccggctgcgcgcgcagaccggcgtcgcggtcaccgacaccacgttccgcgacgctcaccagagcctgctcgccacccgggtccgcacccgcgacctgctcgcggtcgccggccacgtcgcgcgcaccacaccacagctgtggtcgctcgaggcctggggcggcgcgacctacgacgtcgccctgcggttcctcgccgaggacccgtgggagcggctggccgcgctgcgccaggcggtcccgaacatctgcctccagatgctgctgcgcggccgcaacacggtcgggtacacgccgtaccccgccgacgtcacccaggccttcgtcgaggaggcggcggccaccggcatcgacgtcttccggatcttcgacgccctcaacgacgtcgagcagatgcgcccggcgatcgaggcggtgcgggcgaccggcacggccgtcgccgaggtcgccctctgctacaccggcgacctctccgacccggacgagacgctctacacgctcgactactacctcgagctcgccgaccggatcgtcgacgccggggcacatgtgctggcgatcaaggacatggccggcctgctgcgggtgcccgccgcgcgcacgctggtcaccgcgctgcgcgaccggttcgacctgcccgtgcacctgcatacccacgacaccccgggcggccagctcgccaccctgctcgcggcgatcgacgcaggcgtcgacgcggtcgacgccgcgaccgcgtcgatggcggggacgacctcgcagccgccgctctcggcgctggtctcggcaaccgaccacgggccgcgggagaccgggctctcactcggcgcggtctccgcgctcgagccgtactgggaggcgacccgccgcgtctacgcgccgttcgagtccggcctgccctcgccgaccgggcgggtctaccgccacgagatccccggcggtcagctctccaacctgcgccagcaggcgatcgcgctcggcctcggggagaagttcgagcagatcgaggacatgtacgccgccgccaacgacatcctcggcaacgtcgtcaaggtgaccccgtcctcgaaggtcgtcggcgacctggcgctgcacctggtcgcggtgggcgccgacccgaccgagttcgccgacgagcccgggaagttcgacatcccggactcggtgatcgggttcctcaacggcgagctcggcgaccccccgggcggctggcccgagccgttccgcaccaaggcgctcgccggccgcacccacaagccgccggtggaggagctcgacgacgagcagcgcgagggcctcgccgggagcagcccgacccgtcgccgtaccctcaacgagctgctgttccccggtcccaccaaggagttcaccgagtcgcggctgcggtacggcgacacctcggtgctgccgaccctggactacctctacgggctgcggcgcggcgaggagcatgcggtcgagatcgaggagggcaagaccctgatcctcggcgtgcaggcgatcaccgagcccgacgagcgtggcttccggaccgtgatgaccacgatcaacgggcagctccgcccggtcagcgtccgcgatcggagcgtggccgccgaggtggccgccgccgagaaggccgacacctcgaagcccggccacgtcgcggcgccgttccagggcgtggtgtcgatcgtggtcgaggagggccagcaggtcgccgccggcgacaccgttgccacgatcgaggcgatgaagatggaggcctcgatcaccgctccggtcgccggcacggtcgagcggctggccctgtccggcacccaggccgtcgagggcggcgacctggtgctggtgctgtcctga

SEQ ID NO: 96928 - protein, 1128 aa, Nocardioides sp. JS614
MFSKVLVANRGEIAIRAFRAAYELGARTVAVFPYEDRWSEHRLKADEAYEIGERGHPVRAYLDPEAIVAVAIRAGADAVYPGYGFLSENPALAEACANAGITFVGPTADVLTLTGNKARAIAAATAAGVPTLASVEPSTDVDALVESAGELPYPLFVKAVAGGGGRGMRRVDAPGQLREAVETCMREAEGAFGDPTVFIEQAVVDPRHIEVQVLADGEGHVMHLFERDCSVQRRHQKVIEIAPAPNLDPELRDRICADAVRFAKEIGYRNAGTVEFLLDAKGTYHFIEMNPRIQVEHTVTEEVTDVDLVQSQLRIASGETLADLGLSQETVTLRGAALQCRITTEDPANNFRPDTGVITTYRSPGGGGVRLDGGTVYTGAEVSAHFDSMLAKLTCRGRTFEKAVEKARRAVAEFRIRGVSTNIPFLQAVLVDPDFSSGHVTTSFIETHPQLLQARSSGDRGSRLLHYLADVTVNQPHGPAPVSIDPVTKLPEVNLDVPAPDGTRQLLLDVGPEEFARRLRAQTGVAVTDTTFRDAHQSLLATRVRTRDLLAVAGHVARTTPQLWSLEAWGGATYDVALRFLAEDPWERLAALRQAVPNICLQMLLRGRNTVGYTPYPADVTQAFVEEAAATGIDVFRIFDALNDVEQMRPAIEAVRATGTAVAEVALCYTGDLSDPDETLYTLDYYLELADRIVDAGAHVLAIKDMAGLLRVPAARTLVTALRDRFDLPVHLHTHDTPGGQLATLLAAIDAGVDAVDAATASMAGTTSQPPLSALVSATDHGPRETGLSLGAVSALEPYWEATRRVYAPFESGLPSPTGRVYRHEIPGGQLSNLRQQAIALGLGEKFEQIEDMYAAANDILGNVVKVTPSSKVVGDLALHLVAVGADPTEFADEPGKFDIPDSVIGFLNGELGDPPGGWPEPFRTKALAGRTHKPPVEELDDEQREGLAGSSPTRRRTLNELLFPGPTKEFTESRLRYGDTSVLPTLDYLYGLRRGEEHAVEIEEGKTLILGVQAITEPDERGFRTVMTTINGQLRPVSVRDRSVAAEVAAAEKADTSKPGHVAAPFQGVVSIVVEEGQQVAAGDTVATIEAMKMEASITAPVAGTVERLALSGTQAVEGGDLVLVLS

SEQ ID NO: 96929 - DNA, 3465 bp, Magnetospirillum magnetotacticum MS-1
  CDS (1)..(3465): transl_table=11
atgattccctccgcccctggcaagccccctttcgccaagcttctggtcgccaatcgcggcgagatcgccatccgcatctgccgcgccgccaccgagctggggctgggcaccgtggcggtctattccaccgaggaccgttttgccctgcaccgcttcaaggccgatgagagctatctgatcggcaagggaagcgggcccatcgaggcctatttgtccatcgaggagatgatccgggtcggtctcgaggcgggctgcgatgccgtgcatccgggctacggcttcctgtccgagaatcccgatttcgccgatgcggtgcgcgccgcgggcatggtctttgtcggcccctcgtcggacgtcatgcgtctgctgggcaacaaggtggctgcccgcgccctggcggagaaggccggggtgccggtgatgcccgccaccggaccactgcccgccgatctggccgagtgcaagcggctggcggctgctgtgggctatcccctgatgctcaaggccagttggggcggtggcgggcgcggcatgcgggtgatcgaagccgaaaacgagctggaggaattgctggcggtggcgcggcgcgaagccaaggccgctttcggcaatgacgaggtctatctggaaaagctggtgcgccgggcgcgccatgtggaggtgcagatcctgggcgattcccagggcaatctggttcatctctatgaacgcgactgctcggtccagcgccgcaatcagaaggtcgtcgaacgcgcgcccgccccctatctcggcggccagcagcggcttgaactgtgcgagacggcggtgcgtctggcccgcgcggcccattacgagaatgctggcaccgtcgaattcctgatggatatggagaccggctccttctatttcatcgaggtcaatccccgcgtccaggtggagcacacggtgaccgaggtggtcaccggcatcgacatcgtcaaggcgcagatcaggatcgcgggcggcgcgcccatcggcgcgcccggctccgacgtgcccaagcagtccgatattccgctgaacggccacgccatccagtgccgcatcaccaccgaggacccgtccaacaatttcattcccgattacggtcgtatcaccgcctatcgcggcgccgccggtttcggcatccgcctggacggcggcaccgcattctccggcgctctgatcacgcggcattacgattccctgctggaaaaggtcaccgcctgggcccccaccccggaagaggccatctcgcgcatggaccgtgcgctgcgcgaattccgcattcggggcgtggccaccaatctcaccttcctggaagcggtgatcgagcatcccaaattcgtgggctgcgcctataccacccgcttcatcgacgagacgccggaactgttcgcccgccaggaccgccgcgaccgcgccaccaaggttctgtctttcgtgggcgacgtcatggtcaacggcaattcggatgtggccgggctgaagcgtccgctcatcggccaccggcccgatctaccgcccgtccccgtgggcgaaccgcccgcagggaccaagcaattgctggatcggctcggcgcggatggcctggccaagtggatgcgcgagcaaaagcgggtgctgatcaccgacaccaccatgcgcgacgcccaccagtcgctgttcgccacccgcatgcgcagctacgacatgctggcggcggcaccggcctatgcccgcctgttgcccggcctgttctccatggaatgctggggcggcgccaccttcgacgtagccatgcgctttctgagagaagacccctgggagcgtctgaaggctttgcgcgccgccatgcccaatctgctgctgcagatgctgctgcgttcggccaatgcggtgggctacaccaattatcccgacaatgtggtcaagcagttcgtggcccaggccgccgccaatggcgtcgatgtcttccgggtcttcgactcgctcaactgggtcggcaacatgcatgtggccatggacgcggtgagggaaagcggcaaggtctgcgaggcggccatctgctataccggcgacatcttcgatgccgcccggcccaaatacgatctcaaatactatgtctccatggcgcgtgagctggagaaggcgggcgcccatatcctggggatcaaggacatggcgggcctcgcccgtccgcgcgccatcgccgccctggtcagcgccttgaaacaggaagtgggtctgcccatccatttccacacccacgacacatcgggcctgtcggcggccagcgtgctggcggcggtggatgccggggtggatgcggtggatgcggccatggattccttgagtggattgaccagtcagccgcctttgggctccatctgcgccgcgctttcgggccatgagcgcgatcccggcctggaccagcccaccctgaacgccatatcgcgttactgggaaggggtccgcgccctttacgcccccttcgaggccgatatccgctcgggcaccgccgaggtctatctccacgaaatgccgggcggccagtacaccaatctgcgcgcccaggcgcggtcgctgggcgtcgagcagcactgggactgggtgtcacaggcctatgccgacgtgaataagatgttcggcgacgtggtcaaggtgacgcccaccagcaaggtggtgggcgacatggccctgatgatggtgaccagcaatctgtcgcccgccgacgtgcttgatccggacaaggagatcgccttccccgaatcggtggtgtcgttcttcaagggtgatctgggccagcccaccggcggcttccccgaagcgctgcaaaagaaggttttgggtgcggccaagcccatcaccgtgcggcccggcgcggtcctgccgcccgccgatctggccgccctgcgcgaggaggcggagaagaagaccgggcgcaagctgtccgaagccgaactggcctcctatctgatgtatcccaaggtgttcaccgacttcgccgcccatctgcggcaatatggcgacgtcgagcggcttcccaccgaggtgttcttctggggcatgcagccgggccaggaaatcagcatcgacctggaaaagggcaagagcctgatcgtgcgctatctggccacggcggaagccgaggaagacggctcgcgcaaggtgttcttcgaactgaacggccaaccgcgcaccgtgcgcgtctttgaccgcaaggtggcacccgccagggcggctaggcccaaggccgaagcgggcaatgccgatcatgtgggcgcgcccatgcccggtctggtggtttccgtcgccgtccatgccggacagatagtggaaaagggcgacctgctggtctccatcgaagccatgaagatggaaacggcggtccgcgccgaaagggccggaaccatcgcctcggtcgccgtaaccccaggtgtccaggttgaagcaaaagatctactggtggttatggcgggataa

SEQ ID NO: 96930 - protein, 1154 aa, Magnetospirillum magnetotacticum MS-1
MIPSAPGKPPFAKLLVANRGEIAIRICRAATELGLGTVAVYSTEDRFALHRFKADESYLIGKGSGPIEAYLSIEEMIRVGLEAGCDAVHPGYGFLSENPDFADAVRAAGMVFVGPSSDVMRLLGNKVAARALAEKAGVPVMPATGPLPADLAECKRLAAAVGYPLMLKASWGGGGRGMRVIEAENELEELLAVARREAKAAFGNDEVYLEKLVRRARHVEVQILGDSQGNLVHLYERDCSVQRRNQKVVERAPAPYLGGQQRLELCETAVRLARAAHYENAGTVEFLMDMETGSFYFIEVNPRVQVEHTVTEVVTGIDIVKAQIRIAGGAPIGAPGSDVPKQSDIPLNGHAIQCRITTEDPSNNFIPDYGRITAYRGAAGFGIRLDGGTAFSGALITRHYDSLLEKVTAWAPTPEEAISRMDRALREFRIRGVATNLTFLEAVIEHPKFVGCAYTTRFIDETPELFARQDRRDRATKVLSFVGDVMVNGNSDVAGLKRPLIGHRPDLPPVPVGEPPAGTKQLLDRLGADGLAKWMREQKRVLITDTTMRDAHQSLFATRMRSYDMLAAAPAYARLLPGLFSMECWGGATFDVAMRFLREDPWERLKALRAAMPNLLLQMLLRSANAVGYTNYPDNVVKQFVAQAAANGVDVFRVFDSLNWVGNMHVAMDAVRESGKVCEAAICYTGDIFDAARPKYDLKYYVSMARELEKAGAHILGIKDMAGLARPRAIAALVSALKQEVGLPIHFHTHDTSGLSAASVLAAVDAGVDAVDAAMDSLSGLTSQPPLGSICAALSGHERDPGLDQPTLNAISRYWEGVRALYAPFEADIRSGTAEVYLHEMPGGQYTNLRAQARSLGVEQHWDWVSQAYADVNKMFGDVVKVTPTSKVVGDMALMMVTSNLSPADVLDPDKEIAFPESVVSFFKGDLGQPTGGFPEALQKKVLGAAKPITVRPGAVLPPADLAALREEAEKKTGRKLSEAELASYLMYPKVFTDFAAHLRQYGDVERLPTEVFFWGMQPGQEISIDLEKGKSLIVRYLATAEAEEDGSRKVFFELNGQPRTVRVFDRKVAPARAARPKAEAGNADHVGAPMPGLVVSVAVHAGQIVEKGDLLVSIEAMKMETAVRAERAGTIASVAVTPGVQVEAKDLLVVMAG

SEQ ID NO: 96931 - DNA, 3447 bp, Bacillus cereus G9241
  CDS (1)..(3447): transl_table=11
atgacaaagctgcaacgtattcaaaaagtattggtagctaaccgtggagagattgcaattcgtgtgtttcgagcttgttcggaactgggattaaaaacagttgcaatctattctaaagaggatagtggttcttatcatcgttataaagccgatgaatcctatttagttggggaaggaaaaaagccaattgatgcttatctagatattgaaggcattattgagattgcgaaaagtaatcatgtagatgcaatccaccctggatatggtttcttgtcagaaaatattcaattcgcaaaacgttgtgaagaagaagggattatctttatcggcccaaaaagtaagcatttagatatgtttggagataaagtaaaagcaagaacacaagcgcagctagcacaaattccagttattcctggtagtgatgggccagtagattcattagaagaagtcaaagaatttgctgaaaagtatgattacccgattattattaaagcttcccttggcggtggcggtcgtggtatgcgtattgtacgtaatagtgaagaattaagagaatcgtataatcgagcgaagtcagaagcaaaagcagcctttggtaatgatgaagtatacgtagaaaaattcgttgaaaaacctaaacatatagaagttcaaattttagcagatgaagagggcaatgttgttcatttatacgagcgagactgttctgtacaacgtcgtcatcaaaaagtagtagaaattgcacctagtgtgtcgctttcagatgatttgcgtcagcgtatttgtgatgctgctgtgaaattaacgaaaaatgtaaattatttaaacgcaggaacagttgaatttcttgtaaaagatgataatttctatttcattgaagtgaatccgcgtgttcaagtagaacatacaattacagaaatgattacaggagtcgatatcgttcaatcacaaattttaatagctgatggacatgcattacatagcaaattggtgggtgttccaaagcaagaggaagttgttgtacatggatttgcaatacaatctcgtgtaacgactgaggatccactaaataatttcatgccggatacaggaaaaattatggcatatcgatcaggtggtggatttggggttcgtcttgatacaggtaatagtttccaaggtgctgttattacaccgtactatgattctttactcgtaaaagttacaacatgggcgcttacttttgaacaagctgctgcaaaaatggaacgtaacttaaaagaattccgtattcgtggtattaaaacgaatattccattcctagagaatgtagtaaaacataaaaacttcttatcaggggaatatgacacttcatttattgatgcgtcacctgaactattcttgttcccgaaacgtaaagaccgcggaacgaaaatgttaaattacattgggacagtaacagtaaatggcttccctggggtagggaaaaaagagaaaccaattttcccagatgctcgtataccgaatgtattacactcagagccaatccaaaatggaccgaaacaaattttggatgagcgtggagcagacggattagtaaaatgggtacaagatcaaaaacgtgtacttttaacggatacaacattccgtgatgcgcatcagtcattacttgcaacgcgtattcgtacaaaagatttacatcacattgcagagccgacagcgagaatgttaccgaacttattctcagcggaaatgtggggcggtgcaacgtttgatgttgcatatcgtttcttaaaagaagatccatgggaacgattactagatcttcgtgaaaaaatgccaaatgttttattccaaatgttacttcgttcttcaaacgcagttggttacaaaaactatccggataatttaattcaaaagtttgtggagtgttctgctcaagctggaattgatgtgttccgtatttttgatagtttaaactgggtagaaggtatgagagttgcgattgatgctgtacgagatactggtaaaattgcagaagcaactatgtgttacacaggggatattcatgatccattgcgtagtaaatatgatttaaattactataaaaatttagcaaaagaattggaagcatcaggagctcacattttaggtattaaagatatggcgggcttactaaaaccaaacgcagcatatgatttagtttcagcattaaaagagaccgtatcgattccgattcacctgcacacacacgatacgagtggaaatggtatattaacgtatacgaaagcaattgaagcgggtgttgatattgtcgatgtagcagtaagttctatggctggtcaaacgtcacaaccaagtgcgaacacgctatactatgcgttaggcggaaatgaaagacagccagatgttaatatagattcattagaaaaactatctcattactgggaagatgtacgtaaatactacgcaccgtttgaaagtggtatgaatgctcctcatacagaggtatatatgcacgaaatgccaggcggacagtatagtaatttacaacaacaagcgaaagcggttggcttaggagatcgttttgatgaagtgaaagtaatgtaccgccgtgtgaatgacatgtttggtgatattgttaaagtaacgccatcatctaaagttgttggtgatatggcattattcatggttcaaaatcacttaacagaacaagatgttttagagcgtggacattctatggacttcccaggatctgttgttgaaatgttctctggggacttaggacaaccgtatggtggtttcccgaaaaagttacaagaaattattttaaaagggaaagaaccattaacagtaagaccaggtgaactattagaaccagtagatttcgacgcgttaaaagaagagttattccataaacttggacgcgaagtgacgatgtttgatgtagttgcatatgcattatatccaaaagtatttatggattacgaaaaagttgctgagatttatggaaatgtatctgtgcttgatacaccgacattcttctatggtatgagacttggtgaagaaatcgatgtggaaattgagcaaggtaaaacattgatggttaaactagtatcaattggcgagcctcagccagatggaaatcgtgttctttacttggagtttaatggtcaaccacgtgagattgttgtgaaagacgaaagtgtgaaagcaacagttgcacaacgtgtgaaaggaaaccgtgaaaatccaaaccacattagcgcaacaatgccaggaacggttattaaagtagttgtaaaagaaggcgatgaagtgaaaaaaggcgattctatggcaattacagaagcgatgaaaatggaaacgacagttcaagcgccgttcaatggtaaagtgaaaaaggtatatgttaacgatggagatgcaattcaaacgggtgacttactcattgaattagatcactaa

SEQ ID NO: 96932 - protein, 1148 aa, Bacillus cereus G9241
MTKLQRIQKVLVANRGEIAIRVFRACSELGLKTVAIYSKEDSGSYHRYKADESYLVGEGKKPIDAYLDIEGIIEIAKSNHVDAIHPGYGFLSENIQFAKRCEEEGIIFIGPKSKHLDMFGDKVKARTQAQLAQIPVIPGSDGPVDSLEEVKEFAEKYDYPIIIKASLGGGGRGMRIVRNSEELRESYNRAKSEAKAAFGNDEVYVEKFVEKPKHIEVQILADEEGNVVHLYERDCSVQRRHQKVVEIAPSVSLSDDLRQRICDAAVKLTKNVNYLNAGTVEFLVKDDNFYFIEVNPRVQVEHTITEMITGVDIVQSQILIADGHALHSKLVGVPKQEEVVVHGFAIQSRVTTEDPLNNFMPDTGKIMAYRSGGGFGVRLDTGNSFQGAVITPYYDSLLVKVTTWALTFEQAAAKMERNLKEFRIRGIKTNIPFLENVVKHKNFLSGEYDTSFIDASPELFLFPKRKDRGTKMLNYIGTVTVNGFPGVGKKEKPIFPDARIPNVLHSEPIQNGPKQILDERGADGLVKWVQDQKRVLLTDTTFRDAHQSLLATRIRTKDLHHIAEPTARMLPNLFSAEMWGGATFDVAYRFLKEDPWERLLDLREKMPNVLFQMLLRSSNAVGYKNYPDNLIQKFVECSAQAGIDVFRIFDSLNWVEGMRVAIDAVRDTGKIAEATMCYTGDIHDPLRSKYDLNYYKNLAKELEASGAHILGIKDMAGLLKPNAAYDLVSALKETVSIPIHLHTHDTSGNGILTYTKAIEAGVDIVDVAVSSMAGQTSQPSANTLYYALGGNERQPDVNIDSLEKLSHYWEDVRKYYAPFESGMNAPHTEVYMHEMPGGQYSNLQQQAKAVGLGDRFDEVKVMYRRVNDMFGDIVKVTPSSKVVGDMALFMVQNHLTEQDVLERGHSMDFPGSVVEMFSGDLGQPYGGFPKKLQEIILKGKEPLTVRPGELLEPVDFDALKEELFHKLGREVTMFDVVAYALYPKVFMDYEKVAEIYGNVSVLDTPTFFYGMRLGEEIDVEIEQGKTLMVKLVSIGEPQPDGNRVLYLEFNGQPREIVVKDESVKATVAQRVKGNRENPNHISATMPGTVIKVVVKEGDEVKKGDSMAITEAMKMETTVQAPFNGKVKKVYVNDGDAIQTGDLLIELDH

SEQ ID NO: 96933 - DNA, 3453 bp, Croceibacter atlanticus HTCC2559
  CDS (1)..(3453): transl_table=11
atgaatattaataaagtattagttgccaatagaggagaaatagctattcgtatttttagagcgtgtacagagataaacgtaaaaacagttggcgtttatacttttgaagatcgctattcattacatcgatataaagcagatgagtcttaccaaataggagaggacaacgatcctttaaaaccctatttaaataaggatgaattaattagagtagcattagaaaataatgtagatgctattcatcctggatatgggtttctttctgaaaatgcagaatttgctcaaaagtgtaaagacaacggaatcatatttattggacctaaagtgtcagttttaaaatctttaggagataagattactgccaagcaagtggcgttagagaataatgtcccaattatacaaagtaactcaaaagacttagactctattgatattgctattagcgaggcagaagccattggctatccagtaatgcttaaggctgcttctggtggtggtggtagaggtatgcgtgttataagagaagaagatgagttaaggcgtgcatttaacgaaagtaaacgcgaagccttaaatgcatttggagacgataccgtttttcttgaaaaatttgtagaaaaccctaagcatattgaaatccagattgtagcagataatcatggtaatatggtgcatttgtttgaacgagattgttctgtacaacgtcgttatcaaaaggtaatagagtttgcaccttcgtatgatttagatacatctataaaagaagatttatataagtatgcagtaaagatttgtaaagcggtaaactataataatataggtactgtagaatttttggtagatgatgatggctctatttattttattgaagtaaatccgcgtatacaagtagaacatacagttacagaagttgttactaatatagacttggtaaaaacacagttgtttatagctggaaattataagttaagcgatcaacaaattaagattcctaatcaagaagctgtaaaggttaatggttatgctttacaatgccgtattaccacagaagatcctcaaaatgatttcaaaccagattatggtacaatctctacttacagaagtgcctcaggatttggtattcgtctagatgctggtagtgtgtatcaaggtgctacaatatcaccttttttcgactctatgttggtaaaagttactgctaatagtagaacattagatggtgcttcacgaaaaattagaagagctttagccgagtttagaatacgtggcgtaaaaaccaatatgccattcttagataacatactagctcatgacacatttagaaaaggtgaggtaactgtaaactttattaaatctcatccagacttatttacgtttaaagcacctagaaacagagcaacaaaattagtaacctatttaggagatgtaattgttaacggaaatccagatgtaaagaaaaaagatccatctaaagtatttataaaacccgaagtaccaaagtatgataagtctgccagctatccagaaggcacaaaagatttacttacaaaattaggtccagatgaattttctaagtggttaaaagcagaaaagaaagtacattttacagacaccacaatgcgtgatgcacaccaaagtttacttgctacacgtatgcgtacttacgatatgctaaaagttgcagaaggatatgctaaaaatcatccagacatttttagtatggaagtttggggtggcgcaacctttgatgtttgtatgcgttttttacaagaaaacccttggcaacgcttaaaattgcttagagaggcaatgcctaatgtattattacaaatgcttattagaggttcaaatggtgttggttatactgcatatccagacaaccttattgcagaatttgtagaacaatcttggaatactggagtagatgtgtttagaatttttgattctttaaactggatgcaatcaatagcaccttgtattgaacacgtaagaactcgcactaaaggtcttgcagaagcgtcaatatgttatactggcgatatcctaaaccctgaaaataaaaagtataaccttaactattatacaagtttagcaaaagatatagaaaatgcaggtgcacatattcttgccattaaagatatggctggattattaaaaccctatgcagcgtatgagttaatatcggcattaaaggataccgtaaatattcctattcacctacatactcatgatacatcttccatacaggcagctacttatttaaaggctgttgaagctggtgtagatgtagttgatgtagctttaggaggcttatctggtcttacgtctcaaccaaacttcaattcagttgtagaaatgcttaagtatcaagagcgctcttcaacaataaataccaagtctttaagtgaatattctcactattgggaaacagtgagagattattattatccatttgagtctggtcttaaagcaggctctggagatgtgtatactcacgaaattcctggaggacaatattctaatttaaaaccacaggcgcaagcattaggtttagaagatcgtttccacgaaataacggcaatgtacgcagatgtaaattcactttttggcgatattgttaaggtaacaccaagctctaaggttgttggagatatggcacagtatcttgtaagtaataaccttacaataaaagatgtattggagcgtggagatagtatatctttcccgcaatctgtagttagtttctttaaaggtgacttagggcaaccagttggtggattcccaaaagacttgcaaaaacttattttgaaagacacaaaagcttatacagagcgaccaaattctcaattaccagaattagatatagataaagagtataaggagtttaaagacatgttcgaaaatgatatgagtagaacactggatattacagacttcttatcttacaaactttacccaaaagtatttttagatgcctataacaatcatttaaaatatgacaacctgataaacctgcctactaaaaactttttctacggcatggagataggtgaggagataattattgaattagatagaggtaaaacactactaattaccttagactctgttggagaacctaacgaagatggtattgtagatgtttattttagggttaacggccaaggtcgtattgtaaaaataaaagacacttctgttaaggtagataaggttgagtataaaaaagctgataaagcagatgataaagaaataggtgcgccgttacaaggaatgctgtctaccattcttgttaaaaaaggagatgctgtaaaaaagaatcaacctttatttattattgaagcaatgaaaatggaaactacaattactgcaaatgtagatgctactgtgaaagaaattattcttaaagaaaatattatggtaaactcagaagacctagtattaactttagaataa

SEQ ID NO: 96934 - protein, 1150 aa, Croceibacter atlanticus HTCC2559
MNINKVLVANRGEIAIRIFRACTEINVKTVGVYTFEDRYSLHRYKADESYQIGEDNDPLKPYLNKDELIRVALENNVDAIHPGYGFLSENAEFAQKCKDNGIIFIGPKVSVLKSLGDKITAKQVALENNVPIIQSNSKDLDSIDIAISEAEAIGYPVMLKAASGGGGRGMRVIREEDELRRAFNESKREALNAFGDDTVFLEKFVENPKHIEIQIVADNHGNMVHLFERDCSVQRRYQKVIEFAPSYDLDTSIKEDLYKYAVKICKAVNYNNIGTVEFLVDDDGSIYFIEVNPRIQVEHTVTEVVTNIDLVKTQLFIAGNYKLSDQQIKIPNQEAVKVNGYALQCRITTEDPQNDFKPDYGTISTYRSASGFGIRLDAGSVYQGATISPFFDSMLVKVTANSRTLDGASRKIRRALAEFRIRGVKTNMPFLDNILAHDTFRKGEVTVNFIKSHPDLFTFKAPRNRATKLVTYLGDVIVNGNPDVKKKDPSKVFIKPEVPKYDKSASYPEGTKDLLTKLGPDEFSKWLKAEKKVHFTDTTMRDAHQSLLATRMRTYDMLKVAEGYAKNHPDIFSMEVWGGATFDVCMRFLQENPWQRLKLLREAMPNVLLQMLIRGSNGVGYTAYPDNLIAEFVEQSWNTGVDVFRIFDSLNWMQSIAPCIEHVRTRTKGLAEASICYTGDILNPENKKYNLNYYTSLAKDIENAGAHILAIKDMAGLLKPYAAYELISALKDTVNIPIHLHTHDTSSIQAATYLKAVEAGVDVVDVALGGLSGLTSQPNFNSVVEMLKYQERSSTINTKSLSEYSHYWETVRDYYYPFESGLKAGSGDVYTHEIPGGQYSNLKPQAQALGLEDRFHEITAMYADVNSLFGDIVKVTPSSKVVGDMAQYLVSNNLTIKDVLERGDSISFPQSVVSFFKGDLGQPVGGFPKDLQKLILKDTKAYTERPNSQLPELDIDKEYKEFKDMFENDMSRTLDITDFLSYKLYPKVFLDAYNNHLKYDNLINLPTKNFFYGMEIGEEIIIELDRGKTLLITLDSVGEPNEDGIVDVYFRVNGQGRIVKIKDTSVKVDKVEYKKADKADDKEIGAPLQGMLSTILVKKGDAVKKNQPLFIIEAMKMETTITANVDATVKEIILKENIMVNSEDLVLTLE

SEQ ID NO: 96935 - DNA, 3441 bp, Sulfitobacter sp. EE-36
  CDS (1)..(3441): transl_table=11
atgaccgactttaagaaaattctaatcgcaaaccgcggcgaaatcgccattcgaattatgcgcgcggccaacgagatgggaaaaaagacggtcgccgttttcgccgaggaagataagctgggcctacaccgtttcaaggccgatgaagcctatcggatcggggccggtttggggcctgtcgccgcctatttgagcatcgatgaaatcatccgcgtggccaaagcctcgggcgcggatgcgatccacccgggctatgggctactgtcagaaaatcccgattttgtagatgcttgcgcgcagaacggtattacttttatcgggccgcgtgcggaaacaatgcgcgccttgggcgacaaggccagcgcgcgacgcgtggcgatggaagccggcgtgccggtcgtccccgcgacagacgttctaggcgatgatatggaggtcgtccgcaagcaggccgcagaggttggctacccgctgatgctcaaggcgtcctggggtggcgggggtcgtggcatgcgccccatcgcgaatgaagaagaacttaaagaaaaagtgatggaaggccggcgcgaggcagaagcggccttcggcaatggcgaaggctatctggaaaagatgatcctgaaggcgcgccatgtcgaggtgcagattttgggcgacagccacggcgaaatctaccatctatttgaaagagattgttccgttcagcgtcgcaaccaaaaggtcgtcgaacgcgcgcctgccccctatcttaccgaagaacaacgcgccgagatttgcgaattgggccgcaaaatctgtgcacatgttaactatgaatgtgccggtacggtcgaattcctgatggatatggacgacggcaagttttattttatcgaggtaaatccaagggttcaggtcgaacacacggtcaccgaagaggtcaccggcatcgatatcgtccaggcgcaaatcttaattgccgaaggcaagaccatcgccgaggcgacaggcaaggacacgcaggcagatgtgcaactgaacggccatgcgttgcagactcggatcaccaccgaagatccccaaaacaacttcattcctgattatggccgcatcaccgcctttcgtgaggccaccggcatgggcatccgcctggacggcggtaccgcctattcgggcggggtgatcacgcgctattatgacagccttttggtcaaggtgacggcgaaagcgcaaacgcccgagcaagcgatcgcccgcatggaccgcgccctgcgcgagttccgaatccggggcgtgtcgacaaacatcgcctttgtcgaaaatttgctgaaacacccgaccttcctcgataatagttaccacaccaagtttatcgaccagacgcccgagctttttacctttgaaaagcgccgcgaccgggcgaccaaagtattaacatatatcgctgatattacggtgaacgggcaccctgaaaccaaagggttcgaacgccctgcggcggccgtccgcgcgccgcagccgcccgccgcccgagccgagccgatgatgggcacccgtaacctgcttgaacaaaaagggccgcaggctgttgccgattggatggggcaacagcgacagcttttgatcaccgacaccaccatgcgtgacggccaccagtcattgcttgcgacgcgaatgcgcagccatgacatgatcaaggttgcacccgcctatgccgctaatcttccacagcttttctcgatggagtgctggggcggcgcgacctttgatgtggcctaccggttcttgcaagaatgtccgtggcagcgcctgcgcgacctacgcgctgccctgccaaacgtgatgacgcaaatgctgctgcgtgggtcgaatggcgtgggctacaccaattatccggacaatgtggtgcaagaatttgtccgcgtggccgcgaccgagggtgtcgatgttttccgcgtgtttgacagcctgaactgggttgaaaacatgcgtgttgcgatggatgcggtgattgaaaacggtaagatttgcgaaggtaccgtttgctataccggcgacatttttgatccggaccgatcaaaatacgacctgaaatattatgttgccatgggcaaggagctaaaagcggccggagcccacgttctgggcctgaaagacatggccggcgtgctcaagccgaatgctgccaaagtattgatcaaagcgctgaaatccgaagtcggcctgccgatccatttccacacgcatgataccgcaggcacggcgaccgcgacgatcatggcggcctccgaggcgggcgtggacgcggtagattgcgccatggacgcgctatcgggcaacacgtctcaggcgacgctcgggtccgtggtcgaagcgctgaaacacacggatcgcgacacgggcctgtcgatggacgcggtgcgcgaaatctctaactactgggaagacgtgcgtggcgaatatgccgcgttcgagaccggcatgcaggccccttcctccgaagtctatctgcacgagatgcccggcgggcagttcaccaacctcaaggcgcaggccgcgtcgatggggctggatgatcgttggcccgaggtcgccaagacctatgccgaggtcaaccagatgtttggtgatatcgtcaaggtgacaccgtcgtccaaagtggtcggcgacatggctctgatgatggtatcccaagggttaacccgcgcgcaggtcgaagacccgaaggcagaaatgtcctttcctgacagcgtgatcgacatgatgcgcggcaatctgggccagcctccgggcgggttccctgacgcaatcgtcgacaaaatcctgaaaggcgaaaaaccgaacacggaacgccccggtgcgcatctgcctcctgccgatcttgaagcgacacgcaaggaattgcgcgaccttctggaaggggctcaggttgaagacgatgacctgtcagggtacctgatgtaccccaaggttttcctggattacatgggtcgtcaccggacctatggccctgtccgtgtattgccgacgcgcaccttcttctacgggatggaaccgggcgaagagatcaccgcggaaatcgacccgggcaagacgctggaaattcgtctgcaagccttgagcgagaccaatgaagacggcgacgttaaggtcttttttgaactgaatggccagccgcgcgtggtgcgcgtgcccaaccggatggtcaaagcgacgactgcacagcgtcccaaggcagagatcggtaacgtcaatcacatcggagcaccgatgccgggggttgttgcctcggtcggggcgacggtgggtcaaaaagtcaaatccggcgacctgcttctgaccatcgaggcgatgaaaatggaaaccggtatccacgcggaccgcgatgctgtcgtcaaagcggttcatgttacgcccgggggccagatcgacgccaaggatctgctggtcgagttggagtga

SEQ ID NO: 96936 - protein, 1146 aa, Sulfitobacter sp. EE-36
MTDFKKILIANRGEIAIRIMRAANEMGKKTVAVFAEEDKLGLHRFKADEAYRIGAGLGPVAAYLSIDEIIRVAKASGADAIHPGYGLLSENPDFVDACAQNGITFIGPRAETMRALGDKASARRVAMEAGVPVVPATDVLGDDMEVVRKQAAEVGYPLMLKASWGGGGRGMRPIANEEELKEKVMEGRREAEAAFGNGEGYLEKMILKARHVEVQILGDSHGEIYHLFERDCSVQRRNQKVVERAPAPYLTEEQRAEICELGRKICAHVNYECAGTVEFLMDMDDGKFYFIEVNPRVQVEHTVTEEVTGIDIVQAQILIAEGKTIAEATGKDTQADVQLNGHALQTRITTEDPQNNFIPDYGRITAFREATGMGIRLDGGTAYSGGVITRYYDSLLVKVTAKAQTPEQAIARMDRALREFRIRGVSTNIAFVENLLKHPTFLDNSYHTKFIDQTPELFTFEKRRDRATKVLTYIADITVNGHPETKGFERPAAAVRAPQPPAARAEPMMGTRNLLEQKGPQAVADWMGQQRQLLITDTTMRDGHQSLLATRMRSHDMIKVAPAYAANLPQLFSMECWGGATFDVAYRFLQECPWQRLRDLRAALPNVMTQMLLRGSNGVGYTNYPDNVVQEFVRVAATEGVDVFRVFDSLNWVENMRVAMDAVIENGKICEGTVCYTGDIFDPDRSKYDLKYYVAMGKELKAAGAHVLGLKDMAGVLKPNAAKVLIKALKSEVGLPIHFHTHDTAGTATATIMAASEAGVDAVDCAMDALSGNTSQATLGSVVEALKHTDRDTGLSMDAVREISNYWEDVRGEYAAFETGMQAPSSEVYLHEMPGGQFTNLKAQAASMGLDDRWPEVAKTYAEVNQMFGDIVKVTPSSKVVGDMALMMVSQGLTRAQVEDPKAEMSFPDSVIDMMRGNLGQPPGGFPDAIVDKILKGEKPNTERPGAHLPPADLEATRKELRDLLEGAQVEDDDLSGYLMYPKVFLDYMGRHRTYGPVRVLPTRTFFYGMEPGEEITAEIDPGKTLEIRLQALSETNEDGDVKVFFELNGQPRVVRVPNRMVKATTAQRPKAEIGNVNHIGAPMPGVVASVGATVGQKVKSGDLLLTIEAMKMETGIHADRDAVVKAVHVTPGGQIDAKDLLVELE

SEQ ID NO: 96937 - DNA, 3438 bp, Roseovarius nubinhibens ISM
  CDS (1)..(3438): transl_table=11
gtgagtgatttcaagaaaatccttgttgccaaccgtggtgagattgccatccggatcatgcgagccgccaatgaaatgggcaaacgcaccgtggccgtcttcgccgaagaggacaagctcggcttgcaccgcttcaaggcggacgaggcctatcgcatcggggccggtctcgggccagtggccgcctatctgagcatcgatgaaatcatccgcgtcgccaaggaatcgggcgccgacgcgatccacccgggctatggtctgctctccgagaaccccgatttcgtcgacgcctgcgaggccaacggcatcaccttcatcggccccaaggccgaaaccatgcgcgcccttggcgacaaggccagcgcccgccgcgtggccatcgaggccggcgtgccggtcatccccgccaccgaggtgctcggcgacgatatggaggccatcgcccgcgaggccgaagaggtcggctatcccttgatgctcaaggcctcctggggcggcggcggacgcggcatgcgcccgatcaacggccccgatgagctggtggaaaaggtgctcgaaggccgccgcgaggccgaagccgcctttggcaatggcgagggctatctcgaaaagatgatcctgcgcgcccgccatgtcgaggtccagatcctcggcgacaaacatggcaacatgtaccacctctttgaacgcgactgctcggtccagcgccgcaaccagaaggtcgtcgaacgcgcccccgccccctatctgagcgaggcccagcgcgccgagatctgcgagcttggctacaagatctgcaaacatgtgaattacgaatgcgccggcaccgtcgaattcctgatggatatggacagcggcgaattctacttcatcgaggtcaacccgcgcgttcaggtcgaacataccgtgaccgaagaggtcaccggcatcgacatcgtgcaggcccagatcaagatcgccgaaggcaagaccctggccgaggccacccgcaaggagagccaggacgacatccgtctcaacggccacgcgctgcagacccggatcaccaccgaggacccgcagaacaacttcatccccgattacggccgcatcaccgcctatcgctcggccaccggcatgggcatccgtctcgacggcggcaccgcctatgcgggcggcgtgatcacccgctattacgacagtctgctggtcaagatcaccgcgcatgcccagacccccgaggcggcgattgcccggatggatcgggcgctgcgcgaattccgtattcgcggcgtgagcaccaacatcgccttcgtggaaaacctgctgaaacacccgaccttcctcagcaatgaatacaccacgaaattcatcgacacgacgccggacctgttcaaattctccaagcgtcgcgaccgcggcaccaaggtgctgacctatatcgccgacatcaccgtcaacggccatcccgagaccgaaggccgcccggtgcccgccgaggccaagctgcccaagccgccggcactgcaaggcgcgcccaaggacggcaccaagaccctgctcgacgccaagggcgccaaggcggtggccgactggatgctggcgcaggagcggctcctgctcaccgacaccaccatgcgcgacgggcatcagtcgctcttggcgacgcggatgcgctcgatcgacatgatcaaggccgcccccgcctatgccgccaacctgcccgagctcttctcggtcgaatgctggggcggtgcgacctttgacgtggcctatcgcttcttgcaggaatgcccctggcagcgcctgcgcgagctgcgcgccgccatgccgaacctgctgacccagatgctgctgcgcgcctccaacggcgtcggctacaccaactatcccgacaatgtggtgcaggaattcgtccgtcaggccgccaagaccggcgtcgatgtattccgcgtcttcgacagtctcaactgggtcgaaaacatgcgcgtcgcgatggatgcggtgatcgacagcggcaagatctgcgaaggcacgatctgctacaccggcgatatcctcgacccgaaccgcgccaaatatgacctcaaatattacgtctcgatggccaaggagatgcagtcggccggcgcgcatatccttgggctcaaggacatggcgggcctcctgaaacccgaagcggcgcgggtgctcgtcaaggcgctgaaagaggaaatcgacattcccgtccatttccacacccacgacaccagcggcatcgcgggcgccacgatcctcgccgcctccgacgcgggcgtcgacgcggtcgatgcggcgatggacgccttctcgggcggcacgtcccagccctgtctcggctcgatcgtcgaagccctggcccataccaagcgcgacaccgggatgtcccgcgaacgtatccgcgaaatgtcggattactgggaacatgtccgcgcccaatatgtggcctttgaaagcggtctgcaggcccccgcctccgaggtctatctccacgagatgcccggcggtcagttcaccaacctcaaggcgcaggcccgctcgctcggtctcgaagagaaatggcccgagatcgcccgcacctatgccgatgtgaatcagatgttcggcgacatcgtcaaggtgaccccctcctccaaggtggtcggcgacatggccctcctgatggtgagccagggcctcacccgtcacgacgtggaaaaccccgacaccgatctcgccttcccggattcggtggtcgacatgatgcgcggcaacctcggccagccccccggcggcttccccgaaagcatcgtgcaaaaggtgctcaagggcgaagcccccaacaccgaccgccccggcgcgcatctgccgcccgtcgatctcgacgccaagcgtcaggaactgcgcgagctgctcgagggcaaggagatcgacgacgaggatctcaacggctacctcatgtatcccaaggtcttcctcgactacatgggccgccaccggacctatggcccggtccgcaccctgccgaccaagaccttcttctacggcatggagcccggcgaagagatcagcgtcgaaatcgaccccggcaagacgctcgaaatcctgctgcaggcggtgggcgaaacccaggaagacggcgaagtgcgcgtcttcttcgaactgaacggccagccgcgcgtcatccgcgtgccgaaccgtctggtcaaggcccagaccgccgcccgccccaaggccgagctcggcaaccccgaccacatcggcgcgccgatgcccggcgtggtgtcctcggtcgcggtcagcgtcggccagaaggtcaagcaggacgatctcctgctcaccatcgaggcgatgaagatggaaaccggcatctatgccgaacgcgacgcggtggtcaaagccgtgcatgttcagcccggcggtcagatcgacgccaaggacctcatggtcgagctggaatga

SEQ ID NO: 96938 - protein, 1145 aa, Roseovarius nubinhibens ISM
MSDFKKILVANRGEIAIRIMRAANEMGKRTVAVFAEEDKLGLHRFKADEAYRIGAGLGPVAAYLSIDEIIRVAKESGADAIHPGYGLLSENPDFVDACEANGITFIGPKAETMRALGDKASARRVAIEAGVPVIPATEVLGDDMEAIAREAEEVGYPLMLKASWGGGGRGMRPINGPDELVEKVLEGRREAEAAFGNGEGYLEKMILRARHVEVQILGDKHGNMYHLFERDCSVQRRNQKVVERAPAPYLSEAQRAEICELGYKICKHVNYECAGTVEFLMDMDSGEFYFIEVNPRVQVEHTVTEEVTGIDIVQAQIKIAEGKTLAEATRKESQDDIRLNGHALQTRITTEDPQNNFIPDYGRITAYRSATGMGIRLDGGTAYAGGVITRYYDSLLVKITAHAQTPEAAIARMDRALREFRIRGVSTNIAFVENLLKHPTFLSNEYTTKFIDTTPDLFKFSKRRDRGTKVLTYIADITVNGHPETEGRPVPAEAKLPKPPALQGAPKDGTKTLLDAKGAKAVADWMLAQERLLLTDTTMRDGHQSLLATRMRSIDMIKAAPAYAANLPELFSVECWGGATFDVAYRFLQECPWQRLRELRAAMPNLLTQMLLRASNGVGYTNYPDNVVQEFVRQAAKTGVDVFRVFDSLNWVENMRVAMDAVIDSGKICEGTICYTGDILDPNRAKYDLKYYVSMAKEMQSAGAHILGLKDMAGLLKPEAARVLVKALKEEIDIPVHFHTHDTSGIAGATILAASDAGVDAVDAAMDAFSGGTSQPCLGSIVEALAHTKRDTGMSRERIREMSDYWEHVRAQYVAFESGLQAPASEVYLHEMPGGQFTNLKAQARSLGLEEKWPEIARTYADVNQMFGDIVKVTPSSKVVGDMALLMVSQGLTRHDVENPDTDLAFPDSVVDMMRGNLGQPPGGFPESIVQKVLKGEAPNTDRPGAHLPPVDLDAKRQELRELLEGKEIDDEDLNGYLMYPKVFLDYMGRHRTYGPVRTLPTKTFFYGMEPGEEISVEIDPGKTLEILLQAVGETQEDGEVRVFFELNGQPRVIRVPNRLVKAQTAARPKAELGNPDHIGAPMPGVVSSVAVSVGQKVKQDDLLLTIEAMKMETGIYAERDAVVKAVHVQPGGQIDAKDLMVELE

SEQ ID NO: 96939 - DNA, 3441 bp, Oceanicola batsensis HTCC2597
  CDS (1)..(3441): transl_table=11
atggccgatttccagaaaatcctcatcgcgaaccgtggcgagatcgccatccggatcatgcgggcagcgaacgagctcggcaagagaaccgtcgcggtctatgccgaagaggacaagctgggcctgcaccgtttcaaggcggacgaggcctacaagatcggcgaggggctggggcccgtcgcggcctatctcagcatcgaggagatcatccgcgtcgccaagatgtcgggcgcggacgccatccatccgggctatgggctgctgtcggaaaatcctgacttcgtggatgcctgcgacgccgccgggatcaccttcatcgggccccgggccgagacgatgcgcgccctcggcgacaaggccagcgcgcggaaggtggcggtcgaggcaggcgtgccggtcatccccgcgaccgaggtgctgggggacgacttcgaggccatcacgaaagaggccgaggagatcggctttcctctgatgctcaaggcgtcatggggcggcggcggccgggggatgcggccgatcgaaaacgctaaagagctgaaggacaaggtgctggaaggccggcgcgaggccgaggccgccttcggcaacggcgagggatatctggaaaagatgatcatccgggcccgccacgtcgaggtccagatcctcggcgacaggcagggcaacatctatcacctttacgagcgtgactgttccgtccagcggcgcaaccagaaggtcgtggaacgcgcccccgccccctacctttccgaagcgcagcgcgaggagctgtgcgaactgggccgcaagatctgcgcccatgtgaattacgaatgcgccggcacggtcgagttcctgatggatatggataccggcaagttctacttcatcgaggtgaacccccgcgttcaggtcgaacataccgtgaccgaagaggtcaccggcatcgacatcgtgcaggcgcagatcctcatcgccgagggcaaggcgctggccgaggcgacgggcaaggcctcgcaatacgacgtcaagctgaccgggcacgccttgcagacccggatcaccaccgaggatcccaccaacaacttcatccccgattacggccgcatcagcgcctatcgctcggccaccggcatgggcatccggctcgatggcgggacggcctatgcggggggcgtgatcacgcgctactacgactcgctgctggtcaaggtgaccgccaaggcgccgacgcccgagttggcgatccgccggatggaccgggcactgcgcgaattccgtatccggggcgtcagcacgaatatcgacttcgtcatcaacctgcttaagcaccccacgttcctgtcgaaccagtacacgaccaagttcatcgacacgacgcccgagctgttcgatttcaagccgcggcgcgaccggggcacgaaggtgctgacctatatcgccgacatcacggtgaacgggcaccccgaggtgcagggccggcccatgccgcatcccgacctcaagccgccgcgcatcccggcggtcaagggcgaggtgcccaagggcacccgcgacctgctggacgacaaggggccggaggccgtggcgaaatggatgaaggcgcaggacgaactgctctttaccgacacgacgatgcgcgacggccaccagtcgctgctggcgacgcggatgcgctcgctcgacatgatcaagatcgcgccggtctatgccgcgaacctcagccagctcttcagcgtggaatgctggggcggcgcgaccttcgacgtggcctaccgcttcctccaggaatgtccgtggcagcgcctgcgcgacatccgcgagaagatgcccaacatcctgacccagatgctgctgcgcgcctcgaacggggtgggctacaccaactatcccgacaacgtggtgcaggaattcgtgcgccaggcctcggtcaccggagtcgacgtcttccgcgtcttcgacagcctcaattgggtcgagaacatgcgcgtggcgatggacgccgtgcaggagaacggcaagatctgcgagggcacgatctgctacaccggcgatgcgctcgacccggaacgggccaagtacgacatcgcctattacgtgaagatggcgaaggagatggagaaggccggcgcgcatgtcctcggcatcaaggacatggcgggcgtgatgaccgcgccggtggccgaggtgctcttccccgcgctcaaggacgcggtggacctgccgatccatttccacacgcatgacacgagcggcgcggcgatctcgaccatcctgaccgccgccgcggccggcgtggactgtgtcgacgcggcgatggattcgctctcgggcaacacctcgcagccgaccttcgggtcgatcctcgtggccctgcgccacgggtcgcgggcctcttcgatcgacgtcgccgccgtgcgcgagatttccaactactgggaggcggtgcgcggccagtacgcggccttcgaatcgggcatgcaggcccccgcctccgaggtctacctgcacgagatgccgggcgggcagttcaccaacctcaagtcgcaggcccgctccatggggctcgaggaacgctggcacgaggtcgcgcaggcctatgccgacgtgaaccagatgttcggagacatcgtgaaggtcacgccctcgtccaaggtggtcggcgacatggccctgatgatggtgtcccagggcctgacccgcgaggacgtggagaaccccaagaaggacgtgagtttccccgactcggtcatcgacatgatgaagggcaacctcggccagccgccgggcgggtttcccgaggccatcgtcaggaaggtcctcaagggtgaaaagcccaggaccgaacggccgggcaagcacctggagcccgtcgatctcgaggagaagcgcaaggagatcagcaacaagctggacgggatcgagatcgacgacgaggatctcaactcctacctcatgtatcccaaggtcttcgaggaatacggccaccggcacgagacctacggcccggtgcgcaccctgccgacccacaccttcttctacggcatgaaaccggaagaggagatcacggccgagatcgacccgggcaagacgctggagatccgcctggtgaccgtgggcgacacgcaggacaacggcgaggtgcgggtgttcttcgaactcaacggccagccccgcgtcgtccgcgtgcccgaccgcaaggcgaccggcgacaaggcggcggcgcccaaggcggacccggccaaccccgatcacgtctcggcgccgatgcccggcgtcgtcgcctcgctcgccgtggcgcccggcgccaaggtcagagagggcgacctgctgctcaccatcgaggcaatgaaaatggagaccggcctgcacgccgaccgcgacggggtgatcaagctcatccatgtcgccacgggcgcgcagatcgacgccaaggacctgctcgtcgaattcgagtga

SEQ ID NO: 96940 - protein, 1146 aa, Oceanicola batsensis HTCC2597
MADFQKILIANRGEIAIRIMRAANELGKRTVAVYAEEDKLGLHRFKADEAYKIGEGLGPVAAYLSIEEIIRVAKMSGADAIHPGYGLLSENPDFVDACDAAGITFIGPRAETMRALGDKASARKVAVEAGVPVIPATEVLGDDFEAITKEAEEIGFPLMLKASWGGGGRGMRPIENAKELKDKVLEGRREAEAAFGNGEGYLEKMIIRARHVEVQILGDRQGNIYHLYERDCSVQRRNQKVVERAPAPYLSEAQREELCELGRKICAHVNYECAGTVEFLMDMDTGKFYFIEVNPRVQVEHTVTEEVTGIDIVQAQILIAEGKALAEATGKASQYDVKLTGHALQTRITTEDPTNNFIPDYGRISAYRSATGMGIRLDGGTAYAGGVITRYYDSLLVKVTAKAPTPELAIRRMDRALREFRIRGVSTNIDFVINLLKHPTFLSNQYTTKFIDTTPELFDFKPRRDRGTKVLTYIADITVNGHPEVQGRPMPHPDLKPPRIPAVKGEVPKGTRDLLDDKGPEAVAKWMKAQDELLFTDTTMRDGHQSLLATRMRSLDMIKIAPVYAANLSQLFSVECWGGATFDVAYRFLQECPWQRLRDIREKMPNILTQMLLRASNGVGYTNYPDNVVQEFVRQASVTGVDVFRVFDSLNWVENMRVAMDAVQENGKICEGTICYTGDALDPERAKYDIAYYVKMAKEMEKAGAHVLGIKDMAGVMTAPVAEVLFPALKDAVDLPIHFHTHDTSGAAISTILTAAAAGVDCVDAAMDSLSGNTSQPTFGSILVALRHGSRASSIDVAAVREISNYWEAVRGQYAAFESGMQAPASEVYLHEMPGGQFTNLKSQARSMGLEERWHEVAQAYADVNQMFGDIVKVTPSSKVVGDMALMMVSQGLTREDVENPKKDVSFPDSVIDMMKGNLGQPPGGFPEAIVRKVLKGEKPRTERPGKHLEPVDLEEKRKEISNKLDGIEIDDEDLNSYLMYPKVFEEYGHRHETYGPVRTLPTHTFFYGMKPEEEITAEIDPGKTLEIRLVTVGDTQDNGEVRVFFELNGQPRVVRVPDRKATGDKAAAPKADPANPDHVSAPMPGVVASLAVAPGAKVREGDLLLTIEAMKMETGLHADRDGVIKLIHVATGAQIDAKDLLVEFE

SEQ ID NO: 96941 - DNA, 3727 bp, Bacillus stearothermophilus
  CDS (92)..(3535): transl_table=11
gtcgacagcagaaaagaggtctgactttttagaaagtgtatttacaaaatagaaaaagttttatagtttaaattagaaaggaggaaagacgatgaagacaagacgaattcgcaaagtgctcgtagctaaccgcggggagatcgccatccgcgttttccgcgcctgcacggagcttggcatccgcaccgtggccatttactcgaaggaagatgtcggctcataccaccgctataaagcggatgaagcgtatttagtcggtgaaggaaaaaagccgattgaggcgtatttggatattgaaggcatcattgagattgccaaggcccacgatgtcgatgcgattcacccaggatatgggtttttttcagaaaatattcaatttgctaaacggtgccgtgaagaaggaattattttttttggcccgaatgagaaccatttggacatgttcggcgacaaggtgaaagcgcgccatgcggcggtgaacgctggcattccggtcattccgggcagcgacgggccggtcgacggccttgaggacgttgtcgctttcgccgaagcgcacggctatccgatcatcattaaagcagcacttggcggcggtgggcgcggcatgcgattcgtccgttcgaagtcggaagttaaagaagcgtttgagcgtgccaaatcggaagcaaaagcggcgtttggcagcgatgaggtgtatgttgaaaagttgatcgaaaatccaaagcacattgaagtgcaaattttaggtgactatgaaggaaatatcgttcacctttatgaacgcgactgctcggtgcagcgccgccaccaaaaagtcgtcgaagtcgcgccgagcgtctcgctgtcggacgagctgcgccaacgcatttgcgaggcagcggttcagcttatgagaagcgtcggttatgtcaatgccggcacggtcgaatttctcgtttcgggtgatgagttttatttcatcgaagtcaacccgcgcattcaagtcgagcatacgatcaccgagatgattactggaattgatatcgtccagtcgcaaattttaattgctgatggctgttcgcttcatagccatgaagtcggcattccgaagcaggaagacatccgcattaacggttatgccattcagtcgcgggtgacgacggaagacccgctcaataactttatgccagatactgggaaaataatggcgtatcgctccggtgggggctttggtgtacgtttggacgccggcaacggtttccaaggggcagtcattacgccgtattacgattccttgctcgtcaaattgtcgacatgggcgttgacgtttgagcaggcagcaagaaaaatgctgcgcaacttgcggacgttccgcattcgcgtatttaaaacgaacattccgttcttggaaaatgtcgtccaacatccgaagtttttatcaggcgaatacgatacgtcgttcatcgatacgacgccggaactattcgtgttcccacgccggaaagaccgcggaacgaaaatgctcacttacatcggcacagtgacggtcaatggattcccaggcatcggcaaaaagaaaaagccggtgtttgacaagccgcgcttgccaaaattgagcgaggcagagccgatcccggccggaacgaagcaaattttggacaagcatggccccgaggggcttgtccgctggattcaagaacagccgcgggtgctcttgaccgatacgacgttccgggacgctcatcagtcactgttggcgacacgagtccgcacggtcgatttagtgcgtgcagccgagccgagcgcgcgcttattgccgaatttattctcgcttgaaatgtggggcggggcgacgtttgatgtggcgtatcgctttttaaaagaggatccgtgggatcggcttctgaagctgcgcgacgcattcccgaacgtgttgttccaaatgttgctccgttctgccaacgccgtaggctacaaaaactatccggacaacgtcatccgcgagttcgtcgaaaaatcggcgcatgctggcatccatgtgttccgaattttcgacagtttaaactgggtgaaaggaatgacggtggcgatcgacgccgtccggcagagcggcaaaatcgctgaagcggcgatttgctatacgggtgatattttagatccgagccggtcgaaatacaatttggattactataaggcccttgcgaaagagcttgaacaggcgggtgcgcacattttggccattaaagatatggcggggctcttgaagccgcaggcggcgcatgtgctcatttccgggctcaaggaaacagtcgacattccgatttatttgcatacgcacgacacgagcggtaacggcatttatacgtacgcgaaagcgattgaagccggcgttgatattgttgatgtcgccatcagttcgatggccggcttaacgtctcagccgagcgccaatacgctttactatgcgcttgaagggaccgagcgggcgccggaagtcgacatttacggtcttgagcagttagcgcgctattgggaagatgtgcgcaagttttatcaagaatttgaaagcggcatgaacgcgccgcatacggaagtgtacatgcacgaaatgccaggcggtcaatacagcaacttgcagcagcaggcgaaagcggtcggtctcggcgatcggtgggatgaagtgaaagaaatgtaccgccgcgtcaacgacttgttcggcgatattgtcaaagtgacgccgtcatcgaaagtcgtcggcgatatggcgctttacatggtgcaaaacaacttgacggaacaagacattttcgagcgcggcgaaacgctgaacttccctgattcagtcgtcgagctgtttgaaggatatttaggccagccgcacggcggattcccgaaagagttgcagcgcattattttaaaaggacgcgagccgatcactgtccgtccgggggaactgctcgagccggttgattttgagcaaatgaaaaaagagctgtatgacaagcttggccgcgaagtgaccgactttgatgccattgcgtacgccctttatccgaaagtgtttcttgaatatgcagaaacggtggaaaaatacggcgatgtgtctgtactcgatacaccgacgttcttgtatggcatgcgccttggcgaggaaattgaagtggaaatcgagcgcggaaaaacgttgatcgttaagcttgtgtcgatcggccagccgcaggcggacggtacacgcgtcgtctacttcgagctgaacggtcaaccgcgtgaagttgtcatccgcgatgaaagcattaaaaccgcagtcgttgagcacattaaagcggatcggacgaacccgaaccatattgcggcgacgatgccgggtacggttgttaaagtgcttgtcgaaaaaggggaaaaagtcgacaaaggggaccatttaatggtcacggaagcaatgaaaatggaaacgaccgtgcaagcaccgtttgccggtgttgtcaaagacatttacgtcaaaagcggcgatgcgatccaggcaggcgatttgctcatggagttgtccaaataaaaaaacattgatcttggcacaagccggtttcctaaaaaagaggctgacctcaaaagtcgttaaaccgaccttttggggacagcctctgtttcttttctttactatttggttatttattccttttttgaaacgagaatttctccttatttctgaattttatcctgttttttctttgttggatcggttgtggcc

SEQ ID NO: 96942 - protein, 1147 aa, Bacillus stearothermophilus
MKTRRIRKVLVANRGEIAIRVFRACTELGIRTVAIYSKEDVGSYHRYKADEAYLVGEGKKPIEAYLDIEGIIEIAKAHDVDAIHPGYGFFSENIQFAKRCREEGIIFFGPNENHLDMFGDKVKARHAAVNAGIPVIPGSDGPVDGLEDVVAFAEAHGYPIIIKAALGGGGRGMRFVRSKSEVKEAFERAKSEAKAAFGSDEVYVEKLIENPKHIEVQILGDYEGNIVHLYERDCSVQRRHQKVVEVAPSVSLSDELRQRICEAAVQLMRSVGYVNAGTVEFLVSGDEFYFIEVNPRIQVEHTITEMITGIDIVQSQILIADGCSLHSHEVGIPKQEDIRINGYAIQSRVTTEDPLNNFMPDTGKIMAYRSGGGFGVRLDAGNGFQGAVITPYYDSLLVKLSTWALTFEQAARKMLRNLRTFRIRVFKTNIPFLENVVQHPKFLSGEYDTSFIDTTPELFVFPRRKDRGTKMLTYIGTVTVNGFPGIGKKKKPVFDKPRLPKLSEAEPIPAGTKQILDKHGPEGLVRWIQEQPRVLLTDTTFRDAHQSLLATRVRTVDLVRAAEPSARLLPNLFSLEMWGGATFDVAYRFLKEDPWDRLLKLRDAFPNVLFQMLLRSANAVGYKNYPDNVIREFVEKSAHAGIHVFRIFDSLNWVKGMTVAIDAVRQSGKIAEAAICYTGDILDPSRSKYNLDYYKALAKELEQAGAHILAIKDMAGLLKPQAAHVLISGLKETVDIPIYLHTHDTSGNGIYTYAKAIEAGVDIVDVAISSMAGLTSQPSANTLYYALEGTERAPEVDIYGLEQLARYWEDVRKFYQEFESGMNAPHTEVYMHEMPGGQYSNLQQQAKAVGLGDRWDEVKEMYRRVNDLFGDIVKVTPSSKVVGDMALYMVQNNLTEQDIFERGETLNFPDSVVELFEGYLGQPHGGFPKELQRIILKGREPITVRPGELLEPVDFEQMKKELYDKLGREVTDFDAIAYALYPKVFLEYAETVEKYGDVSVLDTPTFLYGMRLGEEIEVEIERGKTLIVKLVSIGQPQADGTRVVYFELNGQPREVVIRDESIKTAVVEHIKADRTNPNHIAATMPGTVVKVLVEKGEKVDKGDHLMVTEAMKMETTVQAPFAGVVKDIYVKSGDAIQAGDLLMELSK

SEQ ID NO: 96943 - DNA, 3588 bp, Aedes aegypti
  CDS (1)..(3588)
atgtccatgtgcggtgcccaaattgccttaaaagccttcaaaagggctccccgtgtcagaatttggtccatgaccaagaatgcttattctacaaagatagagtacaagccgattcgatccgtgctggttgcgaatcgtggcgaaattgccatccgtgtcttccgagcatgtaacgaactgggcattcggtcggtagcggtatactcggagcaggataaaatgcacatgcaccgtcagaaagcggatgaatcgtacatggtgggcaagggtctcgcaccggtcgaggcttacctaagcattccagagattataagagtttgtaaggagaacgacgtcgacgcggtgcatcccggctacggtttcctatccgagcgatccgactttgcccaagccgtcatcgatgccggtctccgattcatcggtccgtctccgaaggtcgtgcagcagatgggagataaggtggccgctcgcaaggcagccatcgaagccggtgttcccatcgtacccggaactgatggtcccgtaacgaccaaggaagaggctctcgacttctgcaagaaacacggactaccagtgatcttcaaggctgcttacggcggtggtggtcgaggcatgagagtggtacggaaaatggaagaggttgaagataacttccagcgagccagttcggaagctaaagcagccttcggtaacggtgccatgttcatcgaaaagttcatcgaacgaccacgacatattgaggtacagctcctcggagacaaggctggcaatgttgtccatttgtacgaacgtgactgttcggtgcaaagacgtcatcagaaagtcgttgaaattgcccctgctccacggctacctcgagaagtacgtgacaaaatgaccgaatatgccgtcaagctggccaagcatgttggctacgaaaacgccggaacagtagagttcctctgtgatgaatcgggcaatttctacttcatcgaagtgaacgctcgcctccaggtagagcacaccgttacagaagaaattaccggtattgatctcgtacaatcacaaatccgagtagctgaaggcatgacgttgccagagcttggatacaatcaagaaaacatcaaaactcagggctatgccatccagtgccgtgttacgactgaagaccctgccaatgacttccaaccgagtacgggtcgtctggaagtattcagatctggtgaaggtatgggcatccgtctggacagtgcctctgcttacgctggtgccattatctcaccatattacgattcactcctggtcaaagtaatttcacacgcttccgatttgcaatcatccgctgccaaaatgaaccgagcattgcgtgagttccgtattcgcggtgtcaaaacgaacatcccgttcctgctgaacgtgttggaaaaccagaaattcctgaacggtgttctggatacgtacttcattgacgagcatccccagctgttccgctttgccaaatccaagaaccgtgcccagaaactgctgaactaccttggagaagtgctggtcaacggacctaccactcccctggcgacaaagctgaagcctgctgaagttcagccacatgttccacagttgccgttggatttgtcaccagaagcactggcagcagaggaaaagggcaaaaaagtaactgaaccaccaagaggattcaaggatatcttgcgagaacaaggaccggaaggatttgccaaggcagttcgagctcagaaaaatcttctgctgatggataccacttttcgcgatgcccatcagtcgcttttggctacccgtgtccgaacgcatgacttgctgaagatttctccatatgtatcgcacaagttcaacaacctctactcgctggagaattggggcggtgctaccttcgacgttgccctacgtttcttgcatgagtgtccgtgggagcgtctggaagatatgcgcaagcaaattccaaacattccattccaaatgttactccgaggtgccaatgctgttggttataccaactatccagacaacgtcgtccacaagttctgcgagctctcggttcaatgcggcatggacattttccgagtgttcgattctttgaactacctgcccaacctgattctgggaatggaagcagctggtaatgccggaggtgttgttgaagccgcaatctcttacacgggagacgtcagtgatccaaccaagaagaagtatgacctcaaatactacaccaatcttgccgacgaattggtcaaagctggcacacacattctttgcatcaaagatatggctggattacttaaacctcaagctgccaagctgctcatcgctgccatccgtgaaaagcacccagacgttccaattcacattcatactcacgacacatctggagcaggtgttgcatctatgctggcttgcgctgaagccggagctgatgttgtggacgttgctgtggattcgatgtccggaatgacatctcaacccagtatgggcgctgttgttgcctcactgcagggaactccactggataccggcctgaatctgcgtgacatcagtgaatattctgcttattgggagcagaccagaaccttgtacgctccatttgagtgtacgacaaccatgaagtcaggaaacgccgatgtgtacctcaatgaaatccccggaggccagtacaccaatcttcagttccaagcctactctctgggattgggcgacttcttcgaggatgtcaagaaggcctatcgcgaagctaacctgctactgggtgacattattaaggttactccgtcttccaaggttgttggtgatttggctcagttcatggtacaaaaccatcttacggctgaccaggttatggaacgggccgaagaactctccttccccaagtccgtgatcgaattcctgcaaggcgctattggaactcctcatggtggatttcctgaaccattccgttcccgagtacttaaggatatgcctcgtattgagggacgccctggtgcttcgttgaatccattggatttcgacaaacttaaaaaagacctccaagaatctcaccccgatgtctcagaccgcgatgtcatgtctgctgctctgtaccctcaagtaactaacgattacctcaacttcagagactccttcggaccagtagataagctggatacccgcgtattcctgactgggcctaaggtgggcgaagagtttgaagtcactattgaaaagggcaagacgcttggcttcaaaactcttgctatggcagaagatttaacatcgaacggcgaacgagaagtcttctttgaactaaatggtcaactgcggtcggtcatggttcgcgataaggaagccgtcaaggaactccatattcatccaaaggccaccaagggaaacaaggatcaagttggtgccccgatgcctggttccgtcatcgaaatcaaagtaaaagtaggagatcgcgtcgagaagggtcagccgttggtggtgctatcggcgatgaagatggaaatggttgttcaatcaccacgggctggtgtcgtgaaatcgctcgatatctcctccggcatgaaactggaaggcgaagacttgatcctcacattggaatag

SEQ ID NO: 96944 - protein, 1195 aa, Aedes aegypti
MSMCGAQIALKAFKRAPRVRIWSMTKNAYSTKIEYKPIRSVLVANRGEIAIRVFRACNELGIRSVAVYSEQDKMHMHRQKADESYMVGKGLAPVEAYLSIPEIIRVCKENDVDAVHPGYGFLSERSDFAQAVIDAGLRFIGPSPKVVQQMGDKVAARKAAIEAGVPIVPGTDGPVTTKEEALDFCKKHGLPVIFKAAYGGGGRGMRVVRKMEEVEDNFQRASSEAKAAFGNGAMFIEKFIERPRHIEVQLLGDKAGNVVHLYERDCSVQRRHQKVVEIAPAPRLPREVRDKMTEYAVKLAKHVGYENAGTVEFLCDESGNFYFIEVNARLQVEHTVTEEITGIDLVQSQIRVAEGMTLPELGYNQENIKTQGYAIQCRVTTEDPANDFQPSTGRLEVFRSGEGMGIRLDSASAYAGAIISPYYDSLLVKVISHASDLQSSAAKMNRALREFRIRGVKTNIPFLLNVLENQKFLNGVLDTYFIDEHPQLFRFAKSKNRAQKLLNYLGEVLVNGPTTPLATKLKPAEVQPHVPQLPLDLSPEALAAEEKGKKVTEPPRGFKDILREQGPEGFAKAVRAQKNLLLMDTTFRDAHQSLLATRVRTHDLLKISPYVSHKFNNLYSLENWGGATFDVALRFLHECPWERLEDMRKQIPNIPFQMLLRGANAVGYTNYPDNVVHKFCELSVQCGMDIFRVFDSLNYLPNLILGMEAAGNAGGVVEAAISYTGDVSDPTKKKYDLKYYTNLADELVKAGTHILCIKDMAGLLKPQAAKLLIAAIREKHPDVPIHIHTHDTSGAGVASMLACAEAGADVVDVAVDSMSGMTSQPSMGAVVASLQGTPLDTGLNLRDISEYSAYWEQTRTLYAPFECTTTMKSGNADVYLNEIPGGQYTNLQFQAYSLGLGDFFEDVKKAYREANLLLGDIIKVTPSSKVVGDLAQFMVQNHLTADQVMERAEELSFPKSVIEFLQGAIGTPHGGFPEPFRSRVLKDMPRIEGRPGASLNPLDFDKLKKDLQESHPDVSDRDVMSAALYPQVTNDYLNFRDSFGPVDKLDTRVFLTGPKVGEEFEVTIEKGKTLGFKTLAMAEDLTSNGEREVFFELNGQLRSVMVRDKEAVKELHIHPKATKGNKDQVGAPMPGSVIEIKVKVGDRVEKGQPLVVLSAMKMEMVVQSPRAGVVKSLDISSGMKLEGEDLILTLE

SEQ ID NO: 96945 - DNA, 3965 bp, Bacillus methanolicus
  CDS (423)..(3866): transl_table=11
tgggagtgtggggagttagctttgtaatattatctttaggatatatagttttgagaggtatttatattggccttaaatgcagggacccttttggcagcttgcttgctatcggaatctcgagcatgataggcatccagtcctttattaatcttggcgggatatcaggtttgatacctcttacgggtgttcctctgccatttattagctacggaggatcatcattattgcaattgtcgattgcgatggggatattagtaaatgtctctatgtttgtgaattatgaagaaaaatataaaaagaataatgaaaaaaagatagttgcctaaagatatggcattgatatttgctttcaatcaattccacaggctttcgtgccttaaatggttttgaatatataaatacataaaagaagaggtgttctaatgaaaagacgcattaacaaggttttagtagcaaacagaggtgaaatcgccatccgggtgtttagagcctgtacggagcttaacattcgaacagtagctatctattcgaaagaagactccggttcatatcataggtacaaagctgatgaagcgtatctggtaggagaaggaaaaaaaccgatcgatgcctaccttgatatagaaggtattattgaaattgccaaatctagcggagccgatgctattcaccctggatatggatttctttccgagaatatcgagtttgctaaacgatgtgctgaagaaggaattatttttatcggtcctgaggcaaaacatcttgatatgtttggagacaaagtgaaagcaaggacacaggcacagctagctgaaattcctgtcatccctggcagcgacggaccggtaaaagggcttgaagaagtgattcaatttggaaaaacatatggttttccaatcatcataaaagctgctcttggaggcggcggccgcggaatgagaattgtaaggagcctagaagaagttagagaggcttatgaacgtgcgaaatctgaggcaaaggcagcttttggcagtgaccaagtttatgtagagaaatttattgaaaaaccgaagcatattgaagttcaaatcatcggtgatgaacatggcaacatcgttcatttgtatgaacgcgattgctcggttcagcgccgccatcaaaaagttgtcgaagtagcgccatgtgtttcgatttcaagtgagcttcgagaaagaatatgtgaagctgccgtcagattaatgaaaaatgtaaattatgtcaatgcaggaacagtagaattcctattgtcaggtgatgaattttactttattgaagtgaatccgcggatccaagtagaacatacaattacggaaatggtgacaggagtcgatattgttcaaacacaaattcttgttgcagaaggacacgagttgcatggggaaaaaattgggatccctaagcaaaaagatatacacattaatggctatgcaattcaagctcgtgtaacgacagaagatccgcttaataattttatgcctgataccggaaaaattatggcttatcgttcaggcggcggttttggtgtccgtcttgatgctggaaacgggtttcagggagcggttattactccatattatgactcattgcttgtaaaactatcgactcatgcaatgacatttgaaaaagctgcggccaaaatggtccgaaacttgagagaatttagaattcgcggaataaagacaaatattccttttctcgaaaatgttgtgaaacatgaaaaattccgcactggacaatatgatacatcgtttatcgatacaacaccggaactattcttgttccctaagagtaaagaccgtggtacaaaaatgttgacctatattggtaatgtgacagttaacgggttcccgggaattgaaaaaaggaaaaaaccggtatttgataaacctagaattccaaagttgaaatatgatacagaattcaaaaatggaacaaaacaaattttagatgaacttggggcggacggtttagtcaaatgggtgaaagaacaaaaagaggttcttctaactgatacaacatttcgagatgcacatcaatctttattagcaacaagaatacgaacaacagatataagccatatcgcagaaccgactgcaaaactgctgccggaactcttctcgttcgaaatgtggggaggagcaacttttgacgtcgcctatcggttcttaaaagaggatccgtgggaaaggctgttaaaattaagaaagcaaattccgaatgttcttttgcagatgttattaagggcttcaaatgctgttggttataaaaactatcccgataatgtgattagggaatttgttgagaaatctgcacaagccggaattgatgtatttcgaatctttgatagcttaaactgggttaaaggaatggaagttgccattgatgcagtgagacagaccggaaaaatcgctgaagcagcaatttgctacacaggagatatttcagacccaacaagaacaaagtatgatttaaattattacaaagaattggcagttgaactcgaaaaacaaggcgcacatattttaggaattaaagatatggcaggacttttaaaaccgcaggctgcctaccgcttaatatcggaattaaaagaaacagtaagcattccgattcaccttcatacccatgatacgagcggtaacggtatttatatgtatgcgaaagcaattgaagcaggggttgatattgtagatgttgcccttagttcaatggctggtttaacatctcagcctagtgcaaatactctttactacgcgttagaaggcaccgaaagaaaaccaaatgtgaatattgaagcattggaacagctttctcattattgggaagatgttcggaaatattaccatgactttgaaagcggaatgatgtctccgcatacggaagtttaccagcatgaaatgccgggaggacaatacagcaaccttcaacagcaggcaaaagcagtcggtctcggggacaagtgggaccaagtgaaagaaatgtatgcacgtgtaaaccaaatgttcggagatattgttaaagtaactccttcttcgaaagtagttggagatatggcgttatttatggtacaaaacgagcttacagaggaagatattttaaacagaggagaatctcttgattttcctgactcagtggtagaatttttcgaggggtatttaggacaaccacacggtggattcccgaaagacctccagaaagtcattctcaaagggaaagaaccgatcactgtccgccctggagaattgcttgaagatgttgattttgaagcactaaaagaagaattatataaggaaattggaagaccggtcacaagttttgatgtgattgcttatgccttatatccgaaagtctttttggaatatattcagactgttgaaaaatttggtgatgtatctgtactcgatacaccaacattcttatatggaatgaggctaggtgaagaaattgaagttgaaattgaaacgggtaaaactctgattgttaagctggtttcaattggacaagcacaggcagatggcacaagggttgtctattttgaattaaacgggcagccaagggaagttattattaaagatgaaagcattaagtcagcaattgcttcaagggtaaaagcagatccgaaaaatgaatcacatatcggtgctacgatgcctggaacggttatcaaagttgtagtcaaaaaaggagagaaggtcgaaagaggagaccatctcgtcataacagaagcgatgaaaatggagacgactgttcaagcaccattttccgggattgtaaaggatatattcgtcaacaatggggatgcaattcaaaccggagatttattaattgaactggcaaaatcataaatttacttgagtataaataaaaaagaaggacaaaagaaaaagacctgtttcccgattatatcgggagcaggtcttatttaatttcgaccgaaaacgggg

SEQ ID NO: 96946 - protein, 1147 aa, Bacillus methanolicus
MKRRINKVLVANRGEIAIRVFRACTELNIRTVAIYSKEDSGSYHRYKADEAYLVGEGKKPIDAYLDIEGIIEIAKSSGADAIHPGYGFLSENIEFAKRCAEEGIIFIGPEAKHLDMFGDKVKARTQAQLAEIPVIPGSDGPVKGLEEVIQFGKTYGFPIIIKAALGGGGRGMRIVRSLEEVREAYERAKSEAKAAFGSDQVYVEKFIEKPKHIEVQIIGDEHGNIVHLYERDCSVQRRHQKVVEVAPCVSISSELRERICEAAVRLMKNVNYVNAGTVEFLLSGDEFYFIEVNPRIQVEHTITEMVTGVDIVQTQILVAEGHELHGEKIGIPKQKDIHINGYAIQARVTTEDPLNNFMPDTGKIMAYRSGGGFGVRLDAGNGFQGAVITPYYDSLLVKLSTHAMTFEKAAAKMVRNLREFRIRGIKTNIPFLENVVKHEKFRTGQYDTSFIDTTPELFLFPKSKDRGTKMLTYIGNVTVNGFPGIEKRKKPVFDKPRIPKLKYDTEFKNGTKQILDELGADGLVKWVKEQKEVLLTDTTFRDAHQSLLATRIRTTDISHIAEPTAKLLPELFSFEMWGGATFDVAYRFLKEDPWERLLKLRKQIPNVLLQMLLRASNAVGYKNYPDNVIREFVEKSAQAGIDVFRIFDSLNWVKGMEVAIDAVRQTGKIAEAAICYTGDISDPTRTKYDLNYYKELAVELEKQGAHILGIKDMAGLLKPQAAYRLISELKETVSIPIHLHTHDTSGNGIYMYAKAIEAGVDIVDVALSSMAGLTSQPSANTLYYALEGTERKPNVNIEALEQLSHYWEDVRKYYHDFESGMMSPHTEVYQHEMPGGQYSNLQQQAKAVGLGDKWDQVKEMYARVNQMFGDIVKVTPSSKVVGDMALFMVQNELTEEDILNRGESLDFPDSVVEFFEGYLGQPHGGFPKDLQKVILKGKEPITVRPGELLEDVDFEALKEELYKEIGRPVTSFDVIAYALYPKVFLEYIQTVEKFGDVSVLDTPTFLYGMRLGEEIEVEIETGKTLIVKLVSIGQAQADGTRVVYFELNGQPREVIIKDESIKSAIASRVKADPKNESHIGATMPGTVIKVVVKKGEKVERGDHLVITEAMKMETTVQAPFSGIVKDIFVNNGDAIQTGDLLIELAKS

SEQ ID NO: 96947 - DNA, 4734 bp, Bacillus methanolicus
  CDS (779)..(4222): transl_table=11
tcagcctgattttggtacagctcttatcatttttttaattgcggcggccattattttatcttcaggtatgaattggaagaatatttcaaaattaattatgattggaatattggtagcatctccagttgtgttagtcatgaaagatgatctttttacaaaagaacagcgggaaagatttgaagccgtgaaaaatccatttaaagatgaacagaacacaggctttcaactaactaactctttactcgcaatcggttcaggaggaataaacggccttggattaggaaaaagcattcaaaagcttggttatttgccggaatcccacacagattttattatggctgtcattgcagaagagctgggagtgtggggagttagctttgtaatattatctttaggatatatagttttgagaggtatttatattgcccttaaatgcagggacccttttggcagcttgcttgctatcggaatctcgagcatgataggcatccagtcctttattaatcttggcgggatatcaggtttgatacctcttacgggtgttcctctgccatttattagctacggaggatcatcattattgcaattgtcgattgcgatggggatattagtaaatgtctctatgtttgtgaattatgaagaaaaatataaaaagaataatgaaaaaaagatagttgcctaaagatatggcattgatatttgctttcaatcaattccacaggctttcgtgccttaaatggttttgaatatataaatacataaaagaagaggtgttctaatgaaaagaagcattaacaaggttttagtagcaaacagaggtgaaatcgccatccgggtgtttagagcctgtacggagcttaacattcgaacagtagctatctattcgaaagaagactccggttcatatcataggtacaaagctgatgaagcgtatctggtaggagaaggaaaaaaaccgatcgatgcctaccttgatatagaaggtattattgaaattgccaaatctagcggagccgatgctattcaccctggatatggatttctttccgagaatatcgagtttgctaaacgatgtgctgaagaaggaattatttttatcggtcctgaggcaaaacatcttgatatgtttggagacaaagtgaaagcaaggacacaggcacagctagctgaaattcctgtcatccctggcagcgacggaccggtaaaagggcttgaagaagtgattcaatttggaaaaacatatggttttccaatcatcataaaagctgctcttggaggcggcggccgcggaatgagaattgtaaggagcctagaagaagttagagaggcttatgaacgtgcgaaatctgaggcaaaggcagcttttggcagtgaccaagtttatgtagagaaatttattgaaaaaccgaagcatattgaagttcaaatcattggtgatgaacatggcaacatcgttcatttgtatgaacgcgattgctcggttcagcgccgccatcaaaaagttgtcgaagtagcgccatgtgtttcgatttcaagtgagcttcgagaaagaatatgtgaagctgccgtcagattaatgaaaaatgtaaattatgtaaatgcaggaacagtagaattcctattgtcaggtgatgaattttactttattgaagtgaatccgcggatccaagtagaacatacaattacggaaatggtgacaggagtcgatattgttcaaacacaaattcttgttgcagaaggacacgagttgcatggggaaaaaattgggatccctaagcaaaaagatatacacattaatggctatgcaattcaagctcgtgtaacgacagaagatccgcttaataattttatgcctgataccggaaaaattatggcttatcgttcaggcggcggttttggtgtccgtcttgatgctggaaacgggtttcagggagcggttattactccatattatgactcattgcttgtaaaactatcgactcatgcaatgacatttgaaaaagctgcggccaaaatggtccgaaacttgagagaatttagaattcgcggaataaagacaaatattccttttctcgaaaatgttgtgaaacatgaaaaattccgcactggacaatatgatacatcgtttatcgatacaacaccggaacttttcttgttccctaagagtaaagaccgtggtacaaaaatgttgacctatattggtaatgtgacagttaacgggttcccgggaattgaaaaaaggaaaaaaccggtatttgataaacctagaattccaaagttgaaatatgatacagaattcaaaaatggaacaaaacaaattttagatgagcttggggcggacggtttagtcaaatgggtgaaagaacaaaaagaggttcttctaactgatacaacatttcgagatgcacatcaatctttattagcaacaagaatacgaacaacagatataagccatatcgcagaaccgactgcaaaactgctgccggaactcttttcgttcgaaatgtggggaggagcaacttttgacgtcgcctatcggttcttaaaagaggatccgtgggaaaggctgttaaaattaagaaagcaaattccgaatgttcttttgcagatgttattaagggcttcaaatgctgttggttataaaaactatcccgataatgtgattagggaatttgttgagaaatctgcacaagccggaattgatgtatttcgaatctttgatagcttaaactgggttaaaggaatggaagttgccattgatgcagtgagacagaccggaaaaatcgctgaagcagcaatttgctacacaggagatatttcagacccaacaagaacaaagtatgatttaaattattacaaagaattggcagttgaactcgaaaaacaaggcgcacatattttaggaattaaagatatggcaggacttttaaaaccgcaggctgcctaccgcttaatatcggaattaaaagaaacagtaagcattccgattcaccttcatacccatgatacgagcggtaacggtatttatatgtatgcgaaagcaattgaagcaggggttgatattgtagatgttgcccttagttcaatggctggtttaacatctcagcctagtgcaaatactctttactacgcgttagaaggcaccgaaagaaaaccaaatgtgaatattgaagcattggaacagctttctcattattgggaagatgttcggaaatattaccatgactttgaaagcggaatgatgtctccgcatacggaagtttaccagcatgaaatgccgggaggacaatacagcaaccttcaacagcaggcaaaagcagtcggtctcggggacaagtgggaccaagtgaaagaaatgtatgcacgtgtaaaccaaatgttcggagatattgttaaagtaactccttcctcgaaagtagttggagatatggcgttatttatggtacaaaacgagcttacagaggaagatattttaaacagaggagaatctcttgattttcctgactcagtggtagaatttttcgaagggtatttaggacaaccacacggtggattcccgaaagacctccagaaagtcattctcaaagggaaagaaccgatcactgtccgccctggagaattgcttgaagatgttgattttgaagcactaaaagaagaattatataaggaaattggaagaccggtcacaagttttgatgtgattgcttatgccttatatccgaaagtctttttggaatatattcagactgttgaaaaatttggtgatgtatctgtactcgatacaccaacattcttatatggaatgaggctaggtgaagaaattgaagttgaaattgaaacgggtaaaactctgattgttaagctggtttcaattggacaagcacaggcagatggcacaagggttgtctattttgaattaaacgggcagccaagggaagttattattaaagatgaaagcattaagtcagcaattgcttcaagggtaaaagcagatccgaaaaatgaatcacatatcggtgctacgatgcctggaacggttatcaaagttgtagtcaaaaaaggagagaaggtcgaaagaggagaccatctcgtcataacagaagcgatgaaaatggagacgactgttcaagcaccattttccgggattgtaaaggatatattcgtcaacaatggggatgcaattcaaaccggagatttattaattgaactggcaaaatcataaatttacttgagtataaataaaaaagaaggacaaaagaaaaagacctgtttcccgattatatcgggagcaggtcttatttaatttcgaccgaaaacggggagacagaaaccggattcgcctgtttttctgtctgcatttttttcaattccatctcgttctttttgcttcttgaagttaacagaataaaataacttaatacaccaaataagcatgaaataaagaaagcgtgtgccagtgcaatataaagatttaaccttgttaagacaataagtgctccacatgtaacttggagagatacaaggataaaagagataatccagccccaatagacaaccatttggtgtttataatttttaacagctaataaagtgacatagccaatccataaaaaaataaatcctgcagctgctctgtgtcccatttggacccattcataaaaatttgcaggcaatgatagggacgtattcaagcaaaatggccaatctctgcaaaccagactggcgttcacatgt

SEQ ID NO: 96948 - protein, 1147 aa, Bacillus methanolicus
MKRSINKVLVANRGEIAIRVFRACTELNIRTVAIYSKEDSGSYHRYKADEAYLVGEGKKPIDAYLDIEGIIEIAKSSGADAIHPGYGFLSENIEFAKRCAEEGIIFIGPEAKHLDMFGDKVKARTQAQLAEIPVIPGSDGPVKGLEEVIQFGKTYGFPIIIKAALGGGGRGMRIVRSLEEVREAYERAKSEAKAAFGSDQVYVEKFIEKPKHIEVQIIGDEHGNIVHLYERDCSVQRRHQKVVEVAPCVSISSELRERICEAAVRLMKNVNYVNAGTVEFLLSGDEFYFIEVNPRIQVEHTITEMVTGVDIVQTQILVAEGHELHGEKIGIPKQKDIHINGYAIQARVTTEDPLNNFMPDTGKIMAYRSGGGFGVRLDAGNGFQGAVITPYYDSLLVKLSTHAMTFEKAAAKMVRNLREFRIRGIKTNIPFLENVVKHEKFRTGQYDTSFIDTTPELFLFPKSKDRGTKMLTYIGNVTVNGFPGIEKRKKPVFDKPRIPKLKYDTEFKNGTKQILDELGADGLVKWVKEQKEVLLTDTTFRDAHQSLLATRIRTTDISHIAEPTAKLLPELFSFEMWGGATFDVAYRFLKEDPWERLLKLRKQIPNVLLQMLLRASNAVGYKNYPDNVIREFVEKSAQAGIDVFRIFDSLNWVKGMEVAIDAVRQTGKIAEAAICYTGDISDPTRTKYDLNYYKELAVELEKQGAHILGIKDMAGLLKPQAAYRLISELKETVSIPIHLHTHDTSGNGIYMYAKAIEAGVDIVDVALSSMAGLTSQPSANTLYYALEGTERKPNVNIEALEQLSHYWEDVRKYYHDFESGMMSPHTEVYQHEMPGGQYSNLQQQAKAVGLGDKWDQVKEMYARVNQMFGDIVKVTPSSKVVGDMALFMVQNELTEEDILNRGESLDFPDSVVEFFEGYLGQPHGGFPKDLQKVILKGKEPITVRPGELLEDVDFEALKEELYKEIGRPVTSFDVIAYALYPKVFLEYIQTVEKFGDVSVLDTPTFLYGMRLGEEIEVEIETGKTLIVKLVSIGQAQADGTRVVYFELNGQPREVIIKDESIKSAIASRVKADPKNESHIGATMPGTVIKVVVKKGEKVERGDHLVITEAMKMETTVQAPFSGIVKDIFVNNGDAIQTGDLLIELAKS

SEQ ID NO: 96949 - DNA, 3582 bp, Aspergillus oryzae; identical to SEQ ID NO: 9978
  CDS (1)..(3582)

SEQ ID NO: 96950 - protein, 1193 aa, Aspergillus oryzae; identical to SEQ ID NO: 9979

SEQ ID NO: 96951 - DNA, 3444 bp, Methylocapsa acidiphila
  CDS (1)..(3444): transl_table=11
atggcccgaatccgccgtttattggtcgcaaatcgatccgagatcacaatccgcgtttttagggccgcgaccgaattgggtattcgcactgtggcgatttatgcggaagaggacaagctttcgctgcatcgtttcaaagcggatgaagcctatcagatcggattcggcaaggggccgctcgaggcgtatctcgccattgacgacgtcatccatattgcgcgggaagcgaaggtcgacgccatccatccgggctatggttttctttccgaaagtcccgagttcgccgaggcctgcgccgccgcaggaatcgtctttatcggcccgtcgcctcagacaatgcgcgctttgggcaataaggtcgcggcgcgcaatctcgccgtctcctgcggcgtgccggttatgccggcgacgcccccgcttccagatgatcccgcctctgtaaagcgcctcgcgcgggaaatcggctatccagtcatgctgaaggcgtcctggggcggcggcggtcgaggaatgcggccgatcgagagcgaggacaagcttcttgaggctgtgaccagcgcgaaacgcgaggcgaaaagcgcttttggcaaggacgaggtctacctcgaaaagctggttcgtcgtgcgcgccatgtcgaggttcaaattctcggcgacgcccatggcgagctcgtccatcttttcgagcgcgattgttccattcaacggcgcaaccagaaggtcgtcgagcgcgcgccggcgccctatctcgatgaggcgacgcgcggcgctctctgcgaggcggcgctcaagatcggccgggcgacaggctatgtcggggcgggcactgtcgaattcttgctcgacgccgaatccggcggcttttatttcattgaggtcaaccctcgcattcaggtcgagcatacggtcacggaggtcgtcaccgggctcgatatcgtgaaggcgcagatccggatcgcagaaggcaagcgcatcggacggatcgaggaaaccggcatacctaggcaagaagagattcggctttccggccacgccttgcaatgtcggatcacgaccgaaaatccggagaataatttcatcccggattacggccgcatcaccgcttatcgaggcgcgatgggcttcggcatccgcgtcgacggagggacggcctattcgggtgcgatcgtcacccgctattatgatccgttgctcgaaaaagtgacggcttgggccgccacgccggaggaggcgatccgccggatggatcgcgctctgctcgaatatcgcatccgcggcgtcgcgaccaatctggcctttttacacaacatcatcaatcatccgcgcttcatcgccaatgattatacaacccgcttcatcgacgagacgccgtcgctgttcgatttcaagaagcgcaaggatcgcgcgaccaagctgctgacatggatcgccgacgtcacggtcaatggccatccagagacccgcggaagggcgcgcccgccggcgacggcgcgaatcccggttccgccgcgcttcgccgccgcggcggcgccctcgggcgcgcgccagcgcttcgaggcgctcggcgcgaaaaaattcgcggaatggatgcgcgccgaggaacgcgtcctcgtcaccgatacgacaatgcgcgatgcgcatcagtccctgatcgcgacccgcatgcgcacgaaggatatagccgcggcggccgaggcctatgcgaagggcctgccgcagcttctgtcgctcgaatgctggggcggcgcgactttcgacgtcgccatgcgcttcctctcggaagatccgtgggagcggctcgcccttgtgcgcgagcgcgcgcctaatctcctgacgcaaatgctgttgcgcggcgcgaatggcgtcggctacacgaattatcccgataatgtcgtcacctatttcgtccgacgcgcggccgctggaatcgatcttttccgtattttcgactgcctcaattgggtcgagaacatgcgcgtcgccatcgacgccgtatgtgagactgggaaactcgccgaaggcgcgatctgctacaccggagacattctcgaccctacgcgggcgaaattctcactagattattatgtcggcgtcgcgaaggagctcgagcgcgccggttgccatattctcgcgatcaaggacatggctggcctgttgatgcccgccgccgcccgcgttctcgtcaaggccttgcgcgaatccgtcggcttgcccctgcatctgcacacgcatgacacgtcgggaatttcggcggcgactgtgctcgccgccattgacgccggcgtcgacgccgtcgatgcggcgatcgattccatgtccgggatgacctcgcagccctgcctcggctcaatcgccgccgccgtgcgcaacagcccccgcgatacgggactggacccggaagccatccgccagctcagtttctattgggaggcggcgcgggcgcaatatgcggcgttcgagagcgatctcaaggccgggacgtcggaggtttatctccatgagatgccgggcgggcagttcaccaatctgcgcgagcaggcgcgcggccttggcctcgagacgcgatggcacgaggtggcgaaggcctatcgcgctgccaatgatctgttcggggacatcgtcaaagtgacgccgtcctccaaggtcgtcggcgatatggctttgatgatggtggcgcaaaatttgacgccggaagacgtgctcgatcccagacgcgagatcgcttttccgacctccgtcgttgaaatgttgaagggcgatctcggtcagccgccaggaggttggcccaaggcgctgcaggccaaggccctgaagggcgagaaggcgatcgatgcgcggcccggctcgttgttgccgacgacggatcttgcagcggcgcgcgcggaggcggagaaatccagcggccgccagatcagcgacgacgaattcgcctcctggctgatgtatccgaaagtgttcacggaattttcggccaccttgcgccgctacggccctgtctccgtcttgccgacgcctgtgtttttctatgggatgcagccgggagacgaaatctcgatcgagatcgagcctggaaagacgcttgtcctgcttctgcaaaccatcggcgatacggacgaggacggacaggtcaaagtcttctttgagctcaatggtcaaccgcggcttatccgtacgcaaaatcgcggcgcggcggtgaagcttgttacgcggagaaaggccgaggagggcaatgaatctcatgtcggggccccgatgccgggcgcggtgtcgacgatcgccgtgcgccagggccaggaggtgaaggccggcgacattgtcgcgacgctcgaggcgatgaaaatggagaccgcgctacatgcgccgcgcgacggcaagatttccgaaattctcgtcgcgccgggccagcaaatcgacgccagggatcttctgatgctgctcgaatag

SEQ ID NO: 96952 - protein, 1147 aa, Methylocapsa acidiphila
MARIRRLLVANRSEITIRVFRAATELGIRTVAIYAEEDKLSLHRFKADEAYQIGFGKGPLEAYLAIDDVIHIAREAKVDAIHPGYGFLSESPEFAEACAAAGIVFIGPSPQTMRALGNKVAARNLAVSCGVPVMPATPPLPDDPASVKRLAREIGYPVMLKASWGGGGRGMRPIESEDKLLEAVTSAKREAKSAFGKDEVYLEKLVRRARHVEVQILGDAHGELVHLFERDCSIQRRNQKVVERAPAPYLDEATRGALCEAALKIGRATGYVGAGTVEFLLDAESGGFYFIEVNPRIQVEHTVTEVVTGLDIVKAQIRIAEGKRIGRIEETGIPRQEEIRLSGHALQCRITTENPENNFIPDYGRITAYRGAMGFGIRVDGGTAYSGAIVTRYYDPLLEKVTAWAATPEEAIRRMDRALLEYRIRGVATNLAFLHNIINHPRFIANDYTTRFIDETPSLFDFKKRKDRATKLLTWIADVTVNGHPETRGRARPPATARIPVPPRFAAAAAPSGARQRFEALGAKKFAEWMRAEERVLVTDTTMRDAHQSLIATRMRTKDIAAAAEAYAKGLPQLLSLECWGGATFDVAMRFLSEDPWERLALVRERAPNLLTQMLLRGANGVGYTNYPDNVVTYFVRRAAAGIDLFRIFDCLNWVENMRVAIDAVCETGKLAEGAICYTGDILDPTRAKFSLDYYVGVAKELERAGCHILAIKDMAGLLMPAAARVLVKALRESVGLPLHLHTHDTSGISAATVLAAIDAGVDAVDAAIDSMSGMTSQPCLGSIAAAVRNSPRDTGLDPEAIRQLSFYWEAARAQYAAFESDLKAGTSEVYLHEMPGGQFTNLREQARGLGLETRWHEVAKAYRAANDLFGDIVKVTPSSKVVGDMALMMVAQNLTPEDVLDPRREIAFPTSVVEMLKGDLGQPPGGWPKALQAKALKGEKAIDARPGSLLPTTDLAAARAEAEKSSGRQISDDEFASWLMYPKVFTEFSATLRRYGPVSVLPTPVFFYGMQPGDEISIEIEPGKTLVLLLQTIGDTDEDGQVKVFFELNGQPRLIRTQNRGAAVKLVTRRKAEEGNESHVGAPMPGAVSTIAVRQGQEVKAGDIVATLEAMKMETALHAPRDGKISEILVAPGQQIDARDLLMLLE

SEQ ID NO: 96953 - DNA, 3612 bp, Cryptococcus neoformans; identical to SEQ ID NO: 9704
  CDS (1)..(3612)

SEQ ID NO: 96954 - protein, 1203 aa, Cryptococcus neoformans; identical to SEQ ID NO: 9705

SEQ ID NO: 96955 - DNA, 3537 bp, Saccharomyces cerevisiae
  CDS (1)..(3537)
atgtcgcaaagaaaattcgccggcttgagagataacttcaatctcttgggtgaaaagaacaaaatattggtggctaatagaggagaaattccaatcagaatttttcgtaccgctcatgaactgtctatgcagacggtagctatatattctcatgaagatcgtctttcaacgcacaaacaaaaggctgacgaagcatacgtcataggtgaagtaggccaatatacccccgtcggcgcttatttggccattgacgaaatcatttccattgcccaaaaacaccaggtagatttcatccatccaggttatgggttcttgtctgaaaattcggaatttgccgacaaagtagtgaaggccggtatcacttggattggccctccagctgaagttattgactccgtgggtgataaggtctcagctagaaacctggcagcaaaagctaatgtgcccaccgttcctggtacaccaggtcctatagaaactgtagaggaagcacttgacttcgtcaatgaatacggctacccggtgatcattaaggccgcctttggtggtggtggtagaggtatgagagtcgttagagaaggtgacgacgtggcagatgcctttcaacgtgctacctccgaagcccgtactgccttcggtaatggtacctgctttgtggaaagattcttggacaagccaaagcatattgaagttcaattgttggccgataaccacggaaacgtggttcatcttttcgaaagagactgttccgtgcagagaagacaccaaaaggttgtcgaagtggccccagcaaagactttaccccgtgaagtccgtgacgccattttgacagatgcagttaaattggccaaagagtgtggctacagaaatgcgggtactgctgaattcttggttgataaccaaaatagacactatttcattgaaattaatccaagaatccaagtggaacataccatcacagaagaaattaccggtatagatattgtggcggctcagatccaaattgcggcaggtgcctctctaccccagctgggcctattccaggacaaaattacgactcgtggctttgccattcagtgccgtattaccacggaagaccctgctaagaacttccaaccagataccggtagaatagaagtgtaccgttctgcaggtggtaatggtgttagactggatggtggtaacgcctatgcaggaacaataatctcacctcattacgactcaatgctggtcaaatgctcatgctccggttccacctacgaaatcgttcgtagaaaaatgattcgtgcattaatcgagttcagaattagaggtgtcaagaccaacattcccttcctattgactcttttgaccaatccagtatttattgagggtacatactggacgacttttattgacgacaccccacaactgttccaaatggtttcatcacaaaacagagcccaaaaacttttacattacctcgccgacgtggcagtcaatggttcatctatcaagggtcaaattggcttgccaaaattaaaatcaaatccaagtgtcccccatttgcacgatgctcagggcaatgtcatcaacgttacaaagtctgcaccaccatccggatggaggcaagtgctactagaaaaggggccagctgaatttgccagacaagttagacagttcaatggtactttattgatggacaccacctggagagacgctcatcaatctctacttgcaacaagagtcagaacccacgatttggctacaatcgctccaacaaccgcacatgcccttgcaggtcgtttcgccttagaatgttggggtggtgccacattcgatgttgcaatgagatttttgcatgaggatccatgggaacgtttgagaaaattaagatctctggtgcctaatattccattccaaatgttattgcgtggtgccaatggtgtggcttattcttcattgcctgacaatgctattgaccatttcgtcaagcaagccaaggataatggtgttgatatatttagagtctttgatgccttaaatgacttggaacaattgaaggtcggtgtagatgctgtgaagaaggcaggtggtgttgtagaagccactgtttgtttctctggggatatgcttcagccaggcaagaaatacaatttggattactacttggaaattgctgaaaaaattgtccaaatgggcactcatatcctgggtatcaaagatatggcaggtaccatgaagccagcagctgccaaactactgattggatctttgagggctaagtaccctgatctcccaatacatgttcacactcacgattctgcaggtactgctgttgcatcaatgactgcgtgtgctctggcgggcgccgatgtcgttgatgttgccatcaactcaatgtctggtttaacttcacaaccatcaatcaatgctctgttggcttcattagaaggtaatattgacactggtattaacgttgagcatgtccgtgaactagatgcatattgggcagagatgagattgttatactcttgtttcgaggctgacttgaagggcccagatccagaagtttatcaacatgaaatcccaggtggtcaattgacaaacttgttgtttcaagcccaacaattgggtcttggagaacaatgggccgaaacaaaaagagcttacagagaagccaattatttattgggtgatattgtcaaagttaccccaacttcgaaggtcgttggtgatctggcacaatttatggtctccaataaattaacttccgatgatgtgagacgcctggctaattctttggatttccctgactctgttatggatttcttcgaaggcttaatcggccaaccatatggtgggttcccagaaccatttagatcagacgttttaaggaacaagagaagaaagttgacttgtcgtccaggcctggaactagagccatttgatctcgaaaaaattagagaagacttgcagaatagatttggtgatgttgatgagtgcgacgttgcttcttataacatgtacccaagagtttatgaagacttccaaaagatgagagaaacgtatggtgatttatctgtattgccaacaagaagctttttgtctccactagagactgacgaagaaattgaagttgtaatcgaacaaggtaaaacgctaattatcaagctacaggctgtgggtgatttgaacaaaaagaccggtgaaagagaagtttactttgatttgaatggtgaaatgagaaaaattcgtgttgctgacagatcacaaaaagtggaaactgttactaaatccaaagcagacatgcatgatccattacacattggtgcaccaatggcaggtgtcattgttgaagttaaagttcataaaggatcactaataaagaagggccaacctgtagccgtattaagcgccatgaaaatggaaatgattatatcttctccatccgatggacaagttaaagaagtgtttgtctctgatggtgaaaatgtggactcttctgatttattagttctattagaagaccaagttcctgttgaaactaaggcatga

SEQ ID NO: 96956 - protein, 1178 aa, Saccharomyces cerevisiae; identical to SEQ ID NO: 10061

SEQ ID NO: 96957 - DNA, 3916 bp, Aspergillus terreus
  CDS (139)..(3720)
gtcgacccacgcgtccgcatcttctccctccctccctccctccctccttatttattcaattgatcctcccccaatctctaaacctctcactccccaattacctcctccacccccacctctcctctcctacacatcacaatggcggccccctatcgtcagccagaggaggcagtcgatgactccgagttcatcgacgaccatcatgatcacctccgcgacaccgtccaccatcgcctccgggccaactccgccatcatgcagttccagaagatcctcgtcgccaaccgcggcgaaatccccattcggatcttccgtaccgctcacgaactctccctccagacggtcgccatcttctcccatgaggaccgtctctccatgcaccgtcagaaggccgacgaggcctacatgatcggccaccgcggccagtacacccccgtcggcgcctatctggccgccgatgagatcgtcaagatcgccctcgagcatggcgtccacttgatccaccccggctacgggttcttatccgaaaacgccgactttgcccgcaaggtcgagaaggctggcatggtcttcgtcggtcccacccccgacaccattgacagcctcggtgacaaggtctccgcccgtcagctggccatccgctgcaacgtccccgtcgtgcccggcaccgagggccccgtcgagcgctacgaggaggtcaaggccttcaccgacacctatggcttccccatcatcatcaaggccgccttcggtggtggtggtcgcggcatgcgtgtcgtgcgcaaccaggccgatctgcgcgactccttcgagcgtgccacctccgaggcccgctccgcctttggcaacggcaccgtcttcgtcgagcgcttcctcgacaagcccaagcacatcgaggtccagctgctcggtgacaaccacggcaacgtcgtccacctcttcgagcgtgactgctccgtccagcgtcgtcaccagaaggtcgtcgaggtcgcccccgccaaggacctgcccacggatgtgcgcgaccgcatcctgtccgacgccgtgaagctggccaagtcggtcaactaccgcaacgccggtaccgccgagttcctggtggaccagcagaaccgccactactttatcgagatcaacccccgtatccaggtcgagcacaccattacggaagaaatcaccggcatcgatatcgtcgccgcccagatccagatcgccgctggcgccacgctggagcagctcggtctgactcaggaccgcatctctacccgcggcttcgccatccagtgccgtatcaccaccgaggatccctccaagggcttctctcccgacaccggcaagatcgaggtctaccggtccgccggtggtaacggtgtccgtctcgacggtggaaacggcttcgccggtgccatcatcaccccccactacgactccatgctggtcaagtgcacctgccgcgggtccacctatgaaatcgcccgtcgcaaggtcgttcgtgccctggtcgagttccgtatccgcggcgtgaagaccaacatccccttcctgacctccctgctgagtcaccccacctttgtcgatggcaactgctggaccaccttcatcgacgacacccccgaactgttcgctctggtgggctcgcagaaccgcgcccagaagctgctcgcctaccttggtgatgtcgccgtcaacggcagcagcatcaagggtcagatgggtgagcccaagttcaagggcgagatcatcaagcccaagctgctggatgcccagggtaagccgctggacgtctcgcagccctgcaccaagggttggaagcagatcatcgaccaggagggccccgtcgcctttgccaaggccgtccgcgccaacaagggctgcttgatcatggacactacctggcgtgacgcccatcagtcgctgctggccacccgtgtgcgcaccattgacctgttgaacatcgcccacgagaccagccacgccctgtccaacgcctacagtttggaatgctggggtggtgccaccttcgacgtcgccatgcgcttcctctacgaggacccctgggaccgtctgcgcaagatgcgcaaggccgtgcccaacatccccttccagatgctcctccgtggcgccaacggcgtggcttactcctccctccccgacaacgccatctaccacttctgtaagaacgccaagaagtgcggtgtcgacatcttccgtgtcttcgacgccttgaacgacatcgaccagctcgaagtcggcatcaaggccgtccacgccgccgagggtgtggttgaggctaccgtttgctacagcggtgacatgctgaaccccaaaaagaagtacaatctggagtactacctggcgctggtcgacaagatcgtcgccctgaagccccacgtcctcggcatcaaggatatggccggtgtgctcaagccccaggccgcgcgcctgctggtcggctccatccgcgagcgctaccccgacctccccatccacgtccacacccacgactccgccggtactggtgtggcgtcgatgatcgcctgcgcccaggccggcgccgacgccgtggatgccgccaccgacagcatgtccggcatgacctcgcagcccagcatcggtgccatcctcgcctccctcgagggcaccgagcacgaccccggcctcaactcggcccacgtgcgcgccctcgacagctactgggcccagctgcgtctgctgtactcgcccttcgaggccaatctcaccggccccgacccggaggtctacgagcacgagatccccggtggccagctgaccaacctcatcttccaggctagccagctgggtctgggccagcagtgggccgagaccaagaaggcctacgaggtggccaatgacctgctgggtgacatcgtcaaggtcacgcccacctccaaggtggtcggcgatctggcccagttcatcgtctccaacaagctgagcgcgcaggacgtggtcgaccgcgccgccgagctagacttccccggctccgtcctggagttcctcgagggcctgatgggccagccctttggcgggttccctgagccgctgcggtcccgcgcgctgcgcaaccgccgcaagctcgacaagcggcccggtctgtatctggagccgctggatctggccgcgatcaagaatcagatccgcgagcagttcggcagcgccaccgagtacgacgtggccagctacgccatgtaccccaaggtgtttgaggactacaagaagtttgtgcagaagtacggcgacctctcggtgctgccaacgcgctacttcctggccaagcccgagatcggcgaggagttccacgtcgagctggagaagggtaaggtgctgatcctcaagctgctggccatcgggcccttgtccgagcagaccggccagcgcgaggtgttctacgaggtcaacggtgaggtgcgccaggtcagcatcgacgacaagaaggcctcgatcgacaacacggcgcgccccaaggcggatgtgggcgacagcagccaggtcggcgcgcccatgagcggtgtggtggtcgagatccgcgtgcacgacggtctggaggtgaagaagggagatcctctggctgttctgagcgccatgaagatggaaatggtgatctcggctccacacagcggcaaggtgtccggattgctggtcaaggagggcgattctgtggacggccaggatctggtctgcaagatcaccaaggcgtaaggttggtggaggaaaagtacagggtggggccgcatgtttagattagagcatgttttatgaattatgattgggttcggtttagttattgatgaatatttgaatgtttgatttttgaaaaaaaaaaaaaaaaaaaaaaaaaaaaaaaaaaaaaaaaaaaaaaaaaaaaaaaaaaaaaaaaaaaaaaaaaaaaaaaaaa

SEQ ID NO: 96958 - protein, 1193 aa, Aspergillus terreus; identical to SEQ ID NO: 10071

SEQ ID NO: 96959 - DNA, 4190 bp, Pichia angusta; identical to SEQ ID NO: 10074
  CDS (275)..(3802)

SEQ ID NO: 96960 - protein, 1175 aa, Pichia angusta; identical to SEQ ID NO: 10075

SEQ ID NO: 96961 - DNA, 4456 bp, Pichia pastoris
  CDS (700)..(4269)
gaaaattcatcccaatcagggaagaatagcccgtaccgatgtccagtctaattagccatgtatagtccgatttgtagatttcgcacacccccactcgaaaccttcaccccacctaattggttcttttttttttttttttttttcgatttcatcatcggtagtgcatgaaactcataatcttttttgggctaaaacacaccatcatcgtattggcctgcaccgacaatcctccgattacagcttgagccagctttgtgaatggatgaccaattattgactcattccgtagttttgccactcaaaagggagccaattgaaggacactttgccggcccttctctccccaaatcatcaaccgtacctgtatatagctcgctctctctccaaaccccatgtacccctgctgctgagattaagcaacgagaaggaacccccggtctcttctgtccaagcaaaaaaaaaagattatgacatactccccatcctctatctcgccctctcgctcgatcctcccaatatctttcacccgcacacgaccttcgcaaattgggcggtaaaaattccttggtatcgatatataaagatgtgagtgggtccagcaattttgcccaaccaatcttctggcttccataccttcttttttttttttaaccaccccgctaaattaaaagaaaggatatttattcaattccttcagttatggccgaagaagactacctccccgtgtaccagctgagacgtgactcgtcgcttttgggcacaatgaacaagattttggttgccaacagaggcgaaattccaattcgtatcttcagaacggcccatgagctctcaatgaacacagtggccatctactctcacgaggaccgtttgtccatgcacagactgaaggctgatgaagcctatgttatcggtgagcgtggccagtactctccagtccaggcctatcttgcaattgacgagatcatcaagattgcggtgaagcataacgtcaacatgatccacccaggttacggattttgctctgaaaattctgagtttgctagaaaagttgaggagaacggtattttgtgggtcggaccatccgataccgtcatcgacgctgttggagacaaagtttccgccagaaacttggcctacgctgccaacgttccaaccgtccccggtacaccaggtccaattgaagacgtcgctcaagccacagcttttgtcgaagaatacggttacccagttatcattaaggcagcctttggtggtggtggaagaggtatgcgtgtggttcgcgaaggagatgacatagaagatgctttcctgagagcttctagtgaggccaagactgcgttcggtaacggtaccgtcttcattgaacgtttcctggacaaaccaaagcacattgaagtccaactgttggctgataactacggtaatgttattcatttgttcgagagagattgttccgttcaaagaagacaccaaaaagttgctcgaaattgctccgcaaagacactcccagtcgaggtccgtaatgcaatcttgaacgacgctgtcaaattagccaagactgccaattatagaaacgctggtaccgccgagtttttggtggacagccagaacagacactactttatcgagattaaccctcgtattcaagttgagcacaccattaccgaggaaattactggtgtagatatagttgctgcccagattcaaattgctgctggtgcttcgttagagcaactcggcttattgcaagaaaaaattaccacccgtgggtttgccattcaatgtcgtatcaccactgaagaccccactaagaactttcaaccagacacgggaaagatcgaagtttatagatcctctggtggtaacggagtcagacttgacggtggtaacgggtttgctggtgccgtcatctcgccccattatgattcgatgttggtgaagtgttccacttctggctctaactacgagattcgtcgtcgtaagatgatcagagcgttagttgaattcagaattagaggtgttaaaactaacattcctttcttgttggctttattgactcaccctgttttcatgacctccgaatgttggactacatttattgatgatactccagaattgttcaagattttgacttcccagaacagagcccagaagctgctggcttacttaggtgatctggctgttaatggttcctcaatcaagggacaaataggtctgcctaaactacacaaggaggctgatattccttcaatcactgatataaatggagatgttattgatgtctctattcctcctcctgatggatggagacagtttttgttggagaagggtcctgagcaatttgctcagcaagtgcgtgctttccctgggttgatgattatggacactacctggagagatgctcaccagtctttgcttgcaactcgggttagaacccatgacttgctaaatattgcaccagctacgtcttatgccctacatcacgcttttgcactggaatgttggggaggtgccacttttgacgtctccatgcgtttcttgcacgaggacccatggcaaagactgcgcaaactgcgtaaagctgtaccaaatatcccattctccatgttattgagaggtggtaacggtgttgcttactattctcttccagataatgcaattgaccactttcttaagcaggccaaagatactggtgtcgatgtcttccgtgttttcgatgctttaaacgatattgagcaattgaaggtcggagttgacgccgtcaagaaggctgggggtgttgtcgaagctactatgtgttattccggagacatgttgaagccaggtaaaaagtataacttggaatactacatcaatctggcaactgaaattgttgagatgggtacccacatattagctgttaaggatatggctggtacattaaaacctaccgctgccaaacagttgatctctgctttgaggagaaagttcccttcgttgccaatccacgttcatactcacgactctgccggtacaggtgttgcctccatggtggcctgtgctagagctggtgctgatgttgtgactgtgcgtgttaactctatgtctggtatgacttctcaaccctcaatgtctgctttcattgcgtctttagatggagaaattgagactggtattcctgaagctaatgccagagagattgatgcttactgggctgagatgagacttttgtactcatgtttcgaagctgatctaaagggacctgacccagaagtttatcagcatgagattccaggtggtcaactgactaacttactgttccaagctcaacaggttggtctgggagaaaaatgggttgaaactaagaaagcatatgaggctgctaacagattgcttggtgacattgtgaaggtcacaccaacctctaaggtcgttggtgacttggctcaattcatggtatctaataagttgtcatccgaagatgtcgagagactggcatctgagttagatttcccagattctgttcttgacttttttgagggcttgatgggtactccatatggaggtttccctgagccattgagaactaatgtcatctcaggaaaaagacgaaagctaactagcagacctggtttgactttggagccatacaacattcctgccattagagaggatcttgaggctcgtttcagtaaggtcactgagaatgacgttgcctcttacaacatgtatcctaaagtttacgaggcttataagaagcagcaagaattatatggagacttgtctgtgcttccaaccagaaacttcctgtctcctcctaaaattgacgaagagagacatgtgaccattgtgaccattgaaacaaggaaaacactaatcatcaagtgtatggctgaaggtgagctatctcaatcatccggtactagagaagtgtactttgaattgaacggtgagatgagaaaggtcacagttgaggacaagaatggcgctgttgaaactatcaccagacctaaggctgatgctcacaaccctaacgagattggtgctccaatggctggtgtcgttgttgaggttagagtccacgaaaatggtgaagttaagaagggtgatccaattgcagttttatctgcgatgaagatggagatggttatctcctcccctgttgctggtcgtattggacagattgcagtcaaggagaacgattctgttgatgccagcgacctgatcccaaaatcgtcaaggctgagtaaactattgatgtttattattcttattatattatactaaaatatgttattacgattataccctctactgtttccttattgtggaccgtcttccataaactcttctttgaagcatttcctgtctttctcttttcttagcctgtgccagttgttcttgtttcagttcctgatccttttctcttcctaacttttcctgtatttctttttgcttcttcttttgaagatcc

SEQ ID NO: 96962 - protein, 1189 aa, Pichia pastoris; identical to SEQ ID NO: 10077

SEQ ID NO: 96963 - DNA, 3558 bp, Schizosaccharomyces pombe; identical to SEQ ID NO: 10078
  CDS (1)..(3558)

SEQ ID NO: 96964 - protein, 1185 aa, Schizosaccharomyces pombe; identical to SEQ ID NO: 10079

SEQ ID NO: 96965 - DNA, 24 bp, Artificial sequence
  primer
atgagcagtagcaagaaattggcc

SEQ ID NO: 96966 - DNA, 24 bp, Artificial sequence
  primer
ttactttttttgggatgggggtag

SEQ ID NO: 96967 - protein, 1206 aa, Artificial sequence
  consensus sequence
  Variant (2)..(2): Xaa in position 2 is any amino acid
  Variant (14)..(15): Xaa in position 14 to 15 is any amino acid
  Variant (18)..(19): Xaa in position 18 to 19 is any amino acid
  Variant (22)..(24): Xaa in position 22 to 24 is any amino acid
  Variant (28)..(28): Xaa in position 28 is any amino acid
  Variant (30)..(31): Xaa in position 30 to 31 is any amino acid
  Variant (34)..(37): Xaa in position 34 to 37 is any amino acid
  Variant (40)..(40): Xaa in position 40 is any amino acid
  Variant (45)..(45): Xaa in position 45 is any amino acid
  Variant (47)..(48): Xaa in position 47 to 48 is any amino acid
  Variant (50)..(53): Xaa in position 50 to 53 is any amino acid
  Variant (54)..(59): Xaa in position 54 to 59 is any or no amino acid
  Variant (61)..(62): Xaa in position 61 to 62 is any amino acid
  Variant (66)..(69): Xaa in position 66 to 69 is any amino acid
  Variant (71)..(73): Xaa in position 71 to 73 is any amino acid
  Variant (75)..(79): Xaa in position 75 to 79 is any amino acid
  Variant (93)..(94): Xaa in position 93 to 94 is any amino acid
  Variant (97)..(102): Xaa in position 97 to 102 is any amino acid
  Variant (105)..(105): Xaa in position 105 is any amino acid
  Variant (107)..(107): Xaa in position 107 is any amino acid
  Variant (110)..(117): Xaa in position 110 to 117 is any amino acid
  Variant (119)..(119): Xaa in position 119 is any amino acid
  Variant (121)..(122): Xaa in position 121 to 122 is any amino acid
  Variant (124)..(126): Xaa in position 124 to 126 is any amino acid
  Variant (128)..(132): Xaa in position 128 to 132 is any amino acid
  Variant (134)..(156): Xaa in position 134 to 156 is any amino acid
  Variant (157)..(157): Xaa in position 157 is any or no amino acid
  Variant (159)..(161): Xaa in position 159 to 161 is any amino acid
  Variant (164)..(165): Xaa in position 164 to 165 is any amino acid
  Variant (174)..(187): Xaa in position 174 to 187 is any amino acid
  Variant (189)..(190): Xaa in position 189 to 190 is any amino acid
  Variant (193)..(194): Xaa in position 193 to 194 is any amino acid
  Variant (198)..(203): Xaa in position 198 to 203 is any amino acid
  Variant (205)..(211): Xaa in position 205 to 211 is any amino acid
  Variant (213)..(213): Xaa in position 213 is any amino acid
  Variant (217)..(217): Xaa in position 217 is any amino acid
  Variant (219)..(219): Xaa in position 219 is any amino acid
  Variant (221)..(222): Xaa in position 221 to 222 is any amino acid
  Variant (225)..(226): Xaa in position 225 to 226 is any amino acid
  Variant (229)..(229): Xaa in position 229 is any amino acid
  Variant (235)..(235): Xaa in position 235 is any amino acid
  Variant (239)..(239): Xaa in position 239 is any amino acid
  Variant (243)..(243): Xaa in position 243 is any amino acid
  Variant (245)..(245): Xaa in position 245 is any amino acid
  Variant (248)..(250): Xaa in position 248 to 250 is any amino acid
  Variant (252)..(255): Xaa in position 252 to 255 is any amino acid
  Variant (257)..(262): Xaa in position 257 to 262 is any amino acid
  Variant (264)..(271): Xaa in position 264 to 271 is any amino acid
  Variant (272)..(276): Xaa in position 272 to 276 is any or no amino acid
  Variant (278)..(279): Xaa in position 278 to 279 is any amino acid
  Variant (283)..(283): Xaa in position 283 is any amino acid
  Variant (287)..(293): Xaa in position 287 to 293 is any amino acid
  Variant (294)..(298): Xaa in position 294 to 298 is any or no amino acid
  Variant (302)..(302): Xaa in position 302 is any amino acid
  Variant (306)..(306): Xaa in position 306 is any amino acid
  Variant (312)..(312): Xaa in position 312 is any amino acid
  Variant (315)..(316): Xaa in position 315 to 316 is any amino acid
  Variant (318)..(319): Xaa in position 318 to 319 is any amino acid
  Variant (321)..(321): Xaa in position 321 is any amino acid
  Variant (323)..(324): Xaa in position 323 to 324 is any amino acid
  Variant (326)..(328): Xaa in position 326 to 328 is any amino acid
  Variant (330)..(330): Xaa in position 330 is any amino acid
  Variant (332)..(333): Xaa in position 332 to 333 is any amino acid
  Variant (335)..(340): Xaa in position 335 to 340 is any amino acid
  Variant (341)..(356): Xaa in position 341 to 356 is any or no amino acid
  Variant (358)..(363): Xaa in position 358 to 363 is any amino acid
  Variant (364)..(364): Xaa in position 364 is any or no amino acid
  Variant (366)..(366): Xaa in position 366 is any amino acid
  Variant (368)..(368): Xaa in position 368 is any amino acid
  Variant (370)..(370): Xaa in position 370 is any amino acid
  Variant (372)..(372): Xaa in position 372 is any amino acid
  Variant (378)..(380): Xaa in position 378 to 380 is any amino acid
  Variant (382)..(382): Xaa in position 382 is any amino acid
  Variant (385)..(385): Xaa in position 385 is any amino acid
  Variant (387)..(387): Xaa in position 387 is any amino acid
  Variant (389)..(390): Xaa in position 389 to 390 is any amino acid
  Variant (394)..(395): Xaa in position 394 to 395 is any amino acid
  Variant (397)..(397): Xaa in position 397 is any amino acid
  Variant (399)..(399): Xaa in position 399 is any amino acid
  Variant (403)..(403): Xaa in position 403 is any amino acid
  Variant (405)..(407): Xaa in position 405 to 407 is any amino acid
  Variant (408)..(408): Xaa in position 408 is any or no amino acid
  Variant (410)..(411): Xaa in position 410 to 411 is any amino acid
  Variant (413)..(416): Xaa in position 413 to 416 is any amino acid
  Variant (419)..(419): Xaa in position 419 is any amino acid
  Variant (423)..(423): Xaa in position 423 is any amino acid
  Variant (424)..(438): Xaa in position 424 to 438 is any or no amino acid
  Variant (440)..(440): Xaa in position 440 is any amino acid
  Variant (442)..(442): Xaa in position 442 is any amino acid
  Variant (450)..(450): Xaa in position 450 is any amino acid
  Variant (454)..(454): Xaa in position 454 is any amino acid
  Variant (457)..(464): Xaa in position 457 to 464 is any amino acid
  Variant (466)..(471): Xaa in position 466 to 471 is any amino acid
  Variant (473)..(473): Xaa in position 473 is any amino acid
  Variant (476)..(478): Xaa in position 476 to 478 is any amino acid
  Variant (480)..(480): Xaa in position 480 is any amino acid
  Variant (482)..(489): Xaa in position 482 to 489 is any amino acid
  Variant (491)..(492): Xaa in position 491 to 492 is any amino acid
  Variant (494)..(494): Xaa in position 494 is any amino acid
  Variant (496)..(496): Xaa in position 496 is any amino acid
  Variant (498)..(502): Xaa in position 498 to 502 is any amino acid
  Variant (506)..(530): Xaa in position 506 to 530 is any amino acid
  Variant (531)..(551): Xaa in position 531 to 551 is any or no amino acid
  Variant (553)..(556): Xaa in position 553 to 556 is any amino acid
  Variant (558)..(560): Xaa in position 558 to 560 is any amino acid
  Variant (562)..(575): Xaa in position 562 to 575 is any amino acid
  Variant (577)..(578): Xaa in position 577 to 578 is any amino acid
  Variant (582)..(582): Xaa in position 582 is any amino acid
  Variant (594)..(594): Xaa in position 594 is any amino acid
  Variant (596)..(597): Xaa in position 596 to 597 is any amino acid
  Variant (599)..(602): Xaa in position 599 to 602 is any amino acid
  Variant (604)..(614): Xaa in position 604 to 614 is any amino acid
  Variant (616)..(616): Xaa in position 616 is any amino acid
  Variant (618)..(618): Xaa in position 618 is any amino acid
  Variant (628)..(628): Xaa in position 628 is any amino acid
  Variant (632)..(632): Xaa in position 632 is any amino acid
  Variant (634)..(634): Xaa in position 634 is any amino acid
  Variant (637)..(637): Xaa in position 637 is any amino acid
  Variant (640)..(642): Xaa in position 640 to 642 is any amino acid
  Variant (644)..(646): Xaa in position 644 to 646 is any amino acid
  Variant (649)..(651): Xaa in position 649 to 651 is any amino acid
  Variant (657)..(658): Xaa in position 657 to 658 is any amino acid
  Variant (660)..(660): Xaa in position 660 is any amino acid
  Variant (664)..(665): Xaa in position 664 to 665 is any amino acid
  Variant (670)..(673): Xaa in position 670 to 673 is any amino acid
  Variant (675)..(680): Xaa in position 675 to 680 is any amino acid
  Variant (681)..(681): Xaa in position 681 is any or no amino acid
  Variant (683)..(683): Xaa in position 683 is any amino acid
  Variant (685)..(685): Xaa in position 685 is any amino acid
  Variant (688)..(688): Xaa in position 688 is any amino acid
  Variant (691)..(691): Xaa in position 691 is any amino acid
  Variant (694)..(703): Xaa in position 694 to 703 is any amino acid
  Variant (706)..(708): Xaa in position 706 to 708 is any amino acid
  Variant (710)..(712): Xaa in position 710 to 712 is any amino acid
  Variant (713)..(713): Xaa in position 713 is any or no amino acid
  Variant (715)..(717): Xaa in position 715 to 717 is any amino acid
  Variant (723)..(729): Xaa in position 723 to 729 is any amino acid
  Variant (730)..(731): Xaa in position 730 to 731 is any or no amino acid
  Variant (733)..(733): Xaa in position 733 is any amino acid
  Variant (735)..(735): Xaa in position 735 is any amino acid
  Variant (738)..(740): Xaa in position 738 to 740 is any amino acid
  Variant (742)..(747): Xaa in position 742 to 747 is any amino acid
  Variant (749)..(749): Xaa in position 749 is any amino acid
  Variant (751)..(751): Xaa in position 751 is any amino acid
  Variant (753)..(753): Xaa in position 753 is any amino acid
  Variant (760)..(760): Xaa in position 760 is any amino acid
  Variant (762)..(762): Xaa in position 762 is any amino acid
  Variant (764)..(764): Xaa in position 764 is any amino acid
  Variant (767)..(768): Xaa in position 767 to 768 is any amino acid
  Variant (770)..(779): Xaa in position 770 to 779 is any amino acid
  Variant (780)..(780): Xaa in position 780 is any or no amino acid
  Variant (782)..(782): Xaa in position 782 is any amino acid
  Variant (784)..(784): Xaa in position 784 is any amino acid
  Variant (790)..(790): Xaa in position 790 is any amino acid
  Variant (792)..(799): Xaa in position 792 to 799 is any amino acid
  Variant (801)..(802): Xaa in position 801 to 802 is any amino acid
  Variant (805)..(805): Xaa in position 805 is any amino acid
  Variant (807)..(807): Xaa in position 807 is any amino acid
  Variant (810)..(810): Xaa in position 810 is any amino acid
  Variant (812)..(816): Xaa in position 812 to 816 is any amino acid
  Variant (818)..(818): Xaa in position 818 is any amino acid
  Variant (823)..(849): Xaa in position 823 to 849 is any amino acid
  Variant (850)..(850): Xaa in position 850 is any or no amino acid
  Variant (853)..(855): Xaa in position 853 to 855 is any amino acid
  Variant (857)..(858): Xaa in position 857 to 858 is any amino acid
  Variant (860)..(861): Xaa in position 860 to 861 is any amino acid
  Variant (864)..(872): Xaa in position 864 to 872 is any amino acid
  Variant (873)..(875): Xaa in position 873 to 875 is any or no amino acid
  Variant (878)..(878): Xaa in position 878 is any amino acid
  Variant (881)..(881): Xaa in position 881 is any amino acid
  Variant (886)..(887): Xaa in position 886 to 887 is any amino acid
  Variant (890)..(891): Xaa in position 890 to 891 is any amino acid
  Variant (894)..(896): Xaa in position 894 to 896 is any amino acid
  Variant (899)..(908): Xaa in position 899 to 908 is any amino acid
  Variant (910)..(912): Xaa in position 910 to 912 is any amino acid
  Variant (914)..(916): Xaa in position 914 to 916 is any amino acid
  Variant (919)..(919): Xaa in position 919 is any amino acid
  Variant (925)..(925): Xaa in position 925 is any amino acid
  Variant (932)..(932): Xaa in position 932 is any amino acid
  Variant (934)..(936): Xaa in position 934 to 936 is any amino acid
  Variant (938)..(955): Xaa in position 938 to 955 is any amino acid
  Variant (956)..(957): Xaa in position 956 to 957 is any or no amino acid
  Variant (959)..(959): Xaa in position 959 is any amino acid
  Variant (962)..(966): Xaa in position 962 to 966 is any amino acid
  Variant (968)..(969): Xaa in position 968 to 969 is any amino acid
  Variant (971)..(971): Xaa in position 971 is any amino acid
  Variant (973)..(974): Xaa in position 973 to 974 is any amino acid
  Variant (976)..(976): Xaa in position 976 is any amino acid
  Variant (978)..(978): Xaa in position 978 is any amino acid
  Variant (979)..(979): Xaa in position 979 is any or no amino acid
  Variant (981)..(984): Xaa in position 981 to 984 is any amino acid
  Variant (986)..(992): Xaa in position 986 to 992 is any amino acid
  Variant (993)..(994): Xaa in position 993 to 994 is any or no amino acid
  Variant (998)..(1003): Xaa in position 998 to 1003 is any amino acid
  Variant (1005)..(1021): Xaa in position 1005 to 1021 is any amino acid
  Variant (1022)..(1039): Xaa in position 1022 to 1039 is any or no amino acid
  Variant (1041)..(1053): Xaa in position 1041 to 1053 is any amino acid
  Variant (1055)..(1058): Xaa in position 1055 to 1058 is any amino acid
  Variant (1060)..(1060): Xaa in position 1060 is any amino acid
  Variant (1062)..(1063): Xaa in position 1062 to 1063 is any amino acid
  Variant (1065)..(1066): Xaa in position 1065 to 1066 is any amino acid
  Variant (1068)..(1070): Xaa in position 1068 to 1070 is any amino acid
  Variant (1072)..(1072): Xaa in position 1072 is any amino acid
  Variant (1074)..(1080): Xaa in position 1074 to 1080 is any amino acid
  Variant (1081)..(1083): Xaa in position 1081 to 1083 is any or no amino acid
  Variant (1086)..(1086): Xaa in position 1086 is any amino acid
  Variant (1088)..(1100): Xaa in position 1088 to 1100 is any amino acid
  Variant (1101)..(1101): Xaa in position 1101 is any or no amino acid
  Variant (1103)..(1110): Xaa in position 1103 to 1110 is any amino acid
  Variant (1113)..(1114): Xaa in position 1113 to 1114 is any amino acid
  Variant (1116)..(1120): Xaa in position 1116 to 1120 is any amino acid
  Variant (1122)..(1131): Xaa in position 1122 to 1131 is any amino acid
  Variant (1132)..(1135): Xaa in position 1132 to 1135 is any or no amino acid
  Variant (1138)..(1144): Xaa in position 1138 to 1144 is any amino acid
  Variant (1145)..(1146): Xaa in position 1145 to 1146 is any or no amino acid
  Variant (1148)..(1150): Xaa in position 1148 to 1150 is any amino acid
  Variant (1152)..(1152): Xaa in position 1152 is any amino acid
  Variant (1154)..(1157): Xaa in position 1154 to 1157 is any amino acid
  Variant (1159)..(1160): Xaa in position 1159 to 1160 is any amino acid
  Variant (1162)..(1163): Xaa in position 1162 to 1163 is any amino acid
  Variant (1165)..(1166): Xaa in position 1165 to 1166 is any amino acid
  Variant (1168)..(1174): Xaa in position 1168 to 1174 is any amino acid
  Variant (1180)..(1183): Xaa in position 1180 to 1183 is any amino acid
  Variant (1185)..(1187): Xaa in position 1185 to 1187 is any amino acid
  Variant (1189)..(1204): Xaa in position 1189 to 1204 is any amino acid
KXLVANRGEIAIRXXRAXXELXXXTVAXYXXEDXXXXHRXKADEXYXXGXXXXXXXXXXPXXAYLXXXXIXXXAXXXXXDAIHPGYGFLSENXXFAXXXXXXGIXFXGPXXXXXXXXGXKXXAXXXAXXXXXPXXXXXXXXXXXXXXXXXXXXXXXXPXXXKAXXGGGGRGMRXXXXXXXXXXXXXXAXXEAXXAFGXXXXXXEXXXXXXXHXEVQXLXDXXGNXXHLXERDCSXQRRXQKVXEXAPXXXLXXXXRXXXXXXAXXXXXXXXXXXXXYXXAGTXEFLXXXXXXXXXXXXFIEXNPRXQVEHTXTEXXTXXDXVXXQXXXAXGXXLXXXXXXXXXXXXXXXXXXXXXXQXXXXXXXGXAXQXRXTTEDPXXXFXPDXGXIXXYRSXXGXGXRLDXGXXXXGXXIXXXXDSXLVKXXXXXXXXXXXXXXXXRXLXEFRIRGVXTNIXFLXXXXXXXXFXXXXXXTXFIXXXPXLXXXXXXXXRXXKXLXYXXXXXVNGXXXXXXXXXXXXXXXXXXXXXXXXXXXXXXXXXXXXXXXXXXXXXXGXXXXLXXXGXXXXXXXXXXXXXXLXXDTTXRDAHQSLLATRXRXXDXXXXAXXXXXXXXXXXSXEXWGGATFDVAXRFLXEXPWXRLXXXRXXXPNXXXQMLLRXXNXVGYXXYPDNXXXXFXXXXXXXGXDXFRXFDXLNXXXXXXXXXXAVXXXGXXXXEXXXCYTGDXXXXXXXXXYXLXYYXXXAXXXXXXGXHXLXIKDMAGXLXPXAAXXLXXXXXXXXXXXPXHXHTHDTXGXXXXXXXXAXXAGXDXVDXAXXXXXGXTSQPXXXXXXXXXXXXXXXXXXXXXXXXXXXXYWXXXRXXYXXFEXXXXXXXXXXXXVYXHEXPGGQXXNLXXQAXXXGLXXXXXXXXXXYXXXNXXXGDXVKVTPXSKVVGDXAXXXVXXXXXXXXXXXXXXXXXXXXPXSVXXXXXGXXGXPXXGXPXXLXXXXLXXXXXXXXXRPGXXXXXXDXXXXXXXXXXXXXXXXXXXXXXXXXXXXXXXXXXXPXXXXXXXXXXXXXGXXXXLXTXXFXXGXXXGXEXXXXXXXXXXGKXLXXXXXXXXXXXXXXGXXXXXXXXNGXXRXXXXXDXXXXXXXXXXXXXXKAXXXXXXXXXAXXXGXVXXXXVXXGXXVXXGXXXXXXXAMKMEXXXXAXXXGXXXXXXXXXXXXXXXXDL

SEQ ID NO: 96968 - protein, 58 aa, Artificial sequence
  protein pattern
  Variant (2)..(3): Xaa in position 2 to 3 is any amino acid
  Variant (10)..(10): Xaa in position 10 is Thr or Val
  Variant (11)..(11): Xaa in position 11 is Ala, Cys or Ser
  Variant (12)..(12): Xaa in position 12 is any amino acid
  Variant (13)..(13): Xaa in position 13 is Asn or Arg
  Variant (16)..(16): Xaa in position 16 is any amino acid
  Variant (18)..(18): Xaa in position 18 is Cys, Asp, Asn or Ser
  Variant (21)..(21): Xaa in position 21 is any amino acid
  Variant (24)..(25): Xaa in position 24 to 25 is any amino acid
  Variant (26)..(26): Xaa in position 26 is Ile, Leu, Met or Val
  Variant (27)..(27): Xaa in position 27 is Arg or Ser
  Variant (28)..(30): Xaa in position 28 to 30 is any amino acid
  Variant (32)..(32): Xaa in position 32 is Asn or Arg
  Variant (33)..(35): Xaa in position 33 to 35 is any amino acid
  Variant (36)..(36): Xaa in position 36 is Gln or Ser
  Variant (37)..(37): Xaa in position 37 is any amino acid
  Variant (39)..(39): Xaa in position 39 is Phe, Ile, Leu or Val
  Variant (41)..(41): Xaa in position 41 is Ala, Gly or Ser
  Variant (42)..(42): Xaa in position 42 is Ala, Gly, Gln or Ser
  Variant (44)..(44): Xaa in position 44 is Ala, Gly or Val
  Variant (45)..(45): Xaa in position 45 is Leu or Val
  Variant (46)..(46): Xaa in position 46 is Ala, Cys or Gly
  Variant (48)..(50): Xaa in position 48 to 50 is any amino acid
  Variant (51)..(51): Xaa in position 51 is Ala or Pro
  Variant (52)..(52): Xaa in position 52 is Asp or Pro
  Variant (53)..(53): Xaa in position 53 is Glu or Asn
  Variant (54)..(54): Xaa in position 54 is Ala, Leu or Val
  Variant (55)..(55): Xaa in position 55 is Ile or Val
  Variant (56)..(57): Xaa in position 56 to 57 is any amino acid
EXXGGATFDXXXXFLXEXPWXRLXXXXXXXPXXXXXXLXRXXNXXXYXXXXXXXXXXF

SEQ ID NO: 96969 - protein, 59 aa, Artificial sequence
  protein pattern
  Variant (3)..(3): Xaa in position 3 is any amino acid
  Variant (4)..(4): Xaa in position 4 is any or no amino acid
  Variant (6)..(6): Xaa in position 6 is any or no amino acid
  Variant (9)..(12): Xaa in position 9 to 12 is any amino acid
  Variant (13)..(13): Xaa in position 13 is Phe or Tyr
  Variant (14)..(14): Xaa in position 14 is Ala, Ile, Leu or Val
  Variant (16)..(17): Xaa in position 16 to 17 is any amino acid
  Variant (18)..(18): Xaa in position 18 is Ile, Leu or Val
  Variant (19)..(20): Xaa in position 19 to 20 is any amino acid
  Variant (21)..(21): Xaa in position 21 is Ala or Pro
  Variant (22)..(22): Xaa in position 22 is any amino acid
  Variant (24)..(24): Xaa in position 24 is Ile, Leu or Val
  Variant (28)..(28): Xaa in position 28 is Ala, Ile, Leu or Val
  Variant (29)..(29): Xaa in position 29 is Ile, Leu or Met
  Variant (30)..(30): Xaa in position 30 is Ala or Gly
  Variant (32)..(33): Xaa in position 32 to 33 is any amino acid
  Variant (35)..(37): Xaa in position 35 to 37 is any amino acid
  Variant (40)..(40): Xaa in position 40 is Phe, His, Trp or Tyr
  Variant (41)..(41): Xaa in position 41 is Asp or Glu
  Variant (45)..(45): Xaa in position 45 is Ser or Thr
  Variant (46)..(46): Xaa in position 46 is Ile, Leu, Met or Val
  Variant (50)..(50): Xaa in position 50 is any amino acid
  Variant (53)..(53): Xaa in position 53 is Leu or Val
  Variant (54)..(54): Xaa in position 54 is Ala, Ile, Leu or Val
  Variant (55)..(55): Xaa in position 55 is Glu or Arg
  Variant (56)..(56): Xaa in position 56 is any amino acid
  Variant (57)..(57): Xaa in position 57 is Ala, Cys or Thr
  Variant (58)..(58): Xaa in position 58 is Pro or Ser
  Variant (59)..(59): Xaa in position 59 is Ala, Cys or Ser
EAXXAXFGXXXXXXEXXXXXXXHXEVQXXXDXXGXXXHLXXRDCXXQRRXQKXXXXXXX

SEQ ID NO: 96970 - protein, 62 aa, Artificial sequence
  protein pattern
  Variant (2)..(3): Xaa in position 2 to 3 is any amino acid
  Variant (5)..(5): Xaa in position 5 is Ile or Met
  Variant (10)..(10): Xaa in position 10 is any amino acid
  Variant (11)..(11): Xaa in position 11 is Ser or Thr
  Variant (14)..(15): Xaa in position 14 to 15 is any or no amino acid
  Variant (17)..(18): Xaa in position 17 to 18 is any or no amino acid
  Variant (20)..(20): Xaa in position 20 is any amino acid
  Variant (21)..(21): Xaa in position 21 is Ala, Gly, Gln or Ser
  Variant (22)..(22): Xaa in position 22 is Leu, Met or Val
  Variant (25)..(25): Xaa in position 25 is Ala, Asp, Glu, Gly or Ser
  Variant (26)..(27): Xaa in position 26 to 27 is any amino acid
  Variant (28)..(28): Xaa in position 28 is Phe or Trp
  Variant (29)..(34): Xaa in position 29 to 34 is any amino acid
  Variant (36)..(37): Xaa in position 36 to 37 is any amino acid
  Variant (38)..(38): Xaa in position 38 is Ala, Cys or Val
  Variant (39)..(39): Xaa in position 39 is Asp or Asn
  Variant (40)..(41): Xaa in position 40 to 41 is any amino acid
  Variant (42)..(42): Xaa in position 42 is Phe or Leu
  Variant (44)..(44): Xaa in position 44 is any amino acid
  Variant (45)..(45): Xaa in position 45 is Ile, Leu, Pro or Val
  Variant (46)..(46): Xaa in position 46 is any amino acid
  Variant (51)..(51): Xaa in position 51 is Ser or Thr
  Variant (58)..(58): Xaa in position 58 is Leu or Met
  Variant (60)..(61): Xaa in position 60 to 61 is any amino acid
  Variant (62)..(62): Xaa in position 62 is Ile, Leu or Met
YXXEXPGGQXXNLXXQXXAXXXGLXXXXXXXXXXYXXXXXXXGXXXKVTPXSKVVGDXAXXX

SEQ ID NO: 96971 - protein, 38 aa, Artificial sequence
  protein pattern
  Variant (2)..(3): Xaa in position 2 to 3 is any or no amino acid
  Variant (5)..(6): Xaa in position 5 to 6 is any or no amino acid
  Variant (10)..(10): Xaa in position 10 is Ile or Val
  Variant (16)..(16): Xaa in position 16 is Ile or Val
  Variant (19)..(19): Xaa in position 19 is any amino acid
  Variant (20)..(20): Xaa in position 20 is Ile or Val
  Variant (22)..(22): Xaa in position 22 is Asp or Gly
  Variant (23)..(23): Xaa in position 23 is Ile, Leu or Val
  Variant (25)..(25): Xaa in position 25 is Ile or Leu
  Variant (27)..(27): Xaa in position 27 is any amino acid
  Variant (28)..(28): Xaa in position 28 is Ala, Ser or Thr
  Variant (30)..(30): Xaa in position 30 is Ile, Leu or Met
  Variant (31)..(31): Xaa in position 31 is any amino acid
  Variant (32)..(32): Xaa in position 32 is Ile, Leu or Val
  Variant (33)..(33): Xaa in position 33 is any amino acid
  Variant (34)..(34): Xaa in position 34 is Ala, Asp, Glu, Gly, Asn, Gln or Ser
  Variant (36)..(37): Xaa in position 36 to 37 is any amino acid
  Variant (38)..(38): Xaa in position 38 is Ile or Leu
FXXIXXNPRXQVEHTXTEXXTXXDXVXXQXXXXXGXXX

SEQ ID NO: 96972 - protein, 62 aa, Artificial sequence
  protein pattern
  Variant (3)..(3): Xaa in position 3 is Ala, Asp, Gly, Asn, Gln or Ser
  Variant (4)..(6): Xaa in position 4 to 6 is any amino acid
  Variant (7)..(7): Xaa in position 7 is Ile, Leu, Met or Val
  Variant (8)..(8): Xaa in position 8 is Ile, Leu or Val
  Variant (9)..(10): Xaa in position 9 to 10 is any amino acid
  Variant (11)..(11): Xaa in position 11 is Ala, Cys or Gly
  Variant (12)..(18): Xaa in position 12 to 18 is any amino acid
  Variant (19)..(19): Xaa in position 19 is Ile, Leu or Val
  Variant (20)..(20): Xaa in position 20 is His or Tyr
  Variant (29)..(32): Xaa in position 29 to 32 is any amino acid
  Variant (33)..(34): Xaa in position 33 to 34 is any or no amino acid
  Variant (36)..(39): Xaa in position 36 to 39 is any amino acid
  Variant (40)..(41): Xaa in position 40 to 41 is any or no amino acid
  Variant (43)..(43): Xaa in position 43 is Ile, Leu, Met or Val
  Variant (44)..(44): Xaa in position 44 is any amino acid
  Variant (45)..(45): Xaa in position 45 is Phe or Trp
  Variant (46)..(46): Xaa in position 46 is Ile or Val
  Variant (49)..(56): Xaa in position 49 to 56 is any amino acid
  Variant (58)..(58): Xaa in position 58 is Asp or Asn
  Variant (60)..(61): Xaa in position 60 to 61 is any amino acid
YLXXXXXXXXXXXXXXXXXXPGYGFLSEXXXXXXAXXXXXXGXXXXGPXXXXXXXXGXKXXA

SEQ ID NO: 96973 - protein, 42 aa, Artificial sequence
  protein pattern
  Variant (2)..(2): Xaa in position 2 is Ile, Leu or Val
  Variant (4)..(4): Xaa in position 4 is Phe, Ile, Leu or Val
  Variant (6)..(6): Xaa in position 6 is Ser or Thr
  Variant (9)..(9): Xaa in position 9 is Ser or Thr
  Variant (10)..(10): Xaa in position 10 is Ala, Pro, Ser or Thr
  Variant (11)..(11): Xaa in position 11 is Ala, Gly or Ser
  Variant (12)..(12): Xaa in position 12 is any amino acid
  Variant (13)..(13): Xaa in position 13 is Ala, Gly, Gln or Ser
  Variant (14)..(19): Xaa in position 14 to 19 is any amino acid
  Variant (20)..(20): Xaa in position 20 is Ala or Cys
  Variant (21)..(22): Xaa in position 21 to 22 is any amino acid
  Variant (23)..(23): Xaa in position 23 is Ala or Ser
  Variant (25)..(25): Xaa in position 25 is Ala, Cys or Val
  Variant (27)..(27): Xaa in position 27 is any or no amino acid
  Variant (29)..(29): Xaa in position 29 is any or no amino acid
  Variant (31)..(31): Xaa in position 31 is any amino acid
  Variant (33)..(33): Xaa in position 33 is any amino acid
  Variant (34)..(34): Xaa in position 34 is Ala, Asp, Gly, Asn or Ser
  Variant (35)..(35): Xaa in position 35 is Ala, Asp, Gly, Pro or Ser
  Variant (36)..(36): Xaa in position 36 is Phe, Leu or Met
  Variant (37)..(37): Xaa in position 37 is Ala or Ser
  Variant (39)..(39): Xaa in position 39 is any amino acid
PXHXHXHDXXXXXXXXXXXXXXXGXDXVXDXAXXXXXGXTSQ

SEQ ID NO: 96974 - protein, 39 aa, Artificial sequence
  protein pattern
  Variant (2)..(2): Xaa in position 2 is Ala or Pro
  Variant (3)..(4): Xaa in position 3 to 4 is any amino acid
  Variant (5)..(5): Xaa in position 5 is Phe, Leu or Val
  Variant (6)..(16): Xaa in position 6 to 16 is any amino acid
  Variant (17)..(17): Xaa in position 17 is Phe, Ile, Leu, Met or Val
  Variant (18)..(18): Xaa in position 18 is any amino acid
  Variant (22)..(22): Xaa in position 22 is any amino acid
  Variant (25)..(25): Xaa in position 25 is Ala or Gly
  Variant (34)..(34): Xaa in position 34 is Ile, Leu, Met or Val
  Variant (36)..(37): Xaa in position 36 to 37 is any amino acid
  Variant (38)..(38): Xaa in position 38 is Ala, Asp, Gly or Thr
  Variant (39)..(39): Xaa in position 39 is Phe, Ile, Leu or Met
GXXXXXXXXXXXXXXXXXDTTXRDXHQSLLATRXRXXXX

SEQ ID NO: 96975 - protein, 26 aa, Artificial sequence
  protein pattern
  Variant (2)..(2): Xaa in position 2 is any amino acid
  Variant (5)..(7): Xaa in position 5 to 7 is any amino acid
  Variant (8)..(8): Xaa in position 8 is Ala, Gly, Thr or Val
  Variant (9)..(10): Xaa in position 9 to 10 is any amino acid
  Variant (11)..(11): Xaa in position 11 is Ile, Leu, Met or Val
  Variant (12)..(14): Xaa in position 12 to 14 is any amino acid
  Variant (16)..(16): Xaa in position 16 is any amino acid
  Variant (18)..(18): Xaa in position 18 is Phe, Ile, Leu, Met or Val
  Variant (19)..(19): Xaa in position 19 is Ile or Leu
  Variant (20)..(20): Xaa in position 20 is Ala, Cys, Gly or Ser
  Variant (21)..(21): Xaa in position 21 is Ile, Leu or Val
LXYYXXXXXXXXXXGXHXXXXKDMAG

SEQ ID NO: 96976 - protein, 25 aa, Artificial sequence
  protein pattern
  Variant (2)..(2): Xaa in position 2 is any amino acid
  Variant (5)..(5): Xaa in position 5 is Ile or Val
  Variant (8)..(8): Xaa in position 8 is Ala, Cys or Ser
  Variant (11)..(13): Xaa in position 11 to 13 is any amino acid
  Variant (14)..(14): Xaa in position 14 is Ala, Gly, Asn, Gln or Ser
  Variant (15)..(15): Xaa in position 15 is Leu or Met
  Variant (16)..(17): Xaa in position 16 to 17 is any amino acid
  Variant (18)..(18): Xaa in position 18 is Ala, Gly, Ser or Thr
  Variant (19)..(20): Xaa in position 19 to 20 is any amino acid
  Variant (23)..(24): Xaa in position 23 to 24 is any amino acid
  Variant (25)..(25): Xaa in position 25 is Ala, Glu, Asn, Gln, Ser or Thr
DXFRXFDXLNXXXXXXXXXXAVXXX

SEQ ID NO: 96977 - protein, 19 aa, Artificial sequence
  protein pattern
  Variant (2)..(2): Xaa in position 2 is Ala, Cys, Asn, Ser or Val
  Variant (3)..(3): Xaa in position 3 is Ile, Leu or Val
  Variant (4)..(4): Xaa in position 4 is any amino acid
  Variant (8)..(8): Xaa in position 8 is Ile or Val
  Variant (11)..(11): Xaa in position 11 is any amino acid
  Variant (12)..(12): Xaa in position 12 is any or no amino acid
  Variant (14)..(14): Xaa in position 14 is any or no amino acid
  Variant (16)..(16): Xaa in position 16 is Ile, Leu or Met
  Variant (17)..(17): Xaa in position 17 is any amino acid
  Variant (19)..(19): Xaa in position 19 is Leu or Val
RXXXEFRXRGXXTXNXXFX

SEQ ID NO: 96978 - protein, 41 aa, Artificial sequence
  protein pattern
  Variant (2)..(6): Xaa in position 2 to 6 is any amino acid
  Variant (7)..(7): Xaa in position 7 is any or no amino acid
  Variant (9)..(9): Xaa in position 9 is any amino acid
  Variant (10)..(10): Xaa in position 10 is any or no amino acid
  Variant (13)..(13): Xaa in position 13 is Asp or Glu
  Variant (14)..(15): Xaa in position 14 to 15 is any amino acid
  Variant (17)..(17): Xaa in position 17 is any amino acid
  Variant (19)..(25): Xaa in position 19 to 25 is any amino acid
  Variant (26)..(26): Xaa in position 26 is Asp, Asn or Gln
  Variant (28)..(28): Xaa in position 28 is Ala, Glu or Gly
  Variant (29)..(29): Xaa in position 29 is Asp, Gln, Ser or Thr
  Variant (30)..(30): Xaa in position 30 is Lys or Arg
  Variant (31)..(31): Xaa in position 31 is any amino acid
  Variant (33)..(34): Xaa in position 33 to 34 is any amino acid
  Variant (35)..(35): Xaa in position 35 is Ile, Leu, Met or Val
  Variant (36)..(36): Xaa in position 36 is Ala, Gly or Ser
  Variant (37)..(39): Xaa in position 37 to 39 is any amino acid
  Variant (40)..(40): Xaa in position 40 is Ile, Leu or Val
FXXXXXXTXXFIXXXPXLXXXXXXXXRXXXXLXXXXXXXXN

SEQ ID NO: 96979 - protein, 49 aa, Artificial sequence
  protein pattern
  Variant (2)..(3): Xaa in position 2 to 3 is any or no amino acid
  Variant (5)..(6): Xaa in position 5 to 6 is any amino acid
  Variant (8)..(9): Xaa in position 8 to 9 is any amino acid
  Variant (10)..(10): Xaa in position 10 is Gly or Asn
  Variant (11)..(11): Xaa in position 11 is Ala, Asp, Glu, Gln or Thr
  Variant (12)..(12): Xaa in position 12 is any amino acid
  Variant (13)..(13): Xaa in position 13 is Ile, Leu, Met or Val
  Variant (14)..(16): Xaa in position 14 to 16 is any amino acid
  Variant (17)..(17): Xaa in position 17 is Glu or Ser
  Variant (23)..(24): Xaa in position 23 to 24 is any amino acid
  Variant (25)..(25): Xaa in position 25 is Ile, Leu or Val
  Variant (26)..(26): Xaa in position 26 is any amino acid
  Variant (27)..(27): Xaa in position 27 is Ala or Ser
  Variant (28)..(30): Xaa in position 28 to 30 is any amino acid
  Variant (31)..(31): Xaa in position 31 is Ala, Cys or Gly
  Variant (32)..(32): Xaa in position 32 is any amino acid
  Variant (33)..(33): Xaa in position 33 is Ile or Val
  Variant (34)..(35): Xaa in position 34 to 35 is any amino acid
  Variant (36)..(36): Xaa in position 36 is Ile, Leu or Val
  Variant (37)..(43): Xaa in position 37 to 43 is any amino acid
  Variant (44)..(44): Xaa in position 44 is Ile, Leu or Val
  Variant (45)..(45): Xaa in position 45 is Ala, Asp, Glu, Gly, Asn, Gln or Ser
  Variant (46)..(47): Xaa in position 46 to 47 is any amino acid
VXXGXXVXXXXXXXXXXAMKMEXXXXXXXXXXXXXXXXXXXXXXXXXDL

SEQ ID NO: 96980 - DNA, 1539 bp, Saccharomyces cerevisiae
  CDS (1)..(1539)
atggtagcaacaataatgcagacgacaacaactgtgctgacgacagtcgccgcaatgtctactaccttagcatcaaattacatatcttcgcaagctagttcctcgacgagtgtaacaacagtaacgacaatagcgacatcaatacgctctacaccgtctaatctactcttttctaatgtggcggctcagccaaaatcatcttcagcaagcacaattgggctttcaatcggacttcccatcggaatattctgtttcggattacttatccttttgtgttatttctaccttaaaaggaattcggtgtccatttcaaatccacccatgtcagctacgattccaagggaagaggaatattgtcgccgcactaattggttctcacggttattttggcagagtaagtgtgaggatcagaattcatattctaatcgtgatattgagaagtataacgacacccagtggacctcgggtgataacatgtcttcaaaaatacagtacaaaatttccaaacccataataccgcagcatatactgacacctaagaaaacggtgaagaacccatatgcttggtctggtaaaaacatttcgttagaccccaaagtgaacgaaatggaggaagagaaagttgtggatgcattcctgtatactaaaccaccgaatattgtccatattgaatccagcatgccctcgtataatgatttaccttctcaaaaaacggtgtcctcaaagaaaactgcgttaaaaacgagtgagaaatggagttacgaatctccactatctcgatggttcttgaggggttctacatactttaaggattatggcttatcaaagacctctttaaagaccccaactggggctccacaactgaagcaaatgaaaatgctctcccggataagtaagggttacttcaatgagtcagatataatgcctgacgaacgatcgcccatcttggagtataataacacgcctctggatgcaaatgacagtgtgaataacttgggtaataccacgccagattcacaaatcacatcttatcgcaacaataacatcgatctaatcacggcaagaccccattcagtgatatacggtactactgcacaacaaactttggaaaccaacttcaatgatcatcatgactgcaataaaagcactgagaaacacgagttgataatacccaccccatcaaaaccactaaagaaaaggaaaaaaagaagacaaagtaaaatgtatcagcatttacaacatttgtcacgttctaaaccattgccgcttactccaaactccaaatataatggggaggctagcgtccaattagggaagacatatacagttattcaggattacgagcctagattgacagacgaaataagaatctcgctgggtgaaaaagttaaaattctggccactcataccgatggatggtgtctggtagaaaagtgtaatacacaaaagggttctattcacgtcagtgttgacgataaaagatacctcaatgaagatagaggcattgtgcctggtgactgtctccaagaatacgactga

SEQ ID NO: 96981 - protein, 512 aa, Saccharomyces cerevisiae
MVATIMQTTTTVLTTVAAMSTTLASNYISSQASSSTSVTTVTTIATSIRSTPSNLLFSNVAAQPKSSSASTIGLSIGLPIGIFCFGLLILLCYFYLKRNSVSISNPPMSATIPREEEYCRRTNWFSRLFWQSKCEDQNSYSNRDIEKYNDTQWTSGDNMSSKIQYKISKPIIPQHILTPKKTVKNPYAWSGKNISLDPKVNEMEEEKVVDAFLYTKPPNIVHIESSMPSYNDLPSQKTVSSKKTALKTSEKWSYESPLSRWFLRGSTYFKDYGLSKTSLKTPTGAPQLKQMKMLSRISKGYFNESDIMPDERSPILEYNNTPLDANDSVNNLGNTTPDSQITSYRNNNIDLITARPHSVIYGTTAQQTLETNFNDHHDCNKSTEKHELIIPTPSKPLKKRKKRRQSKMYQHLQHLSRSKPLPLTPNSKYNGEASVQLGKTYTVIQDYEPRLTDEIRISLGEKVKILATHTDGWCLVEKCNTQKGSIHVSVDDKRYLNEDRGIVPGDCLQEYD

SEQ ID NO: 96982 - DNA, 1533 bp, Kluyveromyces lactis NRRL Y-1140
  CDS (1)..(1533)
atggaaatagaaacagaaacacgaacggtgatccagacgcaaatgaacgaacttattctacataatgaagctactgtcattaatacaatttatgttgatcaatactatcgagcatcaaatactttaccatatgcattaactaccgtctcgacagcgtttgcaactcaactgaacaaaaatgttaaaactgcaactattacaaatcaagtcaccactacgattgaaacttctcaagaatccacctctactagttctacatcccatagcagtagctcattgggagttcagagtagtcaatcagcgagaatgacatcaggaatctccttgaacagtctagccagtacatcggatggaaaaaatactagtggtaccattttaggtcttgccataggattaccaattgccttgtttgtcgttggattgggaattgtgttcgggttcttgtactatcgaagattccactcaaaagttgatcctgataatgaaaatatgcaacagcatgagccagattcggtgttagggaagctatatgggatgcaagaacttaatgatttaaaaaaagcagaacttttcaacgaaaagaaacaggatgaaaagtatgatagcggcgtaagctctaagatcacatacaaagttagcaaaccttatatttctcatcctgaactcattcaaacaccggaaaaattggcatttacggacaatccatacagaaaaaatgttaaccaaaaaagcgacacgaatgcgtactcaaattcgacaatggatttaggacagtttcccagaccattagcatcacccttcaagaaatggaactatgaatcgccactttcaagatggtttttaaccaaatctactctaatccaagacaaaattcaaacagcaaagacccctactattcatttgaaacaacttaatatacttgcaagagcaaataagagtaagatcactataaatggggaggagccgtacactgaaatgtcaccgatgcttcctagtgttcctcgatctccatatgaagctattgaatcactgccgtcattagaacttaaagaggaaagtgaaataccaatcaatgaatctaagatacgaacggaacaaggcgtaatcaaaccgcaaataatagataccaacttaaaaccaacatatccaacgctgctcaaattggataaactatcgaaaacaaaaccactacccaagccgcctaatccccacttcacgtcggccaacgatgatcaacatgtttcggataatgtcagtgcaagaagtgaccatcatgacttacgatctgcgagaaaatcaactgctcaagagcaggcaaaattataccgtgttgtcaaggactatcaggctgtgttgatggatgaaatagatatacgaggaggtgaacttgtacgagtacttgcaagacacacagacggatggtgtttagtggaaagaagtaatatccaaaaccatagttcactagatggacccacttatttgaatgaaaaccgtggtattgtgcccgggttatgtcttcaagagagtatgtaa

SEQ ID NO: 96983 - protein, 510 aa, Kluyveromyces lactis NRRL Y-1140
MEIETETRTVIQTQMNELILHNEATVINTIYVDQYYRASNTLPYALTTVSTAFATQLNKNVKTATITNQVTTTIETSQESTSTSSTSHSSSSLGVQSSQSARMTSGISLNSLASTSDGKNTSGTILGLAIGLPIALFVVGLGIVFGFLYYRRFHSKVDPDNENMQQHEPDSVLGKLYGMQELNDLKKAELFNEKKQDEKYDSGVSSKITYKVSKPYISHPELIQTPEKLAFTDNPYRKNVNQKSDTNAYSNSTMDLGQFPRPLASPFKKWNYESPLSRWFLTKSTLIQDKIQTAKTPTIHLKQLNILARANKSKITINGEEPYTEMSPMLPSVPRSPYEAIESLPSLELKEESEIPINESKIRTEQGVIKPQIIDTNLKPTYPTLLKLDKLSKTKPLPKPPNPHFTSANDDQHVSDNVSARSDHHDLRSARKSTAQEQAKLYRVVKDYQAVLMDEIDIRGGELVRVLARHTDGWCLVERSNIQNHSSLDGPTYLNENRGIVPGLCLQESM

SEQ ID NO: 96984 - DNA, 25 bp, Artificial sequence
  primer
atggtagcaacaataatgcagacga

SEQ ID NO: 96985 - DNA, 24 bp, Artificial sequence
  primer
tcagtcgtattcttggagacagtc

SEQ ID NO: 96986 - DNA, 1713 bp, Saccharomyces cerevisiae
  CDS (1)..(1713)
atgtcacaagacgctgctattgcagagcaaactcctgtggagcatctctctgctgttgactcagcctcccactcggttttatctacaccatcaaacaaggctgaaagagatgaaataaaagcttatggtgaaggtgaagagcacgaacctgtcgttgaaattccaaagagaccagcttctgcctatgtcactgtctctattatgtgtatcatgatcgcctttggtggtttcgttttcggttgggatactggtaccatttctggtttcatcaatcaaaccgatttcatcagaagatttggtatgaagcataaagatggtactaattatttgtctaaggttagaactggtttgattgtctccattttcaacattggttgtgccattggtggtattattctttccaaattgggtgatatgtacggtcgtaaggtgggtttgattgtcgttgttgtcatctacatcatcggtattattattcaaattgcatctatcaacaaatggtaccaatatttcatcggtagaattatttccggtttgggtgttggtggtattgccgttttatctcctatgttgatttctgaagtatccccaaagcatttaaggggtactttagtctcttgctaccaattgatgattactgccggtattttcttgggttactgtaccaacttcggtactaagaactactccaactctgtgcaatggagagttccattaggtttgtgttttgcctgggctttgtttatgattggtggtatgacatttgttccagagtctccacgttatttggctgaagtcggtaagatcgaagaagccaaacgttctattgccgtttctaacaaggttgctgttgatgatccatctgttttggctgaagtcgaagctgtcttggctggtgtagaggcagagaaattagctggtaatgcatcctggggtgaattgtttagtagcaagacaaaggtccttcagcgtttgatcatgggtgctatgattcaatctctacaacaattgacaggtgataactatttcttctactatggtactactattttcaaggctgttggtttgagtgactctttcgaaacctctattgtcttgggtattgttaactttgcttccacctttgttggtatttacgttgttgagagatatggtcgtcgtacttgtttgctatggggtgctgcatccatgactgcttgtatggttgtctatgcttccgtgggtgtcaccagattatggccaaatggtcaagaccaaccatcttccaagggtgctggtaactgtatgattgtctttgcctgtttctatattttctgttttgctactacatgggctccaattccttatgtcgttgtttctgaaactttcccattgagagtcaagtctaaggctatgtctattgctacagctgctaattggttgtggggtttcttgattggtttcttcactccatttattactggtgctattaacttctactacggttacgttttcatgggctgtttggtcttcatgttcttctatgttttgttagttgttccagaaactaagggtttgactttggaagaagtcaacaccatgtgggaagaaggtgttctaccatggaagtctgcctcatgggttccaccatccagaagaggtgccaactacgacgctgaagaaatgactcacgatgacaagccattgtacaagagaatgttcagcaccaaataa

SEQ ID NO: 96987 - protein, 570 aa, Saccharomyces cerevisiae
MSQDAAIAEQTPVEHLSAVDSASHSVLSTPSNKAERDEIKAYGEGEEHEPVVEIPKRPASAYVTVSIMCIMIAFGGFVFGWDTGTISGFINQTDFIRRFGMKHKDGTNYLSKVRTGLIVSIFNIGCAIGGIILSKLGDMYGRKVGLIVVVVIYIIGIIIQIASINKWYQYFIGRIISGLGVGGIAVLSPMLISEVSPKHLRGTLVSCYQLMITAGIFLGYCTNFGTKNYSNSVQWRVPLGLCFAWALFMIGGMTFVPESPRYLAEVGKIEEAKRSIAVSNKVAVDDPSVLAEVEAVLAGVEAEKLAGNASWGELFSSKTKVLQRLIMGAMIQSLQQLTGDNYFFYYGTTIFKAVGLSDSFETSIVLGIVNFASTFVGIYVVERYGRRTCLLWGAASMTACMVVYASVGVTRLWPNGQDQPSSKGAGNCMIVFACFYIFCFATTWAPIPYVVVSETFPLRVKSKAMSIATAANWLWGFLIGFFTPFITGAINFYYGYVFMGCLVFMFFYVLLVVPETKGLTLEEVNTMWEEGVLPWKSASWVPPSRRGANYDAEEMTHDDKPLYKRMFSTK

SEQ ID NO: 96988 - DNA, 1821 bp, Oryza sativa
  CDS (95)..(1702)
atcatccgtcaaggctttctccttccccttcaaggcggcctcttcccctaccacctctcccttcacacacccttacctctctcttctcttcaagatggctggtggtgctgttgccgatgtcggctacaccccggctggccctgtggcccgccctgcgagcgtgaagcagtcgctccctgcgatcctcgtcgctgccgcctccgcctttggtggtgtgctgttcggctacgacaccggtaccatctccggtctcatcgtgatgaagaacttcaaggagacgttcggtcaattcgacgctggcaaaggagaatatgccctcaccaccaacgacgagtcgctcgtcgtgtcgatcctttcggctggtacctttgtgggtgccttggccggtgcgcccatctcggatatccttggtcgacgatggggtatgcaggtcgctctgcttgttttcaccgtgggtgtggtgatgcagatggccaccacggacctgggtgtctttatcggcggtcgtgtcgttgccggtctcggtgtgggtatcctgtcgaccattgtgcccatgtaccagtccgagactgctcctcgctggatccgtggtgccgttgtctccggttaccagtgggccatcaccatcggtctgctttgcgcctcgctcgccaacaacggcacgcagaaccgcagcgactcgggcgcgtggcgcatccccgtcggtatccagcttgcctttgccattcttctttgcggtttcttcctgattcttcctgaatcgcctcgttggctcgtcaagaagggcaaccacgagcaggcttccaagtcgctcgctcgcctcaactcgaccgatgtcgacgaccccatcgtccgctccgagctctcggtcatccagaccaacctggacatcgagcttactcactcgaccggttcctacctcgactgcttcaagaacaacgaccgaaagtacctccttcgcgcgatgacgggcatcttcatccaggccttccagcagctcaccggtatcaacttcatcttctactacggcaccaagttcttcaaatcggcgcttcccggcaccaaccccttcgtcttctcggtcatctccaacgtcgtcaacgtcgtcaccacggtcccgggcatgtacatgatggagcgcctcggccgccgtaacctgctcatctggggtgccgtctggatgtgcatctgcgagctgatcgtggccgtcgtcggtaccgccgtgcccgtccagaacctggctggaggcaagaccgccgtcgcctttgtctgcatctacattgccggtttcgcctcgacctggggccctgccgcttgggtcgtctgcggagagatcttccccctggccatccgtgccaaggccctgtcgctctgcaccgcctccaactggctctggaactttggtatcggctatgccaccccttacctcgtcgacgtcggacctggtaaggccggtctcggtcccaaggtgttcttcatctggaccggtacgtgtgcctgctgcgccgtcttcgcctacctgttcatctacgagacccgtctgctgtcgctcgaggaggtcgacgagatgtacgcccagaccaccgccatcaagtcgtccgccgccaacgccgagatccgcgctcgtcgctcggacctcgagggtgccgtcgcccccgtcaaggaggacgagctcgccacccacgacgagaagaagtactaaagtgcttctcccacgcacctgtcatgattccacgctggatctttggcgcacgcgcgcctctgatcgcatgatcttgtgatgctagcatgcctcatctacaaatcaaactagtcacggat

SEQ ID NO: 96989 - protein, 535 aa, Oryza sativa
MAGGAVADVGYTPAGPVARPASVKQSLPAILVAAASAFGGVLFGYDTGTISGLIVMKNFKETFGQFDAGKGEYALTTNDESLVVSILSAGTFVGALAGAPISDILGRRWGMQVALLVFTVGVVMQMATTDLGVFIGGRVVAGLGVGILSTIVPMYQSETAPRWIRGAVVSGYQWAITIGLLCASLANNGTQNRSDSGAWRIPVGIQLAFAILLCGFFLILPESPRWLVKKGNHEQASKSLARLNSTDVDDPIVRSELSVIQTNLDIELTHSTGSYLDCFKNNDRKYLLRAMTGIFIQAFQQLTGINFIFYYGTKFFKSALPGTNPFVFSVISNVVNVVTTVPGMYMMERLGRRNLLIWGAVWMCICELIVAVVGTAVPVQNLAGGKTAVAFVCIYIAGFASTWGPAAWVVCGEIFPLAIRAKALSLCTASNWLWNFGIGYATPYLVDVGPGKAGLGPKVFFIWTGTCACCAVFAYLFIYETRLLSLEEVDEMYAQTTAIKSSAANAEIRARRSDLEGAVAPVKEDELATHDEKKY

SEQ ID NO: 96990 - DNA, 1509 bp, Oryza sativa (japonica cultivar-group)
  CDS (1)..(1509)
atggcggacgatcctctctccaactccaccaccaacaacaagagggcagaggggatccagctccagcacggcgactgcgagagcgagagcactgcgcccttgctgctcgcgccacacgagtcctaccgcctctccgccgcaatcctccccttcctatttccagctttgggcggccttctctatggctacgacatcggagcaacgtctggtgctaccatatcgctcaagtcatccaccttcagtggcaccacatggtacaacttgtcatcgctgcaaaccggccttgtcgtcagtggctcactctatggtgctctcatcggttccatcttggcattcaacattgccgattttctaggacggcgcagagagcttattctttcttctgtctcatatttgattggagctcttctcacagcagcagcacctaacttccctatcatggtggttggccgctttttctatggcataggaataggattggctatgcatgctgctccaatgtacattgcagagactgctccaagtcagataagaggcatgctcatttctctcaaggaattctttattgttcttgggatgcttcttggctacattgcaggcagtctctttgtcgaagtggtttctggttggcgctacatgtatgccaccagtacaccattatgtctcatcatgggaattgggatgtgctggttacctgcttcacctaggtggcttctgttatgtgccatacaagggaagaggaatattatggagtcaaaagaaaatgctacccgttgcttatgtcgattgaggggtcaagcttctcctgatttggtttcggaacaagttgatttgattctggatgaactgtcatacgttgatcaagagaggcaagcaggcttcagtgagatctttcagggaaaatgcctcaaagcaatgataatcggatgtggcttggtgttctttcagcaggttactggtcaaccaagtgtgctatattatgctgcgacaatccttcagagtgctggattctctggtgcatctgatgctactcgtgtatcagttcttcttggcttactgaagttgattatgactggtgtggcagttcttgtggttgacagacttgggagaagaccattactgattggaggtgttagtgggattgctgtttccttgtttttgttatcttcgtactacaccttattgaaggatgctccttatgtggctgtaatagcacttctactctatgttggctgctaccagctgtcattcggtccaattggctggcttatgatttcggaagttttcccattaaggctgcgagggcgtgggttgagtattgctgttcttgtgaattttgcctccaatgcactagtcacttttgctttctccccattggaggatttgattggaactgggatcctcttctctgcgtttggggtgattgcagtggcgtctcttgttttcatattcttcatcgtgcccgagacgaaagggctcaccttggaagaaattgaagccagcctgtag

SEQ ID NO: 96991 - protein, 502 aa, Oryza sativa (japonica cultivar-group)
MADDPLSNSTTNNKRAEGIQLQHGDCESESTAPLLLAPHESYRLSAAILPFLFPALGGLLYGYDIGATSGATISLKSSTFSGTTWYNLSSLQTGLVVSGSLYGALIGSILAFNIADFLGRRRELILSSVSYLIGALLTAAAPNFPIMVVGRFFYGIGIGLAMHAAPMYIAETAPSQIRGMLISLKEFFIVLGMLLGYIAGSLFVEVVSGWRYMYATSTPLCLIMGIGMCWLPASPRWLLLCAIQGKRNIMESKENATRCLCRLRGQASPDLVSEQVDLILDELSYVDQERQAGFSEIFQGKCLKAMIIGCGLVFFQQVTGQPSVLYYAATILQSAGFSGASDATRVSVLLGLLKLIMTGVAVLVVDRLGRRPLLIGGVSGIAVSLFLLSSYYTLLKDAPYVAVIALLLYVGCYQLSFGPIGWLMISEVFPLRLRGRGLSIAVLVNFASNALVTFAFSPLEDLIGTGILFSAFGVIAVASLVFIFFIVPETKGLTLEEIEASL

SEQ ID NO: 96992 - DNA, 1683 bp, Saccharomyces cerevisiae
  CDS (1)..(1683)
atgtctgaagaagctgcctatcaagaggatacagcagtccaaaatactccagctgatgctttgtcgccagttgaatccgattctaattccgctttgtctactccatccaacaaagctgaaagagatgacatgaaagatttcgacgagaatcacgaagaatctaataactacgttgaaattccaaagaagcccgcctccgcctacgttacagtttccatctgttgtttaatggttgctttcggtggttttgttttcggttgggatactggtaccatttctggttttgttgctcaaactgattttatcagaagatttggtatgaagcaccacgatggtacttattatttgtctaaggttagaactggtttaattgtctccattttcaacattggttgtgccattggtggtattattttagcaaaattaggtgatatgtatggtcgtaaaatgggtttgattgtcgttgttgtcatctacattatcggtatcattatccaaattgcctcaatcaacaagtggtaccaatatttcattggtagaattatctctggtttaggtgtcggtggtattgccgttttatctcctatgttgatttctgaagtctctccaaagcatattagaggtactttggtttcatgttaccaacttatgattactttgggtattttcttgggttactgtacaaactacggtaccaagacctacaccaattctgtccaatggagagttccattaggtctaggtttcgcttgggctttgtttatgattggtggtatgacattcgttccagaatctccacgttatttagttgaagtcggtaaaattgaagaagctaagcgttctattgctctttcaaataaggtcagcgcagacgatccagctgttatggctgaagtcgaagttgttcaagctacagttgaagctgaaaaattagctggtaatgcctcctggggtgaaatatttagcactaagactaaggttttccaacgtttgatcatgggtgctatgattcaatcattgcaacaattgacaggtgataactatttcttctattacggtactaccgttttcactgctgtcggtttggaagattcttttgaaacttctattgtcttgggtattgtcaactttgcttccacctttgttggtattttcttagtcgaaagatatggtcgtcgtagatgtttattatggggtgctgcttccatgacagcttgtatggttgttttcgcttctgttggtgttacaagattgtggccaaatggtaagaagaacgggtcttctaagggtgctggtaactgtatgattgtcttcacatgtttctacttattctgttttgccactacctgggctccaattccatttgttgttaactctgaaactttcccattgagagttaagtccaagtgtatggctattgctcaagcttgtaactggatctggggtttcttgattggtttctttactccatttatttcaggtgctattgatttctactacggttatgttttcatgggctgtttggtcttttcttacttctacgtcttcttcttcgttccagaaactaaaggtttgactttagaagaagttaacaccttatgggaagaaggtgttttgccatggaaatcaccttcttggttccaccaaacaagagaggtactgactacaacgctgatgatctaa

SEQ ID NO: 96993 - protein, 560 aa, Saccharomyces cerevisiae
MSEEAAYQEDTAVQNTPADALSPVESDSNSALSTPSNKAERDDMKDFDENHEESNNYVEIPKKPASAYVTVSICCLMVAFGGFVFGWDTGTISGFVAQTDFIRRFGMKHHDGTYYLSKVRTGLIVSIFNIGCAIGGIILAKLGDMYGRKMGLIVVVVIYIIGIIIQIASINKWYQYFIGRIISGLGVGGIAVLSPMLISEVSPKHIRGTLVSCYQLMITLGIFLGYCTNYGTKTYTNSVQWRVPLGLGFAWALFMIGGMTFVPESPRYLVEVGKIEEAKRSIALSNKVSADDPAVMAEVEVVQATVEAEKLAGNASWGEIFSTKTKVFQRLIMGAMIQSLQQLTGDNYFFYYGTTVFTAVGLEDSFETSIVLGIVNFASTFVGIFLVERYGRRRCLLWGAASMTACMVVFASVGVTRLWPNGKKNGSSKGAGNCMIVFTCFYLFCFATTWAPIPFVVNSETFPLRVKSKCMAIAQACNWIWGFLIGFFTPFISGAIDFYYGYVFMGCLVFSYFYVFFFVPETKGLTLEEVNTLWEEGVLPWKSPSWFHQTREVLTTTLMI

SEQ ID NO: 96994 - DNA, 1554 bp, Bifidobacterium longum NCC2705
  CDS (1)..(1554): transl_table=11
atgacgacgacaacggcatcacccgtatcgaaacagacggcatccgcggcgcaggaaaccagcgcaaccggtgcggcggccaccgcaatcgaaaccatcgaaaccggcgtggccggagtggcgggcgcggccacaaacgcggcagccaacgcaatcgaggacctcgaagccgccgaatcgcacggcttctccacgcgcttcccgctcaacagcgcattcatcttcaccttcggcgcgctcggcggcatgctgttcggtttcgacaccggcatcatctccggcgcctccccgcttatcgaatcggacttcggcctgagcgtctctcagaccggcttcatcacctcctcggtgctgatcggctcgtgcgcaggcgcgctgtcgatcggcgcactgtctgaccggttcggccgcaagaagctgctcatcgtctccgcgctgctgttcctgctcggctcaggcctgtgcgcctcctccaccggattcgcgatgatggtgtgcgcccgcatcatcctgggtctcgccgtcggcgcggcctccgccctgaccccggcgtacttggccgaactggcgccgaaggagcgtcgcggctcactgtccacgctgttccagctcatggtcaccttcggcattctgctggcctacgcctccaacctcggattcctgaaccacaacctcttcggcatccgcgactggcgctggatgctcggttcggcgctggtgccggccgccttgttgctgctcggcggcctgttgctgcccgaatccccgcgttatctggtgaacaagggcgacacccgcaacgccttcaaagtgcttacgctgattcgcaaggacgtggatcagacccaggtgcagattgagctggacgaaatcaaggccgtggccgcacaggacaccaagggtggtgtgcgcgaactgttccgtatcgctcgtccggcgctggtggccgccatcggtatcatgctgttccagcagctcgtgggcatcaactcggtgatctacttcctgccgcaggtgttcatcaagggcttcggcttccctgaaggcgacgcgatctgggtgtcggtgggcatcggcgtggtgaacttcgtgagcaccatcgtggccacgcttatcatggatcgtttcccgcgcaagggcatgctgatcttcggttccatcgtgatgaccgtttcgctcgcggtgctcgccgtgatgaacttcgtgggcgacgtggccgtgctggcagtgccgacgatgattctcatcgctttctatatcctcggctttgcggtctcgtggggcccgatcgcctgggtgcttatcggcgagatcttcccgctgagcgtgcgcggcatcggctcatccttcggctcggcggcgaactggctgggcaacttcatcgtctcccagttcttcctcgtgctgctcgatgcgttcggcaacaatgtgggcggcccgttcgcgattttcggcgtgttctcggccctgtccatcccgttcgtgctgcgcttggtgcccgagaccaagggcaagtcgctggaggaaatcgagaaggaaatgaccaagcgctag

SEQ ID NO: 96995 - protein, 517 aa, Bifidobacterium longum NCC2705
MTTTTASPVSKQTASAAQETSATGAAATAIETIETGVAGVAGAATNAAANAIEDLEAAESHGFSTRFPLNSAFIFTFGALGGMLFGFDTGIISGASPLIESDFGLSVSQTGFITSSVLIGSCAGALSIGALSDRFGRKKLLIVSALLFLLGSGLCASSTGFAMMVCARIILGLAVGAASALTPAYLAELAPKERRGSLSTLFQLMVTFGILLAYASNLGFLNHNLFGIRDWRWMLGSALVPAALLLLGGLLLPESPRYLVNKGDTRNAFKVLTLIRKDVDQTQVQIELDEIKAVAAQDTKGGVRELFRIARPALVAAIGIMLFQQLVGINSVIYFLPQVFIKGFGFPEGDAIWVSVGIGVVNFVSTIVATLIMDRFPRKGMLIFGSIVMTVSLAVLAVMNFVGDVAVLAVPTMILIAFYILGFAVSWGPIAWVLIGEIFPLSVRGIGSSFGSAANWLGNFIVSQFFLVLLDAFGNNVGGPFAIFGVFSALSIPFVLRLVPETKGKSLEEIEKEMTKR

SEQ ID NO: 96996 - DNA, 1407 bp, Bacillus cereus ATCC 10987
  CDS (1)..(1407): transl_table=11
atgaagcaaaaacgaaactcactgtatattttttctattacattagtagctgcaattggaggtttattgtttggttatgatacagctgtaatatctggagcggaagaatcattgaaagtttacttcattgacagccttggattaggttccttagcacatggagttactgtatcaagtgcattaataggatgtattattggaggggtaatatccggctactgtgcttcaaaattcggtcgtaaaagatcacttataattgcagcaatactctttatcgtatcggcgctaggtgcatcttatcctgaatttttattttttacaaagggtgaaccaacaatcgttttgttactagcttttaacctttatcgaatcataggtggaattggcgttggattggcttcagctatttgtccgatatatataggggaaattgctccagctgatattcgtggtaggttagtgtcatttaatcaatttatgattatttttggtatgttagtggtttattttgttaactggggtattgcgaatggagaaacactagaatggataaatgatgtgggctggaggtacatgtttgcgtcaggggtaattccagctataatattcgctatacttttgttatttgtacctgaaacacctcgatatctagcgatacagcatcaggacaaaaaggctctggctatacttacaaagattaatggtcctttagaagctaaagctattttagatgatattaaacaaactatggctataaatgtttcctcagaaaagttattctcttatggaaaattagttattattgtcggagtgttactttctgtatttcaacagtttgtaggcataaatgttgccttatattatgctccccgcatttttgaaagtatgggagcagctaaagattcctctatgatgcaaaccattattatgggattagtaaacgttatatttacagttatcgctattttaacagttgatagatggggaagaaaaccattattaatagtgggttctattggtatggcaattggaatgtttggtgtagcaagcatggcttttgctaatatcattggaattggtactctcatatttattattgtctatacagcttcatttatgatgtcatgggggccgatttgttgggtattaatttcagaaattttccctaataaaatccgtgggcaagctgtagccattgcagtagctgctcaatgggcggctaactatttcatttcatctacatacccaatgatgatggaatatagcgggggactaacatatagtttttatggtttaatgagtgtactttctgccttatttgtctggaagttagttcctgaaacgaaaggtaaaactcttgaacagatggagaatacgtggaaaaaacaaactgaatatataagttaa

SEQ ID NO: 96997 - protein, 468 aa, Bacillus cereus ATCC 10987
MKQKRNSLYIFSITLVAAIGGLLFGYDTAVISGAEESLKVYFIDSLGLGSLAHGVTVSSALIGCIIGGVISGYCASKFGRKRSLIIAAILFIVSALGASYPEFLFFTKGEPTIVLLLAFNLYRIIGGIGVGLASAICPIYIGEIAPADIRGRLVSFNQFMIIFGMLVVYFVNWGIANGETLEWINDVGWRYMFASGVIPAIIFAILLLFVPETPRYLAIQHQDKKALAILTKINGPLEAKAILDDIKQTMAINVSSEKLFSYGKLVIIVGVLLSVFQQFVGINVALYYAPRIFESMGAAKDSSMMQTIIMGLVNVIFTVIAILTVDRWGRKPLLIVGSIGMAIGMFGVASMAFANIIGIGTLIFIIVYTASFMMSWGPICWVLISEIFPNKIRGQAVAIAVAAQWAANYFISSTYPMMMEYSGGLTYSFYGLMSVLSALFVWKLVPETKGKTLEQMENTWKKQTEYIS

SEQ ID NO: 96998 - DNA, 1713 bp, Magnaporthe grisea 70-15
  CDS (1)..(1713)
atgcttggcggcaagtccatcagggtcaatggcgccgagtgcggcgtcgagtctctcttcctcggcgctgtcaccagcctgggtggctttcttttcggttacgacacgggtcagatctcgggcatgctcatcttcgaggactttcagcgccgcttcgccacgggccccgttggggagaatggcatccgggaatgggttcccatcattcagtccaccatggtgtccctgatgagcatcggaacgctcatcggtgctctttctggtgcctacactgccgactggtggggacgtcggaggagtttggcgttcggtgtcatcttgttcatcatcggcaacatcatccagattactgccatggagtcttggattcacatgatgatgggtcgcctgattgctggttttggtattggtaacctgtctgtcggtgtgcccatgttccagtcggagtgtgctccccgtgagattaggggtgccgttgtggccagctaccaactgctcatcactttcggaatcctcatctcaaacatcatcaactacggtgtcaggaacatccagggctccgacgcctcgtggagaatcgtgattggcctgggcatcttcttcagcgtgcctctcggtatcggcatcctgctcgtccccgagtctccccgttggctcgccggacgtcaggactgggatggtgctcgcatgtccatcgctcgtctccgcggcatgaagcacgaccccaacaacgtcctcgtcgagaccgacatcagcgagatgtacaagatcatcaaggaggagtccagcgtcggagtcggcagctgggccgaatgcttcaccggcaagggcggttccgaaggcattcccaaggttgtgtaccgcaccatcttgggcatgttcatgcactttacgcagcagtggaccggtgtaaactacttcttctactacggtgccacgattttccagtctgctggtgtcgacgaccctatcgtcacgcaattgatcctgggcgccgtcaacgtcgccatgaccttcttgggtctgtacattgtcgagaagtttggacgtcgtggtcccctctttattggtggcgcgtggcaggcggtctggctggctgtttttgctgccattggaaccgctctgccgcccacagagaaccgcgtctctggcatcgtcatgattgtgtccgcctgcatgtttattgcttcgttcgccagcacctggggtcccatctgctgggtcgtcatcggcgagaccttcccgctccgcacgcgtgccaagcaggcctcgctgtccacagccggcaactggctgggcaactttatgatttcgttcctcacgcccatcgccaccgacggcatctcgttctcctacggcttcgtgtttgccgccgtcaacttgtgcggtgccctgggcgtgtacttcttcctctacgagtcccgcatgctgtcgctcgagaacgtcgaccgcatgtacggcgacccgtccatcaagccctggaactcgcgcaagtggactccccccggatacatcaaccgccgcaccaaggacgagaagtacgtgcccgagggcgagcacgtccagggcggagtcaggggctcggtcggcagcgacaacaccgccgtccccggcgaggccgacgtcaaccacgaccacgccaagcaaaggcctggtagcgacggcgttcccacgacggagcagcacgagcaggctgtgctccggaacgcgtaa

SEQ ID NO: 96999 - protein, 570 aa, Magnaporthe grisea 70-15
MLGGKSIRVNGAECGVESLFLGAVTSLGGFLFGYDTGQISGMLIFEDFQRRFATGPVGENGIREWVPIIQSTMVSLMSIGTLIGALSGAYTADWWGRRRSLAFGVILFIIGNIIQITAMESWIHMMMGRLIAGFGIGNLSVGVPMFQSECAPREIRGAVVASYQLLITFGILISNIINYGVRNIQGSDASWRIVIGLGIFFSVPLGIGILLVPESPRWLAGRQDWDGARMSIARLRGMKHDPNNVLVETDISEMYKIIKEESSVGVGSWAECFTGKGGSEGIPKVVYRTILGMFMHFTQQWTGVNYFFYYGATIFQSAGVDDPIVTQLILGAVNVAMTFLGLYIVEKFGRRGPLFIGGAWQAVWLAVFAAIGTALPPTENRVSGIVMIVSACMFIASFASTWGPICWVVIGETFPLRTRAKQASLSTAGNWLGNFMISFLTPIATDGISFSYGFVFAAVNLCGALGVYFFLYESRMLSLENVDRMYGDPSIKPWNSRKWTPPGYINRRTKDEKYVPEGEHVQGGVRGSVGSDNTAVPGEADVNHDHAKQRPGSDGVPTTEQHEQAVLRNA

SEQ ID NO: 97000 - DNA, 1584 bp, Gibberella zeae PH-1
  CDS (1)..(1584)
atgaagttttttagtagcaaacgccaagagcatgctgctgagggcgagcatctcgagcggagaaagactcccgacaccgatggtcgcatcaccttcctggcctgcttcatgggccttgtcgcctccatggggggcatgatatttggatacagttctgggcagatttccggttatttcatgatgaaagattatggcgaacgattcggagtacccaacggcgatggtacatacgagttcagcgcggcgcgacaaggaacaatcaccggtcttctctctgttggatgcctgttcggttctctcattgccggtaacctttgcgacaccatcggccgtcgaactaccatctctatctctgctctctggacctgtgtcggtaccgtcattgaggtcgcttcccagcacgcctggtaccaacacgctattggtcgtctcgtcactggtcttggtgtcggtgccctctctgtcgctgtccccatgtaccagtccgagagtgctcctgccatcatccgaggtatcattgtctcctgctaccagctcttcgtcaccctcggtatctggtgtgccgagatggtcaactggggcaccaaccactacgacggcagcgcttcttggaggatccccaacggtctcaacttcctctgggctcttcttctcggagttggcatcctcttcctccccgagtccccccgattcgcctaccgcaagggtaaggaggaggaagctcgcaagaccatcgccaaccttgctggtctcgacatcaactcccccagtgtcaaccgccagattgatgagatccgtgagaagcttgaagaggagcgatctctccctgagacccgctgggttgagatcttcactggtccccgtatgatgtaccgtaccctcctcggcatcactctccaggctggtcagcagctcactggtatcaacttcttcttctacttcggtaccactgtctttgcttccaccggtctcaaggactcctacgtcacccagctcattctcggctcagtcaactgcgcttgcacctttggcggtctctacgtcgtccagaagtgtggtcgccgtatctctctgatgattggtgccgcctggatgatgatgtgcttctttatctacgcctttgttggtcacttcgctcttgaccgcgccgaccctctcaacactcccgccgctggtacagtccttgttaccttctcctgcttggccattgtcgctttcgctaccacctggggtcctcttgtctgggctgtcgtcgccgagatgtacccttcccagtaccgatctcgctgcatggccattgctactgctaccaactggctcttcaacttcctcatcggtttcttcacccgattcatcactgatgccattgactactactacggtctcgtctacgccggatgctgtgccgccctggtcgccattgtcttcttcttcgtcatcgagtccaaggaccgtactctcgaggagattgacaccatgtacgtccagaaggtcaaccccattacctcctccaagtgggttggccacaaccacgcctccaaggccgcccgtgagggtgtcaccgacgaggaagtttcttcctaa

SEQ ID NO: 97001 - protein, 527 aa, Gibberella zeae PH-1
MKFFSSKRQEHAAEGEHLERRKTPDTDGRITFLACFMGLVASMGGMIFGYSSGQISGYFMMKDYGERFGVPNGDGTYEFSAARQGTITGLLSVGCLFGSLIAGNLCDTIGRRTTISISALWTCVGTVIEVASQHAWYQHAIGRLVTGLGVGALSVAVPMYQSESAPAIIRGIIVSCYQLFVTLGIWCAEMVNWGTNHYDGSASWRIPNGLNFLWALLLGVGILFLPESPRFAYRKGKEEEARKTIANLAGLDINSPSVNRQIDEIREKLEEERSLPETRWVEIFTGPRMMYRTLLGITLQAGQQLTGINFFFYFGTTVFASTGLKDSYVTQLILGSVNCACTFGGLYVVQKCGRRISLMIGAAWMMMCFFIYAFVGHFALDRADPLNTPAAGTVLVTFSCLAIVAFATTWGPLVWAVVAEMYPSQYRSRCMAIATATNWLFNFLIGFFTRFITDAIDYYYGLVYAGCCAALVAIVFFFVIESKDRTLEEIDTMYVQKVNPITSSKWVGHNHASKAAREGVTDEEVSS

SEQ ID NO: 97002 - DNA, 1506 bp, Apis mellifera
  CDS (1)..(1506)
atggaaacggaaaacgacaagtcaagcaataaaattcaggagcaggctacaacaagtacgccttcaaatccggtgcaggaggataagaaattgggtttaaacggacgattagcatttgctattgcagctgctgcacttggatcatcatttcaacatgggtacaacactggtgtcgtcaatgcacctcagcagcttattgaagattggatcagtaacttgaagatgaaccgtactggtcaagtaacaaaacaatcagaagtgactatgatatggtcaatagcggtgtcgatattttgtgtaggcggaatgatcggtggttctctggtgggttcgatagccgatcgttttggtagaaagggtggtctgttaataaacaatatcctagttctcttgacagtaattttcgagggctgcgccaaaacagcgaagagttatgaaatgataattataggaagatttctgattggtattaatgcaggattaaacgctggtctggcgcctatgtatttatctgaaatatcacctattcatctacgaggagccgttggaacggtttatcaattagttatcactatgtctattttggtatcacaaattcttggattagaacaaattttgggtacggccgaacaatggcctcttcttctatgtttgacgattgtgcctgcaatattccaagtaattgctcttccattctgtcccgagagcccgaaatatttgttagtcactagaggaaaggatatggaagctcagagagctttagcttggttacgtggcacgatcgaagttcacgatgaaatggaagaaatgaggacggaatatgaatcagtaaaacttgtgccaaaggttacattgaaagaattatttgtaaattctactcttagaattccattaataattgcgcttatggttatgttcgcccaacaattatctggtataaatgctgtaatgttcttctcgacgaaaatttttatgatggcacaattagataaaaatgcggctcaaaatgcgacattgggtgttggagccatgaatgttcttatgacttttatttctttaatacttgttgaaagagctggaagaaaaacattgatgttaattggattttctggaatgtttgtcgatactgccttactcgctatttgccttgcttttgcagaaacatctcgtgcagcagcttatttctcaatcgtattggtaatcatgttcgtagttctgtttgcaactggaccaggtagcataccttggtttttagtatctgaattgtttaatcaatctgcaagacctgcggcaacgtccgttgctatagcagttaattggacggcaaattttatcgtcagtatcggattcctaccgctgcaagaggcactaggtgcttacgtattcattattttcgccgctttacaagcattcttcgttttcttcatttataagaaagtgcccgaaacgaagaacaaaacaatggaggagattagtagcatgttccgacaaatatcgtatcagtaa

SEQ ID NO: 97003 - protein, 501 aa, Apis mellifera
METENDKSSNKIQEQATTSTPSNPVQEDKKLGLNGRLAFAIAAAALGSSFQHGYNTGVVNAPQQLIEDWISNLKMNRTGQVTKQSEVTMIWSIAVSIFCVGGMIGGSLVGSIADRFGRKGGLLINNILVLLTVIFEGCAKTAKSYEMIIIGRFLIGINAGLNAGLAPMYLSEISPIHLRGAVGTVYQLVITMSILVSQILGLEQILGTAEQWPLLLCLTIVPAIFQVIALPFCPESPKYLLVTRGKDMEAQRALAWLRGTIEVHDEMEEMRTEYESVKLVPKVTLKELFVNSTLRIPLIIALMVMFAQQLSGINAVMFFSTKIFMMAQLDKNAAQNATLGVGAMNVLMTFISLILVERAGRKTLMLIGFSGMFVDTALLAICLAFAETSRAAAYFSIVLVIMFVVLFATGPGSIPWFLVSELFNQSARPAATSVAIAVNWTANFIVSIGFLPLQEALGAYVFIIFAALQAFFVFFIYKKVPETKNKTMEEISSMFRQISYQ

SEQ ID NO: 97004 - DNA, 2382 bp, Apis mellifera
  CDS (1)..(2382)
atggccgattcacgcggcttcaagccaataaaccagttgtggcagagcgcggcagtgtcgacggacccggattcggagtgcctctacgaagagatctcgggcctttcggggtcccaggatacggaaccagggccggtcggcggtagcagctggtggaggcaggggaaggggagaagcgagagatcaatcgcctcaggcgggcataccggcacgaccggtcgcaagaaagcgagcaaaagtgttgggactagcgcgagatcgcgcagcagatcggccgatcggccgccgacaaccgggcgtcagggcgacatcatcagggtggaggaggagcagtatgcctcacgaagaagttacgtggagcccggtacaggcgccgtactgccgccacctgtcaccggcctcaagctgaccagggggcgtgcaaccagcaccgtcgcccgctatttgcactcggcctcgaccaacaccggtcattatcaccatcatcaccacgggctgcacggacagtatccgcccggcggcaggccgaccggtaggcatcaccagcatcatcacccaagccgcggctcgttcagtaatgagacgcaggaagaggtacaggaggacgatgaagccactctacgggagttgcttgtaagtctgcagaaacaggtcagcgttatgagtatgaacttgagtgccaagctggacgagctgcagcggggtgaccgccagctggagaccaccgtcgccctctgcgagatccgcacgcagctgcaggagctcaccaagagcgtagagtcttgccagagcgaggtcagcgaggtcaaacgggacatggtcgcgatcaagcacgaactagatacggtacagcaggtgaaagaagagatagaggaattacgagaatacgtggatcgactagaagaacattctcatcgacggaaacttagacttttggagcaggggctaacacttttcctgtcgtatgcaatactggcagcagttttaggaatgttgcagtttggatacaacactggggttattaacgcgccggaagtgaacattgaaaatttcatgaaagatgtgtacaaggatagatacggggaggacatttcagacgattacgtgaagagattgtattccgtggccgtgagcatatttgcgattggtggtatgctaggcggttttagcggagggataattgccaacagatttggcagaaaggggggcttactgctaaacaacgtgctgggcatcgtgggggggtgcctgatgggttttacaaagatggctcactcgtatgaaatgttattctttggacggttcatcatcggtgtcaattgtggcttaaacacctcgttggttcccatgtacatatcggagatagcaccactgaacctgagaggcggcctaggcacggtgaaccagctcgctgttacggtgggcctcctggtctcccaggtgctgggcatcgagcaaatccttggaacagacgagggttggccagttctcttattactagctatctgccctgccattctacagttattgctgcttccagtttgccccgaatctccaagatatttgctcattactaaacagtgggaggaggaagcccgtaaagctttgaggaggttgagagccagtaaccaagtggaagaagacatcgaagaaatgagagccgaagaacgagctcaacaagccgagtctagaatatcgatgacagagctcatatgtagcccaactttgagagcacctcttatcatcggtgtggttatgcaactttcccaacagctttcaggcattaacgctgtattttactattcgacaaatttgtatactagttctggtttgacagaggagagtgccaagtttgcaaccattggcataggttccattatggttgttatgacgttagtatccatccctcttatggataggacaggaagacgtacattgcacttatacggtcttggtggcatgtttatcttttcaatattcatcacaatttcttttctcataaaggaaatgattgactggatgtcttatctgtcggtcgtctcgacgctctttttcgtcgtattttttgccgtgggacccggctccatcccgtggatgatcacggccgaactgttctcgcaaggccccagacctgcggccatgtccatcgcggtcctcgtcaattggatagctaattttgtggttggcatcggttttccaagtatgaagactagccttgaaaactacacgttcctaccattcagtgcattcctagccatcttctggatcttcacgtacaagcaggttcctgagaccaagaataaaacattcgaagaaattctagctttattcaggcatggtaacgacaggagcagcttgcgggacagcagactttatgggtga

SEQ ID NO: 97005 - protein, 793 aa, Apis mellifera
MADSRGFKPINQLWQSAAVSTDPDSECLYEEISGLSGSQDTEPGPVGGSSWWRQGKGRSERSIASGGHTGTTGRKKASKSVGTSARSRSRSADRPPTTGRQGDIIRVEEEQYASRRSYVEPGTGAVLPPPVTGLKLTRGRATSTVARYLHSASTNTGHYHHHHHGLHGQYPPGGRPTGRHHQHHHPSRGSFSNETQEEVQEDDEATLRELLVSLQKQVSVMSMNLSAKLDELQRGDRQLETTVALCEIRTQLQELTKSVESCQSEVSEVKRDMVAIKHELDTVQQVKEEIEELREYVDRLEEHSHRRKLRLLEQGLTLFLSYAILAAVLGMLQFGYNTGVINAPEVNIENFMKDVYKDRYGEDISDDYVKRLYSVAVSIFAIGGMLGGFSGGIIANRFGRKGGLLLNNVLGIVGGCLMGFTKMAHSYEMLFFGRFIIGVNCGLNTSLVPMYISEIAPLNLRGGLGTVNQLAVTVGLLVSQVLGIEQILGTDEGWPVLLLLAICPAILQLLLLPVCPESPRYLLITKQWEEEARKALRRLRASNQVEEDIEEMRAEERAQQAESRISMTELICSPTLRAPLIIGVVMQLSQQLSGINAVFYYSTNLYTSSGLTEESAKFATIGIGSIMVVMTLVSIPLMDRTGRRTLHLYGLGGMFIFSIFITISFLIKEMIDWMSYLSVVSTLFFVVFFAVGPGSIPWMITAELFSQGPRPAAMSIAVLVNWIANFVVGIGFPSMKTSLENYTFLPFSAFLAIFWIFTYKQVPETKNKTFEEILALFRHGNDRSSLRDSRLYG

SEQ ID NO: 97006 - DNA, 1650 bp, Candida glabrata CBS 138
  CDS (1)..(1650)
atgtctgaagaatcacaatctgcattctcagcttccaacagcaaagttgagagagaggaagacttcaaagcttacgctgatgaggatggtcaacccatggttgagattcccaaaaaaccagcttctgcttataccctcatctttatcctctgcttattcatcgctttcggggggttcgttttcggttgggatactggtactatttccggttttgttgctgaggaagacttcatcaaaagattgggtcaaagacgtgccaataacacttactacctatccaaggtcagaactggtctaattgtttctatatttaacattggttgtgctattggcggtgtcgtcttatccaagtttggagatatgtatggacgtaagatcggtttaattattgtcatcgttgtttatattgtcggtatcgtgattcaaattgctactattgacaagtggtaccaatacttcatcggtagaattgtttccggtctgggtgtcggtggtattgcggtattgtctcctatgttgatttccgaagtttctccaaaacatatgagaggtacattggtctcttgctaccagttaatggtgacttgcggtatcttcttgggttattgtaccaactacggtacaaaaaactaccccaactctgtacaatggagagttccactaggtctatgttttgcttgggctctattcatgataggtggtatgctgtgtgttccagaatctccacggtacttagttgaagtcggcaaatttgaagaagctagaagatccattgccatctctaacaaacttacaccagaagatccggcagtcactttcgagttagaaaatgttcaagcaggtgttgaagcagaaagattagctggttctgcttcctggggtgaattgttctctaccaagacgaaggtcttacaacgtttgattatgggcatcatgcttcaatgtttgcaacaattgacaggtgacaactacttcttctactatggtactactgttttcaaggctgttggcttggaagattctttccaaacttcaattgttattggtatcgttaactttgcatccacattcgtagctttgtacgttgttgaccgcttcggtcgtcgtaaatgtctcttgtggggagccgctagcatgactgcttgtatggttgtctttgcatcagttggtgtcaccagattatatccaaacggtatggaccaaccatcctccaagggtgctggtaactgtatgattgttttcacctgtttctacattttctgtttcgcaacaacttgggcaccaactccatgggtcatcaactccgaaacattcccattgagggttaaagccaagtgtatggcaatatgtcaagccgctaactggatctggggtttcttaattgccttcttcactccgttcatcacgggtgctatcaatttctactatggttacgtcttcatgggctgcctatgtttctcctacttctacgttttcttttttattccagaaacaaaaggcttaacattggaggaagtcaacactatgtgggaagaaggcgtcttgccatggaagtctccagattggattccaccatcaaagagagacgccacctatgatgctgatgccatgatgcacgatgataagccatggtaccggagaatgtggtaa

SEQ ID NO: 97007 - protein, 549 aa, Candida glabrata CBS 138
MSEESQSAFSASNSKVEREEDFKAYADEDGQPMVEIPKKPASAYTLIFILCLFIAFGGFVFGWDTGTISGFVAEEDFIKRLGQRRANNTYYLSKVRTGLIVSIFNIGCAIGGVVLSKFGDMYGRKIGLIIVIVVYIVGIVIQIATIDKWYQYFIGRIVSGLGVGGIAVLSPMLISEVSPKHMRGTLVSCYQLMVTCGIFLGYCTNYGTKNYPNSVQWRVPLGLCFAWALFMIGGMLCVPESPRYLVEVGKFEEARRSIAISNKLTPEDPAVTFELENVQAGVEAERLAGSASWGELFSTKTKVLQRLIMGIMLQCLQQLTGDNYFFYYGTTVFKAVGLEDSFQTSIVIGIVNFASTFVALYVVDRFGRRKCLLWGAASMTACMVVFASVGVTRLYPNGMDQPSSKGAGNCMIVFTCFYIFCFATTWAPTPWVINSETFPLRVKAKCMAICQAANWIWGFLIAFFTPFITGAINFYYGYVFMGCLCFSYFYVFFFIPETKGLTLEEVNTMWEEGVLPWKSPDWIPPSKRDATYDADAMMHDDKPWYRRMW

SEQ ID NO: 97008 - DNA, 1707 bp, Candida glabrata CBS 138
  CDS (1)..(1707)
atgcttttctcaaaaaagaaggaagatcctcaggccgttcctgaggcatctccagaaaatgacttttctccatctctatcccaacaagattcatctgcttccccatatgaaaatgatgtcaagaagcttgaagaagaagccgaacaaactccaatagtagacattccaaagaagcctgcttctgcttatgttactgtttctatcttctgtctattcatcgcttttggtggttttgttttcggttgggatactggtaccatttctggtttcgtcgctcaaaccgatttcattagaagattgggtcaaaagcgtgcaaatggtacacactacttgtctaaggttagaactggtttggttgtctctattttcaacattggttgtgccattggtggtgttatcttgtccaaattgggtgatgtgtacggccgtaagcctggtttgattatcgttgtcgttatttatgtcgttggtattattatccagatcgctactattgacaagtggtaccaatacttcatcggtagaattatctccggtttgggtgttggtggtattgctgtcttgtctcctatgttgatttccgaagtctctccaaagcacttgagagcaactctggtggcgtgctaccaactaatgattacattgggtattttcttgggttactgtactaacttcggtaccaagaactactccaactctgtccaatggagagttccattaggtctatgttttgcttgggctatctttatgatcagtggtatgaccttcgttccagaatctccaagatttttggtcgagaaaggtagaattgaggatgccaagagatctattgcgtcttctaacaaggtttcggttgatgatccagctgtcgttgctgaagttgacagtgttcaagctgctgttgaagctgaaagattggctggttctgcttcctggggtgaattgttctcaaccaagaccaagattttccaacgtttggttatgggtatcatgattcaatctttgcaacaattgacaggtgacaactacttcttctactatggtactattgttttcaaggctgttggtttggaagattccttcgagacctccattgttatcggtgttgtcaacttcttctctactttcgttggtattttcttggtcggtagatttggccgtcgtacctgtctattgtggggtgccgctaccatgactgcttgtatggttgttttcgcttctgtcggtgtcaccagactatggcctcacggtaagggtaatggttcttccaagggtgctggtaactgtatgattgtcttcacctgtttctacattttctgtttcgctaccacctgggctccactagctttcgttatctgttctgaaaccttcccattgagagtcaaggccaagtgtatggctcttgctcaagcctctaactggatctggggtttcttgattagtttcttcactcctttcattactgatgctattaacttcaactatggttacgtcttcatgggctgtctatgtttctcctacttctacgttttcttctttgttccagaaaccaagggtctaactttggaagaagtcaacaccatgtgggaagaaggtgtcttgccatggaaggcttctcaatgggttcctccatccagaagaggtgctgattatgatgccgatgctttgatgcacgatgacaccccatggtacaagagattcctataa

SEQ ID NO: 97009 - protein, 568 aa, Candida glabrata CBS 138
MLFSKKKEDPQAVPEASPENDFSPSLSQQDSSASPYENDVKKLEEEAEQTPIVDIPKKPASAYVTVSIFCLFIAFGGFVFGWDTGTISGFVAQTDFIRRLGQKRANGTHYLSKVRTGLVVSIFNIGCAIGGVILSKLGDVYGRKPGLIIVVVIYVVGIIIQIATIDKWYQYFIGRIISGLGVGGIAVLSPMLISEVSPKHLRATLVACYQLMITLGIFLGYCTNFGTKNYSNSVQWRVPLGLCFAWAIFMISGMTFVPESPRFLVEKGRIEDAKRSIASSNKVSVDDPAVVAEVDSVQAAVEAERLAGSASWGELFSTKTKIFQRLVMGIMIQSLQQLTGDNYFFYYGTIVFKAVGLEDSFETSIVIGVVNFFSTFVGIFLVGRFGRRTCLLWGAATMTACMVVFASVGVTRLWPHGKGNGSSKGAGNCMIVFTCFYIFCFATTWAPLAFVICSETFPLRVKAKCMALAQASNWIWGFLISFFTPFITDAINFNYGYVFMGCLCFSYFYVFFFVPETKGLTLEEVNTMWEEGVLPWKASQWVPPSRRGADYDADALMHDDTPWYKRFL

SEQ ID NO: 97010 - DNA, 1692 bp, Candida glabrata CBS 138
  CDS (1)..(1692)
atgaattctcaaccggatttgataagtccacaaaaatcctcttcttcaaatgaggtggattctcatgaatccaaatatctaaaccaagtcggcaagaatgatatggctgacgaatttgttcagaacgaaatgattgccaacccaaacactggtaaaggtgcttttgtcggtgtcattatcagttgtttcatggtcgcttttggtggttttgtctttggatgggataccggtactatttctggttttgtcgcacaaaaggatttcattcacagatttggtatgaagcatcctgacggaactgaatacttatccaaggtcagaactggtttaattgtctctatcttcaatattggttgtgccatcggtggtattattctatctaagcttggtgacactaaaggtcgtaagatgggtttggttgttgtcgttgttatttacatcgttggtatcatcatccaaatcgcttccattaacaagtggtaccaatacttcatcggtagaattatctctggtttgggtgttggtggtatctctgttctatctccaatgttgatttctgaagtcgctccaagtgatctaagaggttctctagtttcttgctaccaattgatgatcacattgggtattttcttgggttactgtactaacttcggtaccaagaactacactaactctgtccaatggagagttccattgggtctatgtttcgcctgggctcttttcatgatcggtggtatgaccttcgttccagaatccccacgttatttggttgaagctggtcaaattgaagaagccagatcatccttggccagaatcaacaaatgttccccagatcacccatacatccaacaagaactagacttaattcaagctagtgttgatgaagctagatctgcaggttctgcttcttggggcgaattatttaccggtaagccagctatgttcagacgtactcttatgggtatcatgattcaatctttgcaacaattgacaggtgacaactacttcttctactatggtactattgttttcaaggctgttggtttagaagattccttcgagacctccattgttttcggtgttgtcaacttcttctccacctgttgctctttgctaactgtcgatcgtttcggtcgtcgtaactgtttactgtatggtgctatcggtatggtctgctgttacgttgtctatgcttctgttggtgtcacaagattatggccccatggtcaaggtaatggctcttccaagggtgccggtaactgtatgatcgtcttctcctgtttctacatcttctgtttcgctaccacctgggctccaatcgcttatgttattatctctgaaactttcccattgagaatcaaggccaaggccatgtccattgcaactgctgctaactggatgtggggtttcttgattgccttcttcactccattcatcaccaatgccattaacttctactacggatatgttttcatgggctgtatggtttttgcatacttctatgttttcttctttgtctcagagacaaagggtttaactctagaagaggttaacgaaatgtatgccgaaggtgttttgccttggaagtcttccaaatgggttcctgcttccagaagaggtgctgattatgatgccgatgctttgatgcacgacgacaccccatggtacaagagagttgttggtagaggttaa

SEQ ID NO: 97011 - protein, 563 aa, Candida glabrata CBS 138
MNSQPDLISPQKSSSSNEVDSHESKYLNQVGKNDMADEFVQNEMIANPNTGKGAFVGVIISCFMVAFGGFVFGWDTGTISGFVAQKDFIHRFGMKHPDGTEYLSKVRTGLIVSIFNIGCAIGGIILSKLGDTKGRKMGLVVVVVIYIVGIIIQIASINKWYQYFIGRIISGLGVGGISVLSPMLISEVAPSDLRGSLVSCYQLMITLGIFLGYCTNFGTKNYTNSVQWRVPLGLCFAWALFMIGGMTFVPESPRYLVEAGQIEEARSSLARINKCSPDHPYIQQELDLIQASVDEARSAGSASWGELFTGKPAMFRRTLMGIMIQSLQQLTGDNYFFYYGTIVFKAVGLEDSFETSIVFGVVNFFSTCCSLLTVDRFGRRNCLLYGAIGMVCCYVVYASVGVTRLWPHGQGNGSSKGAGNCMIVFSCFYIFCFATTWAPIAYVIISETFPLRIKAKAMSIATAANWMWGFLIAFFTPFITNAINFYYGYVFMGCMVFAYFYVFFFVSETKGLTLEEVNEMYAEGVLPWKSSKWVPASRRGADYDADALMHDDTPWYKRVVGRG

SEQ ID NO: 97012 - DNA, 1602 bp, Candida glabrata CBS 138
  CDS (1)..(1602)
atgatcagcggccctaaggaagaacttcaaaaggaggttgaagaagaactgcaccacaaaaagaagagtgacctaatatttgtctccttatgctgtattatggttgcctttggtggttttgtttttggctgggatacaggtactatttctggttttgttaaccaaacagattttctgagaagatttggacaacaaagaagtgatggtacctattacttgtctaatgttagaacaggtttaattgtcgctatctttaatatcggatgtgctattggtggtattaccctttcaaaacttggtgatatttggggaagaagattgggcttggttacggtcgtggttgtatatacaatcggcattgttatccaaatcgcctctattgataaatggtaccagtacttcatcggtagaattatctccggtttaggtgtcggtggtatcgctgtcttgtcaccaatgttaatctctgaggtttctccaaaacaattaagaggtacattagtttcttgctaccaactaatgattacatgtggtatctttttgggctactgtaccaattacggtacaaaaaactactccaactctgtccaatggagagttccattagggttatgtttcgcatgggcattatttatgatatttggtgttatgtgtgttcctgaatctccaagatatcttgtggaagtaggcaagttagaagaagccaagcgttctcttgccagagccaataaaacaactgtagattctccaatcgtccttttggaactggacaaatatcaagcatcagttgaagctgaacgtctggccggctctgcatcatggggagaattagtcacaggtaaaccacaaatgttaagacgtacaatcatgggtatgatgatccagtcgctacaacaattaacgggtgcaaactacttcttctactatggtactaccattttcagagctgttggattagatgattcattccaaactgcaattgttttaggtgttgtcaactttgtttcaacattctatgccttgtatactgtagaccactatggtcgccgtaattgtttaatgtggggttgtgttggtatggtatgttgttacgttgtctatgcctctgttggtgtaacgagactatggccaaatggtgagggtaacggctcttccaaaggtgctggtaactgtatgattgtttttgcatgtttctttattttctgttttgccactacatgggcaccaattgcctatgttattgtctctgagtcatacccactaagaattcgtggtaaggccatgtccatcgctattgctgctaactggatctggggtttcttgattgcttttttcactcctttcatcacatccgccattaatttctattacggatatgtcttcatgggctgtatggtatttgcatacttctacgtctttttctttgtccctgaaacaaaaggattaactctagaagaagttaatcaaatgtatgaagagggtgtacttccatggaagtcatccagttgggtgcctccagacagaagaactgccgagtacaatttggatgactattcccacgatgataagccatggtataagagagtattctcaagaaattga

SEQ ID NO: 97013 - protein, 533 aa, Candida glabrata CBS 138
MISGPKEELQKEVEEELHHKKKSDLIFVSLCCIMVAFGGFVFGWDTGTISGFVNQTDFLRRFGQQRSDGTYYLSNVRTGLIVAIFNIGCAIGGITLSKLGDIWGRRLGLVTVVVVYTIGIVIQIASIDKWYQYFIGRIISGLGVGGIAVLSPMLISEVSPKQLRGTLVSCYQLMITCGIFLGYCTNYGTKNYSNSVQWRVPLGLCFAWALFMIFGVMCVPESPRYLVEVGKLEEAKRSLARANKTTVDSPIVLLELDKYQASVEAERLAGSASWGELVTGKPQMLRRTIMGMMIQSLQQLTGANYFFYYGTTIFRAVGLDDSFQTAIVLGVVNFVSTFYALYTVDHYGRRNCLMWGCVGMVCCYVVYASVGVTRLWPNGEGNGSSKGAGNCMIVFACFFIFCFATTWAPIAYVIVSESYPLRIRGKAMSIAIAANWIWGFLIAFFTPFITSAINFYYGYVFMGCMVFAYFYVFFFVPETKGLTLEEVNQMYEEGVLPWKSSSWVPPDRRTAEYNLDDYSHDDKPWYKRVFSRN

SEQ ID NO: 97014 - DNA, 1659 bp, Candida glabrata CBS 138
  CDS (1)..(1659)
atgtctgatcaagaatcaagatcacaatctgtcttgtcagcctccaacagtaaggctgacagagaagacgaattcaaggcttatgtcgatgaggaaggtcaaccaatggttgaaattccaaagaagcctgcttccgcttacgtctctatttccatcttctgtctattcatcgctttcggtggtttcgttttcggttgggatactggtaccatttctggtttcgttgcccaaactgatttcatcagaagattgggtcaaactcgtgctaatggtactcactacttgtctaaggttagaactggtctagtcgtctccattttcaacatcggttgtgctatcggtggtattgttttgtctaagttgggtgatatgtatggtcgtaagatcggtttgatcagtgtcgttgtcatctacattgtcggtatcgttattcaaattgctaccattgacaagtggtaccaatacttcatcggtagaattatctccggtttgggtgttggtggtattgccgtcttgtctcctatgttgatttctgaagtctctccaaagcacatgagaggttctttggtttcctgttaccaactgatgattacctgtggtatcttcttgggttactgtactaactacggtaccaagaactactccaactctgtccaatggagagttccattgggcctatgtttcgcctgggctctattcatgatcggtggtatgaccttcgttccagaatctccacgttacttgattgaggttggtagagttgaagaagccagaagatccattgctatctctaacaaggtttctccagatgatccagctgtcactttcgaagttgaaaatgtccaagctgctgttgaagctgaaagattggctggttctgcttcctggggtgaattgttctctaccaagactaaggttttccaacgtttgattatgggtatcatgattcaatctttgcaacaattgacaggtgacaactacttcttctactatggtactactgttttcaaggctgttggtttggaagattctttcgaaacctccattgtcattggtattgttaacttcgcttccactttcgttgccttgtacgttgttgaccgtttcggtcgtcgtagatgtctattgtggggtgccgctgctatgactgcttgtatggttgtcttcgcttctgtcggtgtcaccagactatggccaaatggtcaagaccaaccatcctccaagggtgctggtaactgtatgattgttttcacctgtttctacattttctgtttcgctaccacctgggctccaattccatttgttgtcaactctgaaactttcccattgagagttaaggccaagtgtatggctattgcccaagcttccaactggatctggggtttcttgattgccttcttcactccatttattaccaatgccattaacttctactacggttacgtgttcatgggctgtctatgtttctcctacttctacgttttcttcttcattccagagaccaagggtctaactttggaagaagtcaacactttgtgggaagaaggtgtcttgccatggaagtctccaaactgggttccaccatccaagagagatgcttcttacgatgctgacgctatgatgcacgatgacaagccatggtacaagagatttgtttaa

SEQ ID NO: 97015 - protein, 552 aa, Candida glabrata CBS 138
MSDQESRSQSVLSASNSKADREDEFKAYVDEEGQPMVEIPKKPASAYVSISIFCLFIAFGGFVFGWDTGTISGFVAQTDFIRRLGQTRANGTHYLSKVRTGLVVSIFNIGCAIGGIVLSKLGDMYGRKIGLISVVVIYIVGIVIQIATIDKWYQYFIGRIISGLGVGGIAVLSPMLISEVSPKHMRGSLVSCYQLMITCGIFLGYCTNYGTKNYSNSVQWRVPLGLCFAWALFMIGGMTFVPESPRYLIEVGRVEEARRSIAISNKVSPDDPAVTFEVENVQAAVEAERLAGSASWGELFSTKTKVFQRLIMGIMIQSLQQLTGDNYFFYYGTTVFKAVGLEDSFETSIVIGIVNFASTFVALYVVDRFGRRRCLLWGAAAMTACMVVFASVGVTRLWPNGQDQPSSKGAGNCMIVFTCFYIFCFATTWAPIPFVVNSETFPLRVKAKCMAIAQASNWIWGFLIAFFTPFITNAINFYYGYVFMGCLCFSYFYVFFFIPETKGLTLEEVNTLWEEGVLPWKSPNWVPPSKRDASYDADAMMHDDKPWYKRFV

SEQ ID NO: 97016 - DNA, 1650 bp, Candida glabrata CBS 138
  CDS (1)..(1650)
atgtctgaagaatcacaatctgctctctcggcctccaacagcaaagttgaaagagaggacgagttcaaggcttacaccgatgaggatggccaaccaatggttgagatcccaaagaagcctgcttccgcttacgttgctatttccatcttctgtctattcatcgctttcggtggtttcgttttcggttgggatactggtaccatttctggtttcgttgcccaaactgatttcatcagaagaatgggtcaaactcgtgctaatggtactcactacttgtctaaggttagaaccggtttaattgtttctattttcaacatcggttgtgccattggtggtgttgtcttgtccaagctaggtgatgtttacggtcgtaagatcggtttgatcagtgtcgttgtcatctacattgtcggtatcgttattcaaattgctaccattgacaagtggtaccaatacttcatcggtagaattatctccggtttgggtgttggtggtattgccgtcttgtctcctatgttgatttctgaagtctctccaaagcacatgagaggttctttggtttcctgttaccaactgatgattacctgtggtatcttcttgggttactgtactaactacggtaccaagaactactccaactctgtccaatggagagttccattgggcctatgtttcgcctgggctctattcatgatcggtggtatgaccttcgttccagaatccccacgttacttgattgaggttggtagagttgaagaagccagaagatccattgctatctctaacaaggtttctccagatgatccagctgtcactttcgaagttgaaaatgtccaagccggtgttgaagctgaaagattggctggttctgcttcctggggtgaattgttctccaccaagaccaagattttccaacgtttgattatgggtatcatgattcaatctttgcaacaattgacaggtgacaactacttcttctactatggtactactgttttcaaggctgttggtttggaagattctttcgaaacctccattgtcattggtattgttaacttcgcttccactttcgttgccttgtacgttgttgaccgtttcggtcgtcgtagatgtctattgtggggtgccgctgctatgactgcttgtatggttgtcttcgcttctgtcggtgtcaccagactatatcctcacggtatgaaacagccatcatccaagggtgctggtaactgtatgattgttttcacctgtttctacattttctgtttcgctaccacctgggctccaattccatttgttgtcaactctgaaactttcccattgagagtcaaggccaagtgtatggctattgcccaagcttccaactggatctggggtttcttgattgccttcttcactccatttattaccaatgccattaacttctactacggttacgtgttcatgggctgtctatgtttctcctacttctacgttttcttcttcattccagagaccaagggtctaactttggaagaagtcaacactatgtgggaagaaggtgtcttggcttggaagtctccaaactgggttccaccatccaagagagatgcttcttacgatgctgacgctttgatgcacgatgacaagccatggtacaagagattctattaa

SEQ ID NO: 97017 - protein, 549 aa, Candida glabrata CBS 138
MSEESQSALSASNSKVEREDEFKAYTDEDGQPMVEIPKKPASAYVAISIFCLFIAFGGFVFGWDTGTISGFVAQTDFIRRMGQTRANGTHYLSKVRTGLIVSIFNIGCAIGGVVLSKLGDVYGRKIGLISVVVIYIVGIVIQIATIDKWYQYFIGRIISGLGVGGIAVLSPMLISEVSPKHMRGSLVSCYQLMITCGIFLGYCTNYGTKNYSNSVQWRVPLGLCFAWALFMIGGMTFVPESPRYLIEVGRVEEARRSIAISNKVSPDDPAVTFEVENVQAGVEAERLAGSASWGELFSTKTKIFQRLIMGIMIQSLQQLTGDNYFFYYGTTVFKAVGLEDSFETSIVIGIVNFASTFVALYVVDRFGRRRCLLWGAAAMTACMVVFASVGVTRLYPHGMKQPSSKGAGNCMIVFTCFYIFCFATTWAPIPFVVNSETFPLRVKAKCMAIAQASNWIWGFLIAFFTPFITNAINFYYGYVFMGCLCFSYFYVFFFIPETKGLTLEEVNTMWEEGVLAWKSPNWVPPSKRDASYDADALMHDDKPWYKRFY

SEQ ID NO: 97018 - DNA, 1671 bp, Candida glabrata CBS 138
  CDS (1)..(1671)
atgagtagttctaataaagattccgagtcttttgagaattatccttcgcaaaattctgacaacagctacaagagggatgatctggatccagataccctcgagaaggaggccaagatcgaaaaccctaacggtaagagcgcctacatcgcagtgagtatctcctgtgctttggtcgctttcggtggtttcatcttcggctgggataccggtaccatttccggtttcgtcaaccaaactgacttcatcagaagaatcggttccaagcacgctgatggtacctcatacttgtccaaggttagaaccggtctagttgtcggtatcttcaacatcggttgtgccatcggtggtgttgttttgtctaaaatcggtgatactaaaggtcgtaaggccggtctggtgactgtcgtgctaatttacattgtcggtatcgtgattcaaatcgctaccattgacaagtggtaccaatacttcatcggtagaatcatctccggtttgggtgttggtggtatctctgtgctttccccaactctaatttctgaagtcgctcctaaggaattgagaggttctttggtctctctataccaaatcatgatcactttgggtatcttcttgggttactgtactaactacggtaccaagaactactccaactctgtccaatggagagttcctttgggtctatgtttcgcttgggctttgcttatgatcggtggtatgaccttcgttccagaatccccacgttacttgatcgaagccggagatgacgatgctgctcgtaagtctctatgtgctgccaacaagttgccagctgaacacccattcatcgaacaagaattcaccatcttgaaagccaaggtcgaagaagctaatgccgctggtactgcttcttggtccgaattgatcactggtaagcctgctatgttgagacgtaccattatgggtatcatgattcaatctttgcaacaattgactggtgacaactacttcttctactacggtactactgttttcaaggctgttggtttggaagattctttccaaacctctatcgttttcggtgtcgttaacttcttctctaccttcttatctttgttcaccgtcgaccgtttcggtcgtcgtaactgtttgctgtacggtgccgccggtatggtctgctgttacgttgtctacgcttccgttggtgttaccagattatggccaaatggtcaaggtaatggctcttccaagggtgccggtaactgtatgatcgtcttctcctgtttctacatcttctgtttcgctaccacctgggctccaattgcttacgttattatctccgaatccttcccattgagaatcaagaccaaggccatgtccattgcctctgcttccaactggatctggggtttcttgattgccttcttcacaccatttattaccaatgccattaacttctactacggttacgtctttatgggctgtatggtctttgcttacttctacgttttctttttcgtcaacgaaactagaggtttgactttggaagaagtcgatgagatgtacgccgaaggtgttctaccatggaagtcctccaagtgggtcccagaatccgaaagagatgacagctatgacgccgatgctttacttcatgatgacacaccatggtacaagagagtcattggtagaaattaa

SEQ ID NO: 97019 - protein, 556 aa, Candida glabrata CBS 138
MSSSNKDSESFENYPSQNSDNSYKRDDLDPDTLEKEAKIENPNGKSAYIAVSISCALVAFGGFIFGWDTGTISGFVNQTDFIRRIGSKHADGTSYLSKVRTGLVVGIFNIGCAIGGVVLSKIGDTKGRKAGLVTVVLIYIVGIVIQIATIDKWYQYFIGRIISGLGVGGISVLSPTLISEVAPKELRGSLVSLYQIMITLGIFLGYCTNYGTKNYSNSVQWRVPLGLCFAWALLMIGGMTFVPESPRYLIEAGDDDAARKSLCAANKLPAEHPFIEQEFTILKAKVEEANAAGTASWSELITGKPAMLRRTIMGIMIQSLQQLTGDNYFFYYGTTVFKAVGLEDSFQTSIVFGVVNFFSTFLSLFTVDRFGRRNCLLYGAAGMVCCYVVYASVGVTRLWPNGQGNGSSKGAGNCMIVFSCFYIFCFATTWAPIAYVIISESFPLRIKTKAMSIASASNWIWGFLIAFFTPFITNAINFYYGYVFMGCMVFAYFYVFFFVNETRGLTLEEVDEMYAEGVLPWKSSKWVPESERDDSYDADALLHDDTPWYKRVIGRN

SEQ ID NO: 97020 - DNA, 1695 bp, Candida glabrata CBS 138
  CDS (1)..(1695)
atgtcacaagctcaaagtttgtcaccttctgaaagcgccgaaaactccccagtcagggaagtcaatgttgctaacagcttcaaagatgatgacttcattttggagcagaagcaaaccgctgatgtttctgcgatgtccccagaagcagaagcaccacctaaaccaatctcagcctactttactgtgatctgtctatgtttgatgatcgcattcggtggttttgtctttggctgggatactggtactatttctggttttgttgctcagaccgatttcaagagaagatttggacaacaagctgctgatggttcttactacttatctgatgtgagaactggtttgattgttgctattttcaatattggttgtgccattggtggtttgaccttgggtcgtcttggtgatatgtatggtcgtcgtcttggtttgatggctgttattactgtctacgttgttggtattgtaattcaaatctcttctaccactacctggtaccaatattttgttggtagaattgtctccggtcttggtgttggtggtattgctgtgctatccccaaccttaatttctgaaactgctccaaagcatttgagaggtacttgtgtgtcattctaccagttgatgattactttgggtatcttcttgggttactgtacaaactatggtaccaagactcacaccaattctattcaatggagagttcctctaggtctatgttttgcctgggctttgttcatgcttgttggtatgtccatggttcctgaatcaccaagattcttggttgagaagggtagatttgaagaggccagacgctctcttgcccgttctaacaaggtttccatggatgacccaattgtcacagctgaaattgaaaacatcagcgctggtgttgaagctgagaaatctgcaggtaatgcctcttggggtgaattgttttccaccaagggtaagatcttgcaacgtgttgtcatgggtatcatgatccaatctttgcaacaattgactggttgtaactacttcttctactacggtactactattttcaaggctgttggtttagaagattctttccaaacttctattatcttgggtattgtcaactttgcttccacctttgtcgctttgtatgttgttgaccgctttggtcgccgtaagtgtttgctatggggttcctctacaatggctgtctgcatggtcatctttgcttcagttggtgtcaagagtctatatcctaacggtaaggaccaaccatcctccactactgctggtaacgttatgattgttttcacctgtctatacatcttctgttttgcaactacttgggctccaactgcttacgttattgttgccgaaacctacccactacgtgttaaaaaccgtgctatggccattgctgttggtttcaactggatctggggtttcttgattggtttcttcacaccatttattactactgccattaacttctactacggttacgtcttcatgggctgtctagtcttctccttcttctacgtcttcttctttgtttgcgaaactaaaggtttgactttggaagaagtcaatgaaatgtacgaagaaggcgtcttgccatggaagtccgctcaatggctaccaactaccaagagaaccagtggctacgatgtggacgctgctttgcacgatgacaagccatggtacaagagatttgcttag

SEQ ID NO: 97021 - protein, 564 aa, Candida glabrata CBS 138
MSQAQSLSPSESAENSPVREVNVANSFKDDDFILEQKQTADVSAMSPEAEAPPKPISAYFTVICLCLMIAFGGFVFGWDTGTISGFVAQTDFKRRFGQQAADGSYYLSDVRTGLIVAIFNIGCAIGGLTLGRLGDMYGRRLGLMAVITVYVVGIVIQISSTTTWYQYFVGRIVSGLGVGGIAVLSPTLISETAPKHLRGTCVSFYQLMITLGIFLGYCTNYGTKTHTNSIQWRVPLGLCFAWALFMLVGMSMVPESPRFLVEKGRFEEARRSLARSNKVSMDDPIVTAEIENISAGVEAEKSAGNASWGELFSTKGKILQRVVMGIMIQSLQQLTGCNYFFYYGTTIFKAVGLEDSFQTSIILGIVNFASTFVALYVVDRFGRRKCLLWGSSTMAVCMVIFASVGVKSLYPNGKDQPSSTTAGNVMIVFTCLYIFCFATTWAPTAYVIVAETYPLRVKNRAMAIAVGFNWIWGFLIGFFTPFITTAINFYYGYVFMGCLVFSFFYVFFFVCETKGLTLEEVNEMYEEGVLPWKSAQWLPTTKRTSGYDVDAALHDDKPWYKRFA

SEQ ID NO: 97022 - DNA, 1668 bp, Candida glabrata CBS 138
  CDS (1)..(1668)
atgtcacaaagtgccatttcatccacatccgctactgatcctgagagacagaccccagaaactaagctggaaggcgaagatttccaactgaaggccgatgaagccagtattcaaggcgctgagattccaagaaagcccttaggcgcttactggaccgttatgtgtctatgtttaatgattgcctttggtggttttgtctttggttgggatacaggtactatctctggttttgttgctcaaactgatttcaaaagaagattcggtcaaagacactcagatggtacttactacttgtcaaatgttagaactggtctaattgtcgctatatttaatattggatgtgccttcggtggtctaactttaggccgtactggtgatttgtatggccgtaagaaaggtctagtcattgttgtttctgtctatgttgttggtattattattcaaatcgcttcggtagacaaatggtaccagtattttattggtagaattatttctggtctaggtgttggtggtattgccgttctttctccaaccttaatttctgaaacagctcctaaacatctaagaggtacttgtgtttcattctaccaattaatgattactctaggtattttcttgggttactgtacaaactatggtaccaagaattattctaactccgtccaatggagagtcccattgggtctatgttttgcctgggctttgttcatgattggtggtatgtccatggttccagaatctccaagatttttggttgaaaaaggcagattagaagaagccagacgttctattgctatttccaacaagctttccatggatgaccctggtgtaaccttcgaattagatactataagcgcaggtgttgaagctgaaagacttgctggtagtgcctcttggggtgaattattttctaataagggtaagattctacctcgtgttattatgggtgtaatgattcaatctttgcaacaactgacaggtaataactactttttctactatggtaccacaattttcaaggctgtcggtttggaagattcattccagacatccattgtcctaggtattgttaacttcgcttctacatttgtgggtttatggactgtcgagagatttggccgtcgtagatgtttgttgtggggttctgcaactatggctgcttgttttgtcatctttgcttcagtcggtgtaaagagtctgtatcctcacggtagagaccatgcatcctctaagggtgccggtaactgtatgattgttttcacatgtttcttcattttctgttttgctactacttgggctccaattgcctacgttattgtctctgaaacttatccattgcgtgttaagaaccgtgccatggctattgctgttggctctaactggatttggggtttcttgattggtttcttcactccattcattaccagtgcgattaacttctcttatggttatgtattcatgggttgtttggtattctcttacttctatgttttcttctttgtctgtgaaactaagggattaacattagaagaagttaatgatatgtatgaagaaggtgtcttaccatggaagtctccaaactgggttccaccatctagaagagatgcttcttacgatatcgacgctatgatgcacgatgacaagccatggtacaagagattcttgtaa

SEQ ID NO: 97023 - protein, 555 aa, Candida glabrata CBS 138
MSQSAISSTSATDPERQTPETKLEGEDFQLKADEASIQGAEIPRKPLGAYWTVMCLCLMIAFGGFVFGWDTGTISGFVAQTDFKRRFGQRHSDGTYYLSNVRTGLIVAIFNIGCAFGGLTLGRTGDLYGRKKGLVIVVSVYVVGIIIQIASVDKWYQYFIGRIISGLGVGGIAVLSPTLISETAPKHLRGTCVSFYQLMITLGIFLGYCTNYGTKNYSNSVQWRVPLGLCFAWALFMIGGMSMVPESPRFLVEKGRLEEARRSIAISNKLSMDDPGVTFELDTISAGVEAERLAGSASWGELFSNKGKILPRVIMGVMIQSLQQLTGNNYFFYYGTTIFKAVGLEDSFQTSIVLGIVNFASTFVGLWTVERFGRRRCLLWGSATMAACFVIFASVGVKSLYPHGRDHASSKGAGNCMIVFTCFFIFCFATTWAPIAYVIVSETYPLRVKNRAMAIAVGSNWIWGFLIGFFTPFITSAINFSYGYVFMGCLVFSYFYVFFFVCETKGLTLEEVNDMYEEGVLPWKSPNWVPPSRRDASYDIDAMMHDDKPWYKRFL

SEQ ID NO: 97024 - DNA, 1665 bp, Debaryomyces hansenii CBS767
  CDS (1)..(1665)
atgtctcaagaagaatatagttctggggtacaaaccccagtttctaaccattctggtttagagaaagaagagcaacacaagttagacggtttagatgaggatgaaattgtcgatcaattaccttctttaccagaaaaatcagctaaggattatttattaatttctttcttctgtgtattagttgcatttggtggttttgttttcggtttcgatactggtactatctcaggtttcgttaacatgagtgattacttggaaagattcggtgagcttaatgcagatggtgaatatttcttatctaatgttagaactggtttgattgttgctatttttaatgttggttgtgctgtcggtggtattttcttatctaagattgctgatgtttatggtagaagaattggtcttatgttttccatgattatttatgtgattggtataattgttcaaatctcagcttctgacaagtggtatcaaatcgttgttggtagagctattgcaggtttagctgttggtaccgtttctgtcttatccccattattcattggtgaatcagcacctaaaaccttaagaggtactttagtgtgttgtttccaattatgtattaccttaggtatcttcttaggttactgtactacatatggtactaaaacctacaccgactctagacaatggagaattccattaggtttatgttttgtttgggctatcatgttggttattggtatggtttgcatgccagaatcaccaagatacttagttgtcaagaacaagattgaagaagctaagaaatcgattggtagatccaacaaggtttcaccagaagatcctgctgtttacaccgaagtccaattgattcaagcaggtattgaaagagaaagtttagctggttctgcctcttggaccgaattggttactggtaagccaagaatctttcgtagagtcattatgggtattatgttacaatctttacaacaattgactggtgacaactatttcttctactatggtactactattttccaagctgtcggtatgactgattccttccaaacatctattgttttaggtgttgttaactttgcatctacatttctcggtatctacacaattgaaagattcggtagaagattatgtttgttaactggttctgtctgtatgttcgtttgtttcatcatttactccattttgggtgttacaaacttatatattgatggctacgatggtccaacttcggttccaaccggtgatgcgatgattttcattactaccttatacattttcttcttcgcatccacctgggctggtggtgtctactgtatcgtttccgaaacatacccattgagaattagatctaaggccatgtccgttgccaccgctgctaactggatttggggtttcttgatctctttcttcactccattcatcacctcggctatccacttctactacggtttcgttttcacaggatgtttgttattctcgttcttttacgtttacttctttgttgttgaaactaagggattaactttagaagaagttgatgaattgtatgcccaaggtgttgccccatggaagtcatcgaaatgggttccaccaaccaaggaagaaatggcccattcttcaggatatgctgctgaagccaaacctcacgatcaacaagtataa

SEQ ID NO: 97025 - protein, 554 aa, Debaryomyces hansenii CBS767
MSQEEYSSGVQTPVSNHSGLEKEEQHKLDGLDEDEIVDQLPSLPEKSAKDYLLISFFCVLVAFGGFVFGFDTGTISGFVNMSDYLERFGELNADGEYFLSNVRTGLIVAIFNVGCAVGGIFLSKIADVYGRRIGLMFSMIIYVIGIIVQISASDKWYQIVVGRAIAGLAVGTVSVLSPLFIGESAPKTLRGTLVCCFQLCITLGIFLGYCTTYGTKTYTDSRQWRIPLGLCFVWAIMLVIGMVCMPESPRYLVVKNKIEEAKKSIGRSNKVSPEDPAVYTEVQLIQAGIERESLAGSASWTELVTGKPRIFRRVIMGIMLQSLQQLTGDNYFFYYGTTIFQAVGMTDSFQTSIVLGVVNFASTFLGIYTIERFGRRLCLLTGSVCMFVCFIIYSILGVTNLYIDGYDGPTSVPTGDAMIFITTLYIFFFASTWAGGVYCIVSETYPLRIRSKAMSVATAANWIWGFLISFFTPFITSAIHFYYGFVFTGCLLFSFFYVYFFVVETKGLTLEEVDELYAQGVAPWKSSKWVPPTKEEMAHSSGYAAEAKPHDQQV

SEQ ID NO: 97026 - DNA, 1737 bp, Debaryomyces hansenii CBS767
  CDS (1)..(1737)
atgtttaagcaggagaatggaaaaaaactagaatcaaccagacaactggtcgataatggttctaattcaagcaacaatactgctaacgggtcctttacggcgaaggataaaattgacagtaatgaccttgaaaatcatgaaactccagaagatccagatcaaattccatctacaaacgaaattgttgaaaatttacctaccttacctgaaaaatctactaaagattatttatctacatcgtttttctgtttattgattgctttcggtggttttgtctttggctatgatacgggtacgatttctggctttgtgaatatgacggactttaaaaggaggtttggtactcttgataatggagaatatattttaaccaatattagaacaggtcttattgttgcgatttttaatattggttgtgcagttggtggtatttttctctccaaagttggtgacatatatgggcgtcgtgttggccttatgttttcgatgcttatttatattgttggtactattattattattgcagctagcgataaatggtatcaagtggttattggaagggctattactggattggctgtcggctgtgtttcagttctctccccaatgttcattggagaatctgcaccaaaggtattaagaggtacgttggtttgttgcttccaactcttcattactttaggtattttcttagggtattgcaccacctacggtactaaggtatatgatgattctcgtcaatggagaattccactgggcttatgttttgcatgggcaatctttttaactattggtatgatttgtatgccagagtcacctcgttatttgattgaaaaaaacaaaattgaagaagctaaaaaatctatcggtatttccaataaggtatcggcggagcatccagctgtctacactgaaattcaattaatccaagcaggtattgatagagaaaagttggcaggttcagcttcttggactcaattaattactggtaaaccaagaattttcagtcgtgttatcactggtattgtcttgcagtcgattcaacaattaacaggtaacaattatttcttttactatggtacgactatttttcaagctgttggattaaatgattcttttcaaacttctattattttaggtgttgttaatttttcttcaacttttgtcggtatttacagtattgaaaaattaggtagaagagtctgtttgttgactggttctgttgcctgtagtatctgtttcatcatttattcggtattgggatccgtcgctttgtatcctgagggctatgatggtccaacagataagccatcaggtaatgcgttgattttcattacctgcttattcattttctcattcgcctcgacttgggctggtggtgtctataccatcgtatcagaaatttacccgttgaggattagatcaaaggcaatggctgtagctactgcggcaaattggatctggggtttcttgatttcatttttcacacctatgatcactgctgcaattcatttctactatggttttgttttcacaggttgtttaattttctcattcttttatgtttacttctttgtttatgaaactaaagggttatcattggaagaagttgatgaattgtattctctgaaaataccagcatggaaatcttcagactgggttccaccatctacagataatatggcacatgataccgggttcgcatccgaagcgaaaccttctgatgaacaagtatag

SEQ ID NO: 97027 - protein, 578 aa, Debaryomyces hansenii CBS767
MFKQENGKKLESTRQLVDNGSNSSNNTANGSFTAKDKIDSNDLENHETPEDPDQIPSTNEIVENLPTLPEKSTKDYLSTSFFCLLIAFGGFVFGYDTGTISGFVNMTDFKRRFGTLDNGEYILTNIRTGLIVAIFNIGCAVGGIFLSKVGDIYGRRVGLMFSMLIYIVGTIIIIAASDKWYQVVIGRAITGLAVGCVSVLSPMFIGESAPKVLRGTLVCCFQLFITLGIFLGYCTTYGTKVYDDSRQWRIPLGLCFAWAIFLTIGMICMPESPRYLIEKNKIEEAKKSIGISNKVSAEHPAVYTEIQLIQAGIDREKLAGSASWTQLITGKPRIFSRVITGIVLQSIQQLTGNNYFFYYGTTIFQAVGLNDSFQTSIILGVVNFSSTFVGIYSIEKLGRRVCLLTGSVACSICFIIYSVLGSVALYPEGYDGPTDKPSGNALIFITCLFIFSFASTWAGGVYTIVSEIYPLRIRSKAMAVATAANWIWGFLISFFTPMITAAIHFYYGFVFTGCLIFSFFYVYFFVYETKGLSLEEVDELYSLKIPAWKSSDWVPPSTDNMAHDTGFASEAKPSDEQV

SEQ ID NO: 97028 - DNA, 1602 bp, Yarrowia lipolytica CLIB122
  CDS (1)..(1602)
atgtccactagtgctatgaccgacgattatcccatggctgaggtctccattactgaggagaccaagatgcctgagcctgccaagaaatcgcagcttcttgtcattctgctctgtctctttgccgccatgggcggttttgtctttggctatgacactggtaccatttctggcttcatcaacatggaccctttcctagagagctttggagaagccgatgagtctggcgttttctttctatcccgaatccgagctgggctcattgttggactcttttccattggtgctttccttggcacccttcttggtggcttccttgctgacaaggttggtcgaaagaagggaattgtctatgtcgccatggtctacattgttggtatgcttatccagatcacagccttcacagcctggtaccagattgccattggtcgtgtcatcggtggtgttggtattggtgcactctctgtgctggtccccatgttccagtcagagactgctccccagaatcttcgaggcgctcttgtctcttctttccagctgtttattactctcggcatcttcattggatttagtgtttgctacgctaccaagtcgcggctcgataccggtgcctaccgaatccccatgggtctttgcttcgcctgggcttttatccttctcattggcatgtgcttcatgccagagtcccctcgattcctggtttcaattggccgcattgaggaggcccgaaaggctatggccatgacaaaccaggttcctctccacgacgctgtcattgatgaggaactcaaggctattgagaactctgtcattagggaaaagagtgctggtaaggccacatggaaagaacttttcactggcgagccccgaatgggctaccggcttacccttggtattctcgtccaggttctccagcagctctgtggtgccaactactttttctattacggaacttctatcttcaaggccattggaatgtcggattctttcgctacttcgatgatctttggcggaatcaacctcctgtctacctttggaggtctctacattgttgatcgattcggtcgacgaaagtgccttcttggtggagccatggtcatgtttgtctgtttcctcgtctattctactgtcgggttcgctgctctttatcccaacggtgataccacccttcccgccagaaaggctgttggtgatgtcatgattctgttcacctgtatcttcatcgccgctttcgcctctacgtgggcccctattgccttcgtcgttgtttctgagaccttccctctcagaatgcgatcaaagggaatggctgttgctactggaggaaactggatgatcaacttcctcgtttctttcctgactcccttcatcaccagttccattgggttcaagtacggttatgtcttcactgcttgcattggtttcgccattatctttgtcttcttcttcatccctgagaccaagggtctgtcccttgaggatgttgacgagctgtacgcttcaggtgtcagtgctcgaaactcccccaactgggttccttcttccaagaagcaggaagtcaacgaacctaagaacagtatgaccgacttctccgagtcctcttag

SEQ ID NO: 97029 - protein, 533 aa, Yarrowia lipolytica CLIB122
MSTSAMTDDYPMAEVSITEETKMPEPAKKSQLLVILLCLFAAMGGFVFGYDTGTISGFINMDPFLESFGEADESGVFFLSRIRAGLIVGLFSIGAFLGTLLGGFLADKVGRKKGIVYVAMVYIVGMLIQITAFTAWYQIAIGRVIGGVGIGALSVLVPMFQSETAPQNLRGALVSSFQLFITLGIFIGFSVCYATKSRLDTGAYRIPMGLCFAWAFILLIGMCFMPESPRFLVSIGRIEEARKAMAMTNQVPLHDAVIDEELKAIENSVIREKSAGKATWKELFTGEPRMGYRLTLGILVQVLQQLCGANYFFYYGTSIFKAIGMSDSFATSMIFGGINLLSTFGGLYIVDRFGRRKCLLGGAMVMFVCFLVYSTVGFAALYPNGDTTLPARKAVGDVMILFTCIFIAAFASTWAPIAFVVVSETFPLRMRSKGMAVATGGNWMINFLVSFLTPFITSSIGFKYGYVFTACIGFAIIFVFFFIPETKGLSLEDVDELYASGVSARNSPNWVPSSKKQEVNEPKNSMTDFSESS

SEQ ID NO: 97030 - DNA, 1653 bp, Aspergillus nidulans FGSC A4
  CDS (1)..(1653)
atgggtgtcgagtcttcttcttaccatggggagtctatcaccccggctcctgctccccagccgcaacaatactccagccaggagtcgattgggagcaccaagcctgaacccggggtcgatactcctatcccccgcatcactttgcgagccaccatcatgggcttgttcgtctccatgggtggcttgcttttcggatacgacactggtcagatctctggtttccaggaaatgtctgacttccttgaacgttacggtgaactccagtccgatggttcatattccttcagccacgtccggtccggtctgattgtcagtcttctgtctatcggaacgcttattggtgctctctgtggtgctcctctcgctgataagctgggccggaaatggtccatcactgtctggtgtattatcctcatggtcggaatcattgttcagatttccgccccttccggtaactgggtccaaatcgtcatgggccgctggaccactggtcttggtgtcggcggatgctccctggttgttcccatgtaccaaggagagagtgcccccaagcacgtccgtggtgccatgatcagttcctaccagctgttcgtcacgcttggtatcttcctagcatactgtatcaaccttggaacggagagcttggatggtagtgcccaatggcgtatcactctaggtctgaccttcctgttcgcactcatccttggtctcggcatggccatgtttcctgaaagccctcgcttcaactaccgtcacggcaagattgacactgcccgtacgactatggcccgtctttatggtgtcccagagaaccacgtcgtcatcgtccgcgagctggctgaaatccaatcgcagctcgacgctgaaaaggagcagtcccagaaatggaacgaattcatcaccgccccacgcatgctgtaccgtattcttctgggtattgttctccaagctctgcagcagctcactggcgccaactacttcttctactatggtaccaccatcttccagggtgccggtatctccaactctttcatcactcaggtcattctcggagctatcaattttggaaccacctttggtggtctctacgttgttgagaactttggtcgccgcaagtccctcattgctggtgcttccttgatgttcatctgcttcatgatcttcgcctccatcggacactttatgctcgacgttgagcaccctgagaacacccccggacccggcaagggcatggttgtcgtcgcctctttcttcgttctcttctacgctacgacctggggtcccatcgtctggtccatcgttgctgagctcttcccctccaaataccgtgccaagggtatggctctcgccactgcttccaactggctttggaacttcctcattggttgccttagtttcttcactcccttcatcaccggagccatcgatttcgcgtacggctacgtcttcgcgggctgtctcctcgtcgctgtcttcgtggtctacttcttcgttattgagggtaaagaccgaactctcgaggagctcgactggatgtacgtcaaccacgtcaaaccctgggagagcagcaagtacgagatcccgcggatcacctaccacgatgacgctcgcggagccaggaaggagaatactgagcacgctgaagttgcttag

SEQ ID NO: 97031 - protein, 550 aa, Aspergillus nidulans FGSC A4
MGVESSSYHGESITPAPAPQPQQYSSQESIGSTKPEPGVDTPIPRITLRATIMGLFVSMGGLLFGYDTGQISGFQEMSDFLERYGELQSDGSYSFSHVRSGLIVSLLSIGTLIGALCGAPLADKLGRKWSITVWCIILMVGIIVQISAPSGNWVQIVMGRWTTGLGVGGCSLVVPMYQGESAPKHVRGAMISSYQLFVTLGIFLAYCINLGTESLDGSAQWRITLGLTFLFALILGLGMAMFPESPRFNYRHGKIDTARTTMARLYGVPENHVVIVRELAEIQSQLDAEKEQSQKWNEFITAPRMLYRILLGIVLQALQQLTGANYFFYYGTTIFQGAGISNSFITQVILGAINFGTTFGGLYVVENFGRRKSLIAGASLMFICFMIFASIGHFMLDVEHPENTPGPGKGMVVVASFFVLFYATTWGPIVWSIVAELFPSKYRAKGMALATASNWLWNFLIGCLSFFTPFITGAIDFAYGYVFAGCLLVAVFVVYFFVIEGKDRTLEELDWMYVNHVKPWESSKYEIPRITYHDDARGARKENTEHAEVA

SEQ ID NO: 97032 - DNA, 1755 bp, Aspergillus nidulans FGSC A4
  CDS (1)..(1755)
atgaagaagttatcaacaatatttcttaataaccgatctgaggaagcgcaatgtcgtcttggccgctcgggggagcagcaccatcaggagcagctcgatagagagaagcaagatgaaatgaatgaaagtcctgtaccattcgtgacctggcgatctctagctctaggtgcctttgtttccataggaggcattatattcggctatgacactggtcagatctccggctttctcgaaatggacaattttaaacgacgattcggccagcggcagctggatggaacttacgctttcaataacgtgcgatcagggctgatagtgtccatgttgtccatcggtacgcttctgggagccctgatggctggtccactggctgaccggcttggccgcaaatggtccattgcattttggtgcattattcttcatgttggcctcatcattcagatctcgtcgccacaccctaagtggtaccaattcatgatgggtcgtttcgtgaccggttttggtgtgggcgcttgctctttactagtgccattatatcaaggcgagacatccccaaaacagatacgtggggccatggtctgctcgtaccaattgttcgttaccctgggtatctttgttgcctactgcataaactatgggacagagggcatgagcaactcggcatcctggcgtattcctctcggaatcacgtttctgtgggctttgcttctcggtattggaatcatatttttcccagagagccctcgctatgacttcaggcacgggcgcgcggacaaagcccgacaaaccatgtcaaaactttatggcgtgccccagaaccaccgggctatcatagaggaacttactgagattagggaacaactcgaggctgaaagctcctccagaggtggttttcatgggtggatagagatgttccaggggcctcggatgttttatcgcataaccctaggcattgtactgcaggcactacaacagctgactggagctaactatttcttctattacggtacaactgtcttcaatggagcgggtatctcaaacgtgtttgtcacgcagatgatcttgggcggagtgaacttcggcactactttcttcggcctttatgttgtcgagcattttggaagacgaaaaagtttggtgacaggaggaatatggatgtttgtgaatttcatggtttttgcctcagttggccacttttctctgaatgtggaagatccttctgctactcctggcgctggcaaggcaatggttgtcttcgcctgtttgtttattactggtttcgcgactacgtggggccccatgatttgggctatcgtggcagagctttacccatcccgctatcgagctaaggctatggccatggccacggcttcgaactggctgtggaattttcttattgggcatcgggaaatcaggttctttacgccctttatcacgggagatatcgatttcgcttatggctatgtgttcgccggctgccttttcgcagccatactcatagtctacttctttgtactcgagggcaaagggaagacgcttgaagaaatggacatgatgtatgtgatgcgcgtacctccctggaaaagcagcaaatgggtccctccccccccggaagaacgcgtaacaacggcgcatattctggaccagcgagcggcccgtgaatttgccaatgaagatgagtcgagcaaaagaaaccaggtgccagcacatcagcatattgaccaaaatgatgctggagttgggccgtcggcgtaa

SEQ ID NO: 97033 - protein, 584 aa, Aspergillus nidulans FGSC A4
MKKLSTIFLNNRSEEAQCRLGRSGEQHHQEQLDREKQDEMNESPVPFVTWRSLALGAFVSIGGIIFGYDTGQISGFLEMDNFKRRFGQRQLDGTYAFNNVRSGLIVSMLSIGTLLGALMAGPLADRLGRKWSIAFWCIILHVGLIIQISSPHPKWYQFMMGRFVTGFGVGACSLLVPLYQGETSPKQIRGAMVCSYQLFVTLGIFVAYCINYGTEGMSNSASWRIPLGITFLWALLLGIGIIFFPESPRYDFRHGRADKARQTMSKLYGVPQNHRAIIEELTEIREQLEAESSSRGGFHGWIEMFQGPRMFYRITLGIVLQALQQLTGANYFFYYGTTVFNGAGISNVFVTQMILGGVNFGTTFFGLYVVEHFGRRKSLVTGGIWMFVNFMVFASVGHFSLNVEDPSATPGAGKAMVVFACLFITGFATTWGPMIWAIVAELYPSRYRAKAMAMATASNWLWNFLIGHREIRFFTPFITGDIDFAYGYVFAGCLFAAILIVYFFVLEGKGKTLEEMDMMYVMRVPPWKSSKWVPPPPEERVTTAHILDQRAAREFANEDESSKRNQVPAHQHIDQNDAGVGPSA

SEQ ID NO: 97034 - DNA, 1653 bp, Candida albicans SC5314
  CDS (1)..(1653): transl_table=12
atgtcattagataattcaacagaaaaccgtgatttggaagaaaaggaagaaattccaaagaacgaacataacgaacaaggcgaacaaaacgagaacaatgagcatatacctactttggaagataaaccattgaaggaatatattggtattagtattttgtgtttccttattgcctttggtggtttcgttttcggtttcgatactggtaccatttctggtttcattaacatgactgactttttagaaagatttggtggtactaaagctgacggtactctttacttttccaacgttagaactggtttattgattggtttgttcaatgtgggttgtgccattggtgcattattcttgtctaaagtcggtgatatgtatggtagaagagttggtatcatgactgctatgatcatttatattgttggtattattgttcaaattgcttctcaacatgcttggtatcaaatcatgattggtagaattatcactggtcttgctgttggtatgttatcagttttgtgtccattatttatctcagaggtttctcccaaacatttaagaggtacattagtttattgtttccaattgatgattaccttgggtattttcttgggttactgtaccagttacggtactaagaaatattctgactccagacaatggagaattccattgggtttatgctttgcttgggccttgtgtttgcttggtggtatggtaagaatgccagaatctccacgttaccttgtcggtaaagatagaattgacgatgctaagatttcacttgccaaaactaacaaggtttctccagaggaccctgcattataccgtgaacttcaattaatccaagctggtgttgaaagagaaagattggccggtaaggcatcttggggtgctttaatcactggtaaaccaagaatccttgaaagagttattgttggaggtatgttgcaatcattgcaacaattgactggtgataactatttcttctactacagtaccaccattttcaagtctgtcggtttaaatgattccttcgaaacatctattatccttggtgtcatcaactttgcttccacttttgttggtatttatgccattgaaagattgggtagaagactctgtttattaactggttccgttgccatgtccatttgtttcttaatttactcattgattggtactcaacatctttacattgatcaaccaggtggtccaaccagaaaaccagatggtaacgctatgattttcattactgcactttatgttttcttcttcgcttctacatgggctggtggtgtctactccattgtttctgaactttatccattaaaagtcagaagtaaggctatgggttttgctaatgcatgtaactggttgtggggtttcttgatttccttcttcacttcatttatcactgatgctatccacttctattatggttttgtgtttatgggctgtttagtgttttccattttctttgtttactttatgatttacgaaactaaaggtcttactttagaggaaattgatgaattatactctaccaaggttgttccatggaaatcagccggttgggttccaccttctgacgaagaaatggttcgtgcaaaaggctatactggtgatatccacgcagatgaagagcaagtttaa

SEQ ID NO: 97035 - protein, 550 aa, Candida albicans SC5314
MSLDNSTENRDLEEKEEIPKNEHNEQGEQNENNEHIPTLEDKPLKEYIGISILCFLIAFGGFVFGFDTGTISGFINMTDFLERFGGTKADGTLYFSNVRTGLLIGLFNVGCAIGALFLSKVGDMYGRRVGIMTAMIIYIVGIIVQIASQHAWYQIMIGRIITGLAVGMLSVLCPLFISEVSPKHLRGTLVYCFQLMITLGIFLGYCTSYGTKKYSDSRQWRIPLGLCFAWALCLLGGMVRMPESPRYLVGKDRIDDAKISLAKTNKVSPEDPALYRELQLIQAGVERERLAGKASWGALITGKPRILERVIVGGMLQSLQQLTGDNYFFYYSTTIFKSVGLNDSFETSIILGVINFASTFVGIYAIERLGRRLCLLTGSVAMSICFLIYSLIGTQHLYIDQPGGPTRKPDGNAMIFITALYVFFFASTWAGGVYSIVSELYPLKVRSKAMGFANACNWLWGFLISFFTSFITDAIHFYYGFVFMGCLVFSIFFVYFMIYETKGLTLEEIDELYSTKVVPWKSAGWVPPSDEEMVRAKGYTGDIHADEEQV

SEQ ID NO: 97036 - DNA, 1641 bp, Candida albicans SC5314
  CDS (1)..(1641): transl_table=12
atgtctcaagacaacgtctcatcaacatctacagctgaggctgtaaataatgaaatcaaagtcaaagatgaatttcgacaagaagaacaagctcatactagtttagaagataaacctgtgagtgcatacattggtatcatcattatgtgtttccttattgcctttggtggtttcgtttttggtttcgatactggtactatttccggtttcattaatatgtctgactttttagaaagattcggtggtactaaagctgacggtactctttacttttccaatgtcagaactggtttaatgattggtttgttcaacgctggttgtgccattggtgcattattcttgtctaaagtcggtgatatgtatggtagaagagttggtatcatgactgctatgattgtctatattgttggtattattgttcaaattgcttctcaacatgcttggtatcaagtcatgattggtagaattatcactggtcttgccgttggtatgttatcagttttatgtcctttgttcatttccgaggtttctccaaaacatttgagaggtactttggtgtgctgtttccaattgatgattaccttgggtatcttcttgggttattgtactacctatggtactaagagttactcagactctagacaatggagaattccattaggtttatgttttgcttgggctttatgtttggttgctggtatggttagaatgccagaatctccacgttaccttgtcggtaaagacagaattgaagatgctaaaatgtcacttgctaaaactaacaaagtttccccagaggacccagccttataccgtgaacttcaattaattcaagctggtgttgaaagagaaagattagccggtaaggcatcttggggtactttattcaatggtaaaccaagaatctttgaaagggttgttgttggtgtcatgttacaagccttacaacaattgactggtgataactatttcttctactacagtaccactattttcaagtccgttggtatgaatgattctttccaaacttctatcattattggtgttattaactttgcgtccacttttgttggtatttatgctattgaaagaatgggtagaagactctgtttgttaactggttccgttgccatgtctgtctgtttcttaatctattccttggttggtactcaacatctttatattgacaaaccaggtggtgctagtagaaaaccagatggtgatgccatgatctttatgacttcactttatgtgttcttctttgcttctacatgggctggtggtgtttactccattatttctgaactttatccattgaaagttagaagtaaggctatgggtttagctaatgcttccaattggacctggggtttcttaatttctttctttacttcatttattactgatgctatccacttctactacggtttcgtctttatgggatgtttagttttctccattttctttgtctactttatggtttacgaaactaaaggtcttaccttggaagaaattgatgaattgtactccaccaaagtccttccatggaaatcagctggttgggtgccaccttccgaagaagaaatggcaacctctacgggatatgctggtgatgccaaaccagaagaggaacacgtttaa

SEQ ID NO: 97037 - protein, 546 aa, Candida albicans SC5314
MSQDNVSSTSTAEAVNNEIKVKDEFRQEEQAHTSLEDKPVSAYIGIIIMCFLIAFGGFVFGFDTGTISGFINMSDFLERFGGTKADGTLYFSNVRTGLMIGLFNAGCAIGALFLSKVGDMYGRRVGIMTAMIVYIVGIIVQIASQHAWYQVMIGRIITGLAVGMLSVLCPLFISEVSPKHLRGTLVCCFQLMITLGIFLGYCTTYGTKSYSDSRQWRIPLGLCFAWALCLVAGMVRMPESPRYLVGKDRIEDAKMSLAKTNKVSPEDPALYRELQLIQAGVERERLAGKASWGTLFNGKPRIFERVVVGVMLQALQQLTGDNYFFYYSTTIFKSVGMNDSFQTSIIIGVINFASTFVGIYAIERMGRRLCLLTGSVAMSVCFLIYSLVGTQHLYIDKPGGASRKPDGDAMIFMTSLYVFFFASTWAGGVYSIISELYPLKVRSKAMGLANASNWTWGFLISFFTSFITDAIHFYYGFVFMGCLVFSIFFVYFMVYETKGLTLEEIDELYSTKVLPWKSAGWVPPSEEEMATSTGYAGDAKPEEEHV

SEQ ID NO: 97038 - DNA, 1623 bp, Candida albicans SC5314
  CDS (1)..(1623): transl_table=12
atgtcctcaactaattcaacagaaaaccatgctgtggaggagaagtatgaagatccacaacaacaacaacaacaaaaagatgccttggccaaaaagcctatgtctgcgtatattggtatcagtataatgtgtgttcttattgcctttggtggttttgttttcggtttcgataccggtaccatttctggttttattaatatgtctgactttttagaaagattcggtggtactagagctgacggtactctttacttttccaatgtcagaactggtttattaattggtttgttcaatgtgggttgtgccattggtgcattgtttttatctaaaatgggtgacatgtacggtagaagagtcggaattatgggagcaatggtcatttatattgttggtattattgtccaaattgcttctcaacatgcttggtatcaagttatgattggtagaatcattactggtcttgctgttggtatgttatcagttttgtgtccattatttatctcagaagtctcaccaaaacatttgagaggtactttggtgtgctgttttcaattgatgattaccttgggtattttcttgggttactgtactacttatggtactaagacctattcagactccaggcaatggagaattccattgggtttatgttttgcttgggccttgtgtttgcttggtggtatggttagaatgccagaatccccacgttaccttgttggtaatgacagaattgaagatgccaagatttcacttgccaaaactaacaaagtttccccagaggacccagccttataccgtgaacttcaattaatccaagctggtgttgaaagagaaagattggctggttcagcatcatggaaatcattgataaccggtaaaccaagaattcttgaaagagtctttgtgggtgccatgttacaatcgttgcaacaattgactggtgataactatttcttctactacagtaccaccattttcaagtctgtcggtttaaatgactctttccaaacgtccatcattattggtgtgattaactttgcgtccacttttgttggtatctacgctattgagaaattaggtagaagacattgtttgttaatcggttccgttgcgatgtccatttgtttcttaatttactcattgattggtactcaacatctttacattgacaaaccaggtggtgctagtagaaaaccagatggtgatgctatgattttcattactgcactttacgttttcttcttcgcttctacatgggctggtggtgtttattcgatcatgtcagaactttatccattgaaggttagaagtaaggccatgggtatagctagtgcttctaactggttatggggtttcttgatttctttctttacttcattcattactgatgctatccacttctattatggttttgtgtttatgggctgtttagtgttttccattttctttgtttactttatggtttatgaaactaaaggtcttactttagaggaaattgatgaattatactctactaaggttgttccatggaaatcagccggttgggtgccaccttcagaagaagaaatggcgacctctactggttatgccggtgatgccaaaccaacagaggaacacgtttaa

SEQ ID NO: 97039 - protein, 540 aa, Candida albicans SC5314
MSSTNSTENHAVEEKYEDPQQQQQQKDALAKKPMSAYIGISIMCVLIAFGGFVFGFDTGTISGFINMSDFLERFGGTRADGTLYFSNVRTGLLIGLFNVGCAIGALFLSKMGDMYGRRVGIMGAMVIYIVGIIVQIASQHAWYQVMIGRIITGLAVGMLSVLCPLFISEVSPKHLRGTLVCCFQLMITLGIFLGYCTTYGTKTYSDSRQWRIPLGLCFAWALCLLGGMVRMPESPRYLVGNDRIEDAKISLAKTNKVSPEDPALYRELQLIQAGVERERLAGSASWKSLITGKPRILERVFVGAMLQSLQQLTGDNYFFYYSTTIFKSVGLNDSFQTSIIIGVINFASTFVGIYAIEKLGRRHCLLIGSVAMSICFLIYSLIGTQHLYIDKPGGASRKPDGDAMIFITALYVFFFASTWAGGVYSIMSELYPLKVRSKAMGIASASNWLWGFLISFFTSFITDAIHFYYGFVFMGCLVFSIFFVYFMVYETKGLTLEEIDELYSTKVVPWKSAGWVPPSEEEMATSTGYAGDAKPTEEHV

SEQ ID NO: 97040 - DNA, 1620 bp, Ustilago maydis 521
  CDS (1)..(1620)
atggtcttccaggttcgagggacgcctattggcgccctcaccatcttcattgcagcactcgcctccatgggtggcttcctcttcggctgggacactggtcagatcagcggtttactcgagatgtccgactttcgtgctcgcttcgctaccatcgacgacccttcggccacaggcggaaagagctggaacccgtggatcgaaggcgttgtcgtctcgctgttgagtgtcggaactgctattggcgtactcatcggtgctccccttgccgacaagctgggtagaagatacgccatggtcgtcgaatgcatcgtctttgacattggcgtcatcattcaggtgacctccttctacgcttggtaccaggtcgccatcggtcgtctcgtcactggactcggagtcggcgcactctctgctgctgttcccttgtaccaatctgaaacggtaccacgacaggtacgaggtgctcttgttggaacctatcagcttttcatcacgctgggcatccttttggcctattgcaccaacattggtacccgagactactctaactcgggccagtggagagttcctatcgcccttggcatcttcttctcctcgattctcgccatcggcattctcttctgccccgaatcacctcgatggctcgccgctcagggccgcaacgaggaggcgtacaaggcatgcgctgcggttcgtggtgccaagtacggcgacggaaatccatgggtggaagctgaataccgcgagatcgtctccatggtcaaggcagacgagaagctagaggaggctggctggctggactgcttcaagccgcagcacaagactctctatcgaacgcttctcggaatggcactccaagccggtcagcagtttaccggtgccaactacttcttctacttcggaaccgcgatcttccgaagcgctggtcttgatgattcgttcgtcacacagatcattctgggtgctgtcaactttgtatgcactttcctcggtctctacgtactcgagcgtttcggccgtaggtggcctctcatctacggtgcggcttggcagtcgttctggctctttgtatttgctattgctggtgtagtaggcggcccacagcccgagcagatctcgtcgggtatcggaaagctgctgattgtggctgcttgcttcttcattctcggttacgcttccacctgggctcccggtatctggatttggatcggcgagagcttcagttaccgcacacgtgccaagcaagcttcattggcgaccctcagcaactggatcagcaatttcctcatctcgtacttcagttcgcccatcgccaacgatatcaactttgcctacggctttgtgttcgctggctgtaatttggccaactgtctaatcgcctttttctttgtttacgagtcggctgacctgacgcttgaggacgtagacgccatgtacaacgaccccaactgtaagccttggaactcaaccaagtgggtgcctgctggctacacttcgcgagaccagatcaaggagaaggattcgggtcaggcaagcgaggtgggcgagtggagcaactctccttcggcgctacctgacgagcaggagaagaacaagtccaatcctcttcaagtggcgtga

SEQ ID NO: 97041 - protein, 539 aa, Ustilago maydis 521
MVFQVRGTPIGALTIFIAALASMGGFLFGWDTGQISGLLEMSDFRARFATIDDPSATGGKSWNPWIEGVVVSLLSVGTAIGVLIGAPLADKLGRRYAMVVECIVFDIGVIIQVTSFYAWYQVAIGRLVTGLGVGALSAAVPLYQSETVPRQVRGALVGTYQLFITLGILLAYCTNIGTRDYSNSGQWRVPIALGIFFSSILAIGILFCPESPRWLAAQGRNEEAYKACAAVRGAKYGDGNPWVEAEYREIVSMVKADEKLEEAGWLDCFKPQHKTLYRTLLGMALQAGQQFTGANYFFYFGTAIFRSAGLDDSFVTQIILGAVNFVCTFLGLYVLERFGRRWPLIYGAAWQSFWLFVFAIAGVVGGPQPEQISSGIGKLLIVAACFFILGYASTWAPGIWIWIGESFSYRTRAKQASLATLSNWISNFLISYFSSPIANDINFAYGFVFAGCNLANCLIAFFFVYESADLTLEDVDAMYNDPNCKPWNSTKWVPAGYTSRDQIKEKDSGQASEVGEWSNSPSALPDEQEKNKSNPLQVA

SEQ ID NO: 97042 - DNA, 1638 bp, Cryptococcus neoformans var. neoformans B-3501A
  CDS (1)..(1638)
atgaagagctcgatcatcttctgcttctttgctgccttcggcggctgggtattcggttacgatattggatacatctcaggatgtctgatcatgcctaactttatccaatacatgggagaacaagatcctaccacaggggaatggattctctcctcacagcggcaaagtatcatcacctctttgctgtccgccggtactttctttggcgctctcctgcaaagttttaccagtgacagacttggtagaaggggatcgatcatcttctggtccattatcttctctgttggaatcattatccaagtatcttccttcggtcttgctcagatcactgtcggtcgattcgtagccggtctcggtgtcggtgcactctcagctatcgtcccgctttacgtgggggaagcggcccccaagaaattgcgaggtgctcttctcgtattgtaccaagtccagatcgcatccggtctcttcttggcctacatcgtcgatcttggaacacatcacctcaagtcctcagcttcatggcgtattcctgttggtcttcagctcgtttggggtgcattcctaattgtcggcggtttactcctccctgaatcaccgcgtcttctgctcggtagaggtgacgagaaaggcgccctcaaggctatcgcgaggttaaatgactgtgaagtggacgatcccttgacgagagatgttatcaaggatttggaagaagccatcagggaggagaatgagggtggaaaggctggatggttagagtgtttcagcacgaggagtatgatactatcagtgtggaagagaactctgaacggttgcatggtacaattcttgcagcaactcaacggacagaacttctactactactacggcccagtattctttgagagtgctgacgtccctctttctgcgtactctatccaagccattctcggcggtatctccctcgccacagtcatccccgccatgtggaccatcgagcaccttgggcgacgtaaatcactccttttcggcgccgctattcaagctgcctgtgccctcatcgccggcttggttggtcattactacaccgatgtggcgggtgtcaccgattccatggtcaagacgggtggtaacgttttaattgcgtttgctgtcattcatgtttccatgtacagtttgttctggggacctacaccctgggtcatcctgggcgagacttaccctctccgtgttcgaccaaaggcgattgctcttgctgctgctgttaactggctttggaatttccttctctcttacttctcgcctttgattgctgatgacatcggccctcttattctcttgatcttctttggatgtcttatcttcgctttcgtctacgtcttctttatgcttccagagactcgaggaattaccctcgaagaagtcgatgagctctaccgatccaaaatacccgcatggaagtccaatagctggaaaccttcatcccatcacgcggctctcgacgcccttgaaggcgaaagccgaaaaccagttgaggtgcctgctcaggctcctggcacgctggatgagacgaagcctgcggatgagcacttggaaaatgcgcctgcggctaaggctaggattgagggggaaagaggagcgagggaaaagagtattgtgtaa

SEQ ID NO: 97043 - protein, 545 aa, Cryptococcus neoformans var. neoformans B-3501A
MKSSIIFCFFAAFGGWVFGYDIGYISGCLIMPNFIQYMGEQDPTTGEWILSSQRQSIITSLLSAGTFFGALLQSFTSDRLGRRGSIIFWSIIFSVGIIIQVSSFGLAQITVGRFVAGLGVGALSAIVPLYVGEAAPKKLRGALLVLYQVQIASGLFLAYIVDLGTHHLKSSASWRIPVGLQLVWGAFLIVGGLLLPESPRLLLGRGDEKGALKAIARLNDCEVDDPLTRDVIKDLEEAIREENEGGKAGWLECFSTRSMILSVWKRTLNGCMVQFLQQLNGQNFYYYYGPVFFESADVPLSAYSIQAILGGISLATVIPAMWTIEHLGRRKSLLFGAAIQAACALIAGLVGHYYTDVAGVTDSMVKTGGNVLIAFAVIHVSMYSLFWGPTPWVILGETYPLRVRPKAIALAAAVNWLWNFLLSYFSPLIADDIGPLILLIFFGCLIFAFVYVFFMLPETRGITLEEVDELYRSKIPAWKSNSWKPSSHHAALDALEGESRKPVEVPAQAPGTLDETKPADEHLENAPAAKARIEGERGAREKSIV

SEQ ID NO: 97044 - DNA, 1653 bp, Cryptococcus neoformans var. neoformans B-3501A
  CDS (1)..(1653)
atgggtggtggtgctcctgccggcggtgactttgaggctctcctcactcaacgtcagaacgaaggctggcgaggtcttttcaagaacggccgagctctcggtttggcatgtttcgcttctcttggtggtgtcctctatggctacaaccagggtgttttcggtcaagtccaagtcatgtacaattttgagcagcgatacactgctactttgacaaaccccgacaccaaaggtctcttgacttctattcttgaacttgctgcttttgtcggtgccctcatggccggtcctttgtctgacagatattcccgaaagtactccatttccgcttggtgtgtcgtcttcatgatgggtactgccattcaaaccggtgccaactccaacgtcgcgtgcatttacgctggtcgatggtttgccggtatgggtgtcggtgctctttctatgcttgttcctatgttcaacgccgagttggctcctcccggtatccgaggttctttggtcgctcttcaacaactggccattacattcggtatcctcatttcttactggattggctacggtaccaactatattggcggtacaggtgccggtcagactaccgccgcttggcgaattccccttggtctccagcttatccctggtgtggttctttgtgtcggtgcttgcttccttcccttctccccccgatggctcatgcttaggggtcgtgaggaggaatgccttaccaacttggctaggctccgaagctctaccgaggaagcccccgaaatccaatacgagttccgtgctcttcaggctgagcgtcttgtcgagcgtgaggccgccaaggagcgatatggtcaggaggacgtcaacttccgagtcaccatgcttgagtacaagaggttgttcaccaccaggccccttcttcaccgactcatgcttggtgctggcgcccaggctttgcaacaatggacgggtatcaacgccattatctattacgctcccaccatctttgcgcagataggtcttactggtagcggtgctagtggtactatcagtcttttggccacaggtatcgtcggcgtcgtcaatttcgtcttcactattcctgccgtccttttcgtcgataactttggtcgaaggcctctccttgcctggggcgaagccaacatggccatttctcacgctattattgccgctatcgttgccgaattcggtgacaggtttgatagcaacaagaaggctggtaacgccgctgttttcttcatctattggtacattgccaacttcgctgtcacctggggtcccttggcttgggttgtttccgctgaagtcttccctctcgacatgcgtgctaagggtatgagtatttcttccggtgtgaactggcttatgaacttcactgtcgctatggttacccctcacatgatcgataacattggctacaagacctacatcgtctttatgtgcttctgtgtcgttggcttcctgtattccatcttcatccttccagaacttaagggtctctctctcgaagaggtcgacagggtcttccacgacgagtccggtgccgaggaccgagcacgacgagagcgtgttgctgcccagatcggtttggacaaggttgccgagcagattcagcacaaggagaaggtcaacgattccgaagcttaa

SEQ ID NO: 97045 - protein, 550 aa, Cryptococcus neoformans var. neoformans B-3501A
MGGGAPAGGDFEALLTQRQNEGWRGLFKNGRALGLACFASLGGVLYGYNQGVFGQVQVMYNFEQRYTATLTNPDTKGLLTSILELAAFVGALMAGPLSDRYSRKYSISAWCVVFMMGTAIQTGANSNVACIYAGRWFAGMGVGALSMLVPMFNAELAPPGIRGSLVALQQLAITFGILISYWIGYGTNYIGGTGAGQTTAAWRIPLGLQLIPGVVLCVGACFLPFSPRWLMLRGREEECLTNLARLRSSTEEAPEIQYEFRALQAERLVEREAAKERYGQEDVNFRVTMLEYKRLFTTRPLLHRLMLGAGAQALQQWTGINAIIYYAPTIFAQIGLTGSGASGTISLLATGIVGVVNFVFTIPAVLFVDNFGRRPLLAWGEANMAISHAIIAAIVAEFGDRFDSNKKAGNAAVFFIYWYIANFAVTWGPLAWVVSAEVFPLDMRAKGMSISSGVNWLMNFTVAMVTPHMIDNIGYKTYIVFMCFCVVGFLYSIFILPELKGLSLEEVDRVFHDESGAEDRARRERVAAQIGLDKVAEQIQHKEKVNDSEA

SEQ ID NO: 97046 - DNA, 1674 bp, Strongylocentrotus purpuratus
  CDS (1)..(1674)
atggacgaaaagctgaaaaacgcggactatgacgccgacaaagaggacaatgatgacgtcaaaaatggtgttggagaggggcaacttactttcatgttggtgctttgtactgctactgtgagcattggatcctcaggagaattcggctacaaccagggagttatcacggctccctcagtgttcatccaagctttcattaatgagacgtactttgagcgttcgggtgggaaacagctgaatgacgaggccctaacatggctttgggctactgtagtttccatctactgcatcggaggagctctaggggccctcgcaggaggatactgggctgactatttcggcagaaaccgagggctgatttacaacaatttcatctcgattgttggctcattattgatgggatgttgccagatagctggctctcctgaaatgatcatcatcggccggttcgtcattggattcagtgttggtatgtcattgaccatcgtacccctatacctgtccgagatagcacccttcaatctacgaggagctatcaccaccacccaccagctactcatcacgataggcctcctgcttgctcaggtaaaaacccaggtcccatgtggccatgagaccgatcatgtggaggtcttggggttctttgcattctacgatgagtctacgtggccgatcgtgctgggactaagtgcagtcactggtctcatcgagtttatcgtcctacctttctgcccagagagtccacgatggctgcttatcaaacagaaccaagaggagaaagccatcgcagctcttcgtttgcttcgtggcgtggatgacgtggtagctgaggtcgatgagatgaagcttgaacatcagcacgaggacgagaccgagaaggttggggtcctggacctactctgtctacgtgacaggacctggttgatgccgctgttgatctgtgttgtcttgcacggtggacagcagttatcagggatcaatgcgatcatattttactcaacagagctgtaccaatctgccggaatgacagactctcagatagcctacgccactgtcggatttggcaccctcaacgtcatcgtcactataatttcggtcctagtggtagagcgcctaggtcgtcgtcccctccttctttaccctttcgggatgttatctgtttgtttggttggtctcaccgtctcactcgcccttcaggaggaaaatgactggacgaaatggatgggccttggttttatttatctctatatcatattttttgctatcggaccagcacccctgccgtacgtggtatcgacagaggtgtggtcccaggggccacgccctgctgctgttagtatctcaattcaagtcaattggtgggctaatttcctggtccagctctccttcccatctatacagggtgcgattgacgagtatactttcatcatttttatcgtcttcgtcgtcttgacaaccctgttcatctacatctacctgcctgagacgaaaaatcgcagctttgacgagatcgtcacaggattcagaatcaaaggcaaaaacaaagagaatgttgagcacgagatcgaagacagatataaagcccaaagcctggccaacgatgacgagaagaatggcaacgatgtcgagatgagatattcgtacgtgaacagagggcaacaaacagacgaatag

SEQ ID NO: 97047 - protein, 557 aa, Strongylocentrotus purpuratus
MDEKLKNADYDADKEDNDDVKNGVGEGQLTFMLVLCTATVSIGSSGEFGYNQGVITAPSVFIQAFINETYFERSGGKQLNDEALTWLWATVVSIYCIGGALGALAGGYWADYFGRNRGLIYNNFISIVGSLLMGCCQIAGSPEMIIIGRFVIGFSVGMSLTIVPLYLSEIAPFNLRGAITTTHQLLITIGLLLAQVKTQVPCGHETDHVEVLGFFAFYDESTWPIVLGLSAVTGLIEFIVLPFCPESPRWLLIKQNQEEKAIAALRLLRGVDDVVAEVDEMKLEHQHEDETEKVGVLDLLCLRDRTWLMPLLICVVLHGGQQLSGINAIIFYSTELYQSAGMTDSQIAYATVGFGTLNVIVTIISVLVVERLGRRPLLLYPFGMLSVCLVGLTVSLALQEENDWTKWMGLGFIYLYIIFFAIGPAPLPYVVSTEVWSQGPRPAAVSISIQVNWWANFLVQLSFPSIQGAIDEYTFIIFIVFVVLTTLFIYIYLPETKNRSFDEIVTGFRIKGKNKENVEHEIEDRYKAQSLANDDEKNGNDVEMRYSYVNRGQQTDE

SEQ ID NO: 97048 - DNA, 2187 bp, Tribolium castaneum
  CDS (1)..(2187)
atgtatgatgtgtgcatgtccgagagactgatgattgttcgcctagcccaacacggccaagtaatgcaatttcctgtctccggtcagccaccgcctcaatatcgaccacacatcaacggacactggatcacgggcggcagtccggcggggcgccaagtaccgatgagacagtcggccggcccgcaccaccgacacgaccatcaacaaccagttgttaccactccggctgccagcgagtccgtcgacaccctcaccaccactaccgactcccaacatacagtttcagcggaggtagtcgaggtggaggaacatgatctgggctccgatgcggagtccaaagctagggagacgctcaagctgaccgcccgcagccgccctgcgcaaacccagacgcgcccgcgaacagcgcgtgatgagacgaagaaagaaatacaagaggacgatgaagccactctcagagagctgcttattagtctgcaaaaacaggtgagcgtgatgagtatgaatctgagcgccaaactggacgagctccaacgtggagatcggcacctggagacaacggtcgctctttgtgagatcaggtcgcagctgcaggagctcaccaagtcggtggagtcctgccagtcggaggtgtcggaggtcaagagggacatggtggccatcaagcacgagctcgacactgtgcagcaagtcaaggaggagatcgaggagctgagagagtacgtggaccggctcgaggagcacacgcagcgcaggaaactgcggctgctcgagcaggacctcacgtttttcctatcgtatgcgatcctggcggcggtcctgggcatgctgcagttcggttacaacacaggagtgataaacgcgccggaacagaacattgaacacttcatgaaggacgtgtacaagacgagatatggaaaagacctatctgatgattctgcacggggcctctactccattgccgtgtccatatttgcgttaggaggcatgctaggtggcttcggcggcggaatggtggctaacaaattcggaaggaaaggcgggctgcttttgaacaacgtcctgggaataactggggcgtgcttaatgtggtgtaccaaactagcgaactcatatgaaatactattttttgggagatttattataggggtcaattgtggactgaacacatccttagtacctatgtatatatccgaaatagctcctttaaatttacgtggtggtcttgggacagtgaaccaattagcggttacggtgggtcttctgttatcacaagtgctcggtatcgaacaaatcctcggtaccaacgacggttggcctctactacttggcttagccgtgtgtcctgccttacttcaattagtacttcttccaatttgtccggaaagtccgcgctacctgctcatcactaagcaatgggaggaggaggcgcggaaggcattgcggaggttgagggcgagcaaccaggtcgaagaagacatcgaagagatgcgggcggaggaacgcgcacagcaggccgaagcttccatcagcatgctggagctgatctgctcgccgacgctgcgggcgccgctgatcatcggcgtcgtcatgcagctctcgcagcagctgtccggaatcaacgcggtgttctactactcgaccagtctgttcgtcagctcggggctaacggaggagagcgccaagttcgccaccatcggcatcggggccatcatggtggtcatgacgctggtttccatcccgctgatggacaagaccggcagacggacgctgcatctttacggcctcggtggcatgttcatcttttcgatattcatcaccatctcatttttaataaaggagatgatagactggatgtcgtatctgtctgtggtttcgacgctgggattcgttgtgttcttcgccgttggccccggatcgataccgtggatgatcaccgccgaactcttctcgcaaggacctcggccggctgccatgtcaattgcggttttagtcaactggattgccaactttttggtgggcatcgggttccaaagtttaaaaaacgccctcgataactatacgttcctgccatttagcgtgttcctagctatattctggattttcacatacaaaaaggtccctgaaacgaagaacaagacctttgaagaaatccttgccttgtttagacacggaaatggaaggtaa

SEQ ID NO: 97049 - protein, 728 aa, Tribolium castaneum
MYDVCMSERLMIVRLAQHGQVMQFPVSGQPPPQYRPHINGHWITGGSPAGRQVPMRQSAGPHHRHDHQQPVVTTPAASESVDTLTTTTDSQHTVSAEVVEVEEHDLGSDAESKARETLKLTARSRPAQTQTRPRTARDETKKEIQEDDEATLRELLISLQKQVSVMSMNLSAKLDELQRGDRHLETTVALCEIRSQLQELTKSVESCQSEVSEVKRDMVAIKHELDTVQQVKEEIEELREYVDRLEEHTQRRKLRLLEQDLTFFLSYAILAAVLGMLQFGYNTGVINAPEQNIEHFMKDVYKTRYGKDLSDDSARGLYSIAVSIFALGGMLGGFGGGMVANKFGRKGGLLLNNVLGITGACLMWCTKLANSYEILFFGRFIIGVNCGLNTSLVPMYISEIAPLNLRGGLGTVNQLAVTVGLLLSQVLGIEQILGTNDGWPLLLGLAVCPALLQLVLLPICPESPRYLLITKQWEEEARKALRRLRASNQVEEDIEEMRAEERAQQAEASISMLELICSPTLRAPLIIGVVMQLSQQLSGINAVFYYSTSLFVSSGLTEESAKFATIGIGAIMVVMTLVSIPLMDKTGRRTLHLYGLGGMFIFSIFITISFLIKEMIDWMSYLSVVSTLGFVVFFAVGPGSIPWMITAELFSQGPRPAAMSIAVLVNWIANFLVGIGFQSLKNALDNYTFLPFSVFLAIFWIFTYKKVPETKNKTFEEILALFRHGNGR

SEQ ID NO: 97050 - DNA, 1377 bp, Oenococcus oeni PSU-1
  CDS (1)..(1377): transl_table=11
ttgaaagcacatcatttaaatatattttttatttttgtttttggtgccttgggaggtttgctcttcggttttgatactgggattatttccggtgcatcatctttaatcgaaagtgatttcagtctaaatatcgaacaaactggcttcattacatcttctgttttgatcggatcatcgattggggccctgtctgttggttctttatccgacaagttcggtcgtaaaaaattgttaattctggcctcggttttattcttaatcggatctgggctatcaatgtcggctgtcggttttgtttcaatggttatcgctcgtatcattctgggttttgccgtgggatccgcttcagccttaactccggcttacttggccgaattagctgatgccccacatagaggatcattaggaagcatgttccagctaatgattacccttggtattttattggcatatgtttctaatctcggcttcctgggtcacaatttgttagggcttcgtgattggcgttggatgctcggatcggcattaataccggctttaattttattcataggttcgattgtcctaccggaatcaccacgttatctggtagaaaaaggaagaatcgatgaagctcgaagtgtccttcactacttgcgtgaaaaaaccaacgaagatcctgataaggaactagcagatattaaaaaagtttccaatcagcccaaaggcggttttaaagaactttttacttttgcccgtccagccgtcattgttgcgattggactgatgcttttacaacaattggttggtattaattccgttatctactttttgccacaggtctttattaaaggattcggctttcaagcaggcaatgctatctggatctcagtcggcattggtgttgttaattttctatgtaccgttttggcatacaatatcatggacaaatttaaccgtcgcacaatccttttgtttggatcgattgtaatgtcagtatcaattggaattttgtccgtgcttaactttactctcagtattaaacaagcggccattccgacaatgattctcattgcgatatatatctttggttttgccgtttcctggggaccaatttgctggttaatgattggtgaaatcttcccattgaatattcgtggagtcggcacatcgataggatcagctgctaactggattgcaaactttattgtttctcaattctttctcgtattattggcaactttccattacaatgtcggtgggccgtttgcaatcttcactttctttgccattctttcaatattcttcgtgatctatctcgttccagaaaccagaggaaaatcacttgagcaaattgaaatggatatgcgtcgtaagccgctgccaaagaaaaactga

SEQ ID NO: 97051 - protein, 458 aa, Oenococcus oeni PSU-1
MKAHHLNIFFIFVFGALGGLLFGFDTGIISGASSLIESDFSLNIEQTGFITSSVLIGSSIGALSVGSLSDKFGRKKLLILASVLFLIGSGLSMSAVGFVSMVIARIILGFAVGSASALTPAYLAELADAPHRGSLGSMFQLMITLGILLAYVSNLGFLGHNLLGLRDWRWMLGSALIPALILFIGSIVLPESPRYLVEKGRIDEARSVLHYLREKTNEDPDKELADIKKVSNQPKGGFKELFTFARPAVIVAIGLMLLQQLVGINSVIYFLPQVFIKGFGFQAGNAIWISVGIGVVNFLCTVLAYNIMDKFNRRTILLFGSIVMSVSIGILSVLNFTLSIKQAAIPTMILIAIYIFGFAVSWGPICWLMIGEIFPLNIRGVGTSIGSAANWIANFIVSQFFLVLLATFHYNVGGPFAIFTFFAILSIFFVIYLVPETRGKSLEQIEMDMRRKPLPKKN

SEQ ID NO: 97052 - DNA, 1551 bp, Bifidobacterium longum DJO10A
  CDS (1)..(1551): transl_table=11
atgacgacgacggcatcacccgtatcgaagcagacggcatccgcggcacaggagaccggcgcaaccggtgcagcggccaccgcaatcgaaaccatcgaaaccggcgtggccggggtggcggacgcggccacaaacgcggcagcaaacgcaatcgaggacctcgaagccgccgaatcacgcggcttctccacgcgcttcccgctcaacagcgcattcatcttcaccttcggcgcgctcggcggcatgctgttcggtttcgacaccggcattatctccggcgcctccccgcttatcgaatcagacttcggcctgagcgtctcccagaccggcttcatcacctcctcggtgctgatcggctcgtgcgcaggcgcgctgtcgatcggcgcactgtctgaccggttcggccgcaagaagctgctcatcgtctccgcgctgctgttcctgctcggctcaggcctgtgcgcctcctccaccggattcgcgatgatggtgtgcgcccgcatcatcctgggtctcgccgtcggcgcggcctccgccctgaccccggcgtacttggccgaactggcgccgaaggagcgtcgcggctcactgtccacgctgttccagctcatggtcaccttcggcattctgctggcctacgcctccaacctcggattcctgaaccacaacctcttcggcatccgcgactggcgctggatgctcggttcggcgctggtgccggccgccttgttgctgctcggcggcctgttgctgcccgaatccccgcgttatctggtgaacaagggcgacacccgcaacgccttcaaagtgcttacgctgattcgcaaggacgtggatcagacccaggtgcagattgagctggacgaaatcaaggccgtggccgcacaggacaccaagggtggtgtgcgcgaactgttccgtatcgctcgtccggcgctggtggccgccatcggtatcatgctgttccagcagctcgtgggcatcaactcggtgatctacttcctgccgcaggtgttcatcaagggcttcggcttccctgaaggcgacgcgatctgggtgtcggtgggcatcggcgtggtgaacttcgtgagcaccatcgtggccacgcttatcatggatcgtttcccgcgcaagggcatgctgatcttcggttccatcgtgatgaccgtttcgctcgcggtgctcgccgtgatgaacttcgtgggcgacgtggccgtgctggcagtgccgacgatgattctcatcgctttctatatcctcggctttgcggtctcgtggggcccgatcgcctgggtgcttatcggcgagatcttcccgctgagcgtgcgcggcatcggctcatccttcggctcggcggcgaactggctgggcaacttcatcgtctcccagttcttcctcgtgctgctcgatgcgttcggcaacaatgtgggcggcccgttcgcgattttcggcgtgttctcggccctgtccatcccgttcgtgctgcgcttggtgcccgagaccaagggcaagtcgctggaggaaatcgagaaggaaatgaccaagcgctag

SEQ ID NO: 97053 - protein, 516 aa, Bifidobacterium longum DJO10A
MTTTASPVSKQTASAAQETGATGAAATAIETIETGVAGVADAATNAAANAIEDLEAAESRGFSTRFPLNSAFIFTFGALGGMLFGFDTGIISGASPLIESDFGLSVSQTGFITSSVLIGSCAGALSIGALSDRFGRKKLLIVSALLFLLGSGLCASSTGFAMMVCARIILGLAVGAASALTPAYLAELAPKERRGSLSTLFQLMVTFGILLAYASNLGFLNHNLFGIRDWRWMLGSALVPAALLLLGGLLLPESPRYLVNKGDTRNAFKVLTLIRKDVDQTQVQIELDEIKAVAAQDTKGGVRELFRIARPALVAAIGIMLFQQLVGINSVIYFLPQVFIKGFGFPEGDAIWVSVGIGVVNFVSTIVATLIMDRFPRKGMLIFGSIVMTVSLAVLAVMNFVGDVAVLAVPTMILIAFYILGFAVSWGPIAWVLIGEIFPLSVRGIGSSFGSAANWLGNFIVSQFFLVLLDAFGNNVGGPFAIFGVFSALSIPFVLRLVPETKGKSLEEIEKEMTKR

SEQ ID NO: 97054 - DNA, 1461 bp, Kineococcus radiotolerans SRS30216
  CDS (1)..(1461): transl_table=11
atgtcccaggagaacgggcgcggtcccgaccgcgccgacgccgaggagcggcagcgcaccacgacgaaggtcgtgctcatctcggtcgtcgccgccatcggggggttcctcttcggcttcgacaccgccgtcgtcaacggcgcggtggacgccgtcgccgaggagttccgcctcgcggcggggctgaagggcttcgcggtgtcctgcgcgctgctgggggcggcggtgggggcctggttcgccggccggctggccgaccgcttcggccgcaaggcggtcatggtgatcgccggggcgctcttcgccgtcagcgccgtcgggtccgccttcgccttcggcgtgtgggacctgatcctgtggcgcgtcgtcggcggtgtcggcgtcgggatcgcctcggtcatcgccccgacctacatcgccgaggtcgcccccgcccacatccgcggccggctggcctcgctgcagcagctcgccatcaccgtcggcatcttcgccgccctgctctccgacgccttcatcgccaacaccgccggcggggcctcggagacgacgtggttcgggtgggacgcgtggcggtggatgttcgtggtcggggtcatcccctcgctggtctgggcgttgctggccctgcagatcccggagtccccgcgctacctcatcgcccaggggaagacccagcgcgccggcgaggtgctgcgcgaggtcctgggcacccgcagcctggaggccgtgcagcgcaaggtcgccgacatcaagaactcgatgcgccgcgaggacgagcccagcctgcgcgacctgcgcgggccgaggttcggcctgctgcccatcgtctgggtcgggatcctgctgtcggtgctgcagcagggcatcggcatcaacgtgatcttctactactccaccacgctgtggaaggccgtcggcttcgacgagtccgacgccttcaccacctcggtcatcacctcggtcaccaacgtcgtcgtgacgttcatcgccatcgccaccgtcgacaggatcgggcgcaagccgctgctgaccgtcggctcggcgggcatgttcctctcgctcacggtcatggcgatcgccttctcccaggccagcggcagcggccaggacgtctcgctgccgcagccgtgggggaccatcggcgtcatcgccgccaacgtctacgtcatctccttcggcgccacctggggcccggtcgtgtgggtgctgctgggcgagatgttccccaacaggatccgggccgccggtctggccgtggccgcggccgcgcagtggctggcgaacttcgcgatctcgacgagcttcccgtcgctggccaagctgggcctgcagtacgcctacggcctctacgccgtcatcgcgctgctgtcgttcgtcttcgtccgccgggccgtgcaggagaccaagggccgcgagctggaggagatcggcgccgagaccacgagcaccgcgccgtga

SEQ ID NO: 97055 - protein, 486 aa, Kineococcus radiotolerans SRS30216
MSQENGRGPDRADAEERQRTTTKVVLISVVAAIGGFLFGFDTAVVNGAVDAVAEEFRLAAGLKGFAVSCALLGAAVGAWFAGRLADRFGRKAVMVIAGALFAVSAVGSAFAFGVWDLILWRVVGGVGVGIASVIAPTYIAEVAPAHIRGRLASLQQLAITVGIFAALLSDAFIANTAGGASETTWFGWDAWRWMFVVGVIPSLVWALLALQIPESPRYLIAQGKTQRAGEVLREVLGTRSLEAVQRKVADIKNSMRREDEPSLRDLRGPRFGLLPIVWVGILLSVLQQGIGINVIFYYSTTLWKAVGFDESDAFTTSVITSVTNVVVTFIAIATVDRIGRKPLLTVGSAGMFLSLTVMAIAFSQASGSGQDVSLPQPWGTIGVIAANVYVISFGATWGPVVWVLLGEMFPNRIRAAGLAVAAAAQWLANFAISTSFPSLAKLGLQYAYGLYAVIALLSFVFVRRAVQETKGRELEEIGAETTSTAP

SEQ ID NO: 97056 - DNA, 1434 bp, marine gamma proteobacterium HTCC2207
  CDS (1)..(1434): transl_table=11
atgtctatcgccgcaagctccagtactaaaaaactcagtattttacaaatcaccattgtcgctgcattaggcggtttattgttcggatatgacaccggtgtgatagcgggcagtcagctttatttcaccaaatattttaacctttctgccgccgagcagggttgggcagtcagcagtgcgctctatggttgtctagtgggtgcactggcaggtgggtatctcactaagcgcatcagcagaaagtacacgttgatccttgcggcttctctctttgctgtttcggcctggggttctggtatggcagcaaccctcaatgagctggcgatttaccgaattattggtggtcttgccgtgggcatggcctcactggcggcacctatgtacattgctgaaatggcgccacctaaataccgtggtcgtatggtttcctactatcagttggccgtggttattggtttttttgtagtgtttttggcgacctattttatcggcggtggcgacacgcagaatatgaccccagaagtgcttgcgcagcttcatgagcacaatgtcaatcagggctggcgcattatgctctggtctgagctattgccggcactggctttcttggggctgttatttactgtgccgcacagcccccgctggttgatctcacagggccgcactgaagaggctaaaactgtgctggctcagataacctcaagcgagcaagaggcggcgtctgagtttgctgatatagaggcgtctctgacccatagtccagccccaaacctggccatgttgtttggtaaaggtattggttttgctctatttctcggtgttatgttgtcgatattccagcaggtcactggtatcaatgcgattctctattacggtgcggaaatatttagtaacgccctaggttatggcccagaagatgcgcttaagcagcagctatggctgggggcggtcaatctgatctttacctttgtcgctatttacaaagtcgatagctggggccgcaagccactgtttattgccggtagtataggtatgtgtgccggtttaactgtgctcggtctgacaatttacactcagcagatgggtgttgtttccctgatcgcggtactggtctttatcgcctcatttgccatgtctatgggcccagttgtgtgggtaatgttgtcggaaatgtttccgaataatgtacgcagtgtcgctatgtcgatcgctgttgcggcgcagtggctattcaatgctctggtagccaatagcttccctctggtaaaccaaagtaccttgaatcaggaaggctttaacggcgcgctgccatactttatctttgcctcgttctgtgtagttgcgatgatatttgtctggaagctggttcccgagaccaagggtaagacacttgaggaaatggaagcactttggtccgccaaggacgcaggctaa

SEQ ID NO: 97057 - protein, 477 aa, marine gamma proteobacterium HTCC2207
MSIAASSSTKKLSILQITIVAALGGLLFGYDTGVIAGSQLYFTKYFNLSAAEQGWAVSSALYGCLVGALAGGYLTKRISRKYTLILAASLFAVSAWGSGMAATLNELAIYRIIGGLAVGMASLAAPMYIAEMAPPKYRGRMVSYYQLAVVIGFFVVFLATYFIGGGDTQNMTPEVLAQLHEHNVNQGWRIMLWSELLPALAFLGLLFTVPHSPRWLISQGRTEEAKTVLAQITSSEQEAASEFADIEASLTHSPAPNLAMLFGKGIGFALFLGVMLSIFQQVTGINAILYYGAEIFSNALGYGPEDALKQQLWLGAVNLIFTFVAIYKVDSWGRKPLFIAGSIGMCAGLTVLGLTIYTQQMGVVSLIAVLVFIASFAMSMGPVVWVMLSEMFPNNVRSVAMSIAVAAQWLFNALVANSFPLVNQSTLNQEGFNGALPYFIFASFCVVAMIFVWKLVPETKGKTLEEMEALWSAKDAG

SEQ ID NO: 97058 - DNA, 1620 bp, Trichoderma reesei
  CDS (1)..(1620)
atgggattcttgaacaaaaaagccgatgctcctgcgcaggagcccaagagggatccctcgcccagcagtggaggctctgagacgactccctcgcagcaggagagagtcaccctccttgcctgtgccctgggagccattgccgccattggaggcttcatctttggctatgtcagtggtcagatctcgggtttcttcttgatgaaggactatgcccgccgcttcggagagctgcagagtgatggatcatacgacttcagcgctgcccgccagggcaccatcgtcggtctcctctgcgtgggagccctcattggctccctagttgccggcaagatggcagacaccgtcggccgtcgcctgtccatctccatgttcgccttcttcgcctgtgtcggaaccattatcgagatctcctcgtcgacccactgggttcagtttgccgttggccgtctcgtcactggtctgagcatcggtgccctctccgtcgtcgtccccatgtaccagtcagagagtacccctgccgtcatccgcggtgtcatcgtctcgtcgtaccagctgctcattaccatgggtatctggacggccgagatggtcaactggggaaccgagaccaggcccaacagcgccgcatggagaatccccaacggcctcacctttgcttgggccctggtcctcggtgctggcatcctgttcctccccgaaagcccccggtttgcctacagccgcggccgcgtcgatgaggctcgccagacgattgcccgtctccatggcctctccaccgactcggacattgtcaacaaccagatcgccgacatccaggccaagattgacgaggagagcgagaacacggccgcgttcagctggaccgagatcttcaccggccctcgcatgttctaccgtacggtcctcggtgtcgttctccaggccggccagcagctcactggcgccaacttcttcttctactttggcacgaccgtcttcgctgccactggcatcagcaacagctatgtcacgcagattatcctcggatcggtcaacgtgtttgccaccatcatcggtctcttcatcattgaccgatttggccgacgtgtcattctcatggctggtgcctcctggatgatgatgtgcttccttgtctacgcctttgtcggtcactttgctctcgaccacgagaaccccatgctcacccccaaggctggatccgccctggtcaccttctcttgcctggccattgccgccttcgccgtcagttggggacccctggtctggactgtcaacgccgagctgtaccccatccgctaccgaagcttctgcatgggcattgccactgcctccaactggttctggaacttcctcatctccttcttcactcgattcatcaccgacaagatcgactacttctacggcctcattttcgccggatgctgtgccgccctcgtcgtcatcgtcttcttcttcctgatcgagtccaaggaccgcacgctcgaggagattgacaccatgtacgtccagcacgtcaaccccattacgtcgagccgatggaacgccgcccagttccgagacgagatgagggagacgcagaccaacgatgtgcgagagcacgctcacgaggatgagaaataa

SEQ ID NO: 97059 - protein, 539 aa, Trichoderma reesei
MGFLNKKADAPAQEPKRDPSPSSGGSETTPSQQERVTLLACALGAIAAIGGFIFGYVSGQISGFFLMKDYARRFGELQSDGSYDFSAARQGTIVGLLCVGALIGSLVAGKMADTVGRRLSISMFAFFACVGTIIEISSSTHWVQFAVGRLVTGLSIGALSVVVPMYQSESTPAVIRGVIVSSYQLLITMGIWTAEMVNWGTETRPNSAAWRIPNGLTFAWALVLGAGILFLPESPRFAYSRGRVDEARQTIARLHGLSTDSDIVNNQIADIQAKIDEESENTAAFSWTEIFTGPRMFYRTVLGVVLQAGQQLTGANFFFYFGTTVFAATGISNSYVTQIILGSVNVFATIIGLFIIDRFGRRVILMAGASWMMMCFLVYAFVGHFALDHENPMLTPKAGSALVTFSCLAIAAFAVSWGPLVWTVNAELYPIRYRSFCMGIATASNWFWNFLISFFTRFITDKIDYFYGLIFAGCCAALVVIVFFFLIESKDRTLEEIDTMYVQHVNPITSSRWNAAQFRDEMRETQTNDVREHAHEDEK

SEQ ID NO: 97060 - DNA, 1566 bp, Medicago truncatula
  CDS (1)..(1566)
atggctggtggaggcttcgccacgagtggcggaggtgaatttgaggcaaagattactccgatcgtcataatttcatgtattatggctgctaccggtggtcttatgttcggttatgatgttggtgtttcaggtggtgtgacatctatgcacccatttctgaagaagtttttcccagcagtatacagaaagacagtgttagaggcaggattagatagtaattactgcaaatatgataatcaaggattgcagttatttacatcatccttatacctagctgcattaacttcaactttctttgcatcctatacaactcgaacaatggggagaagactcaccatgttgattgccggatttttcttcattgctggagttgcattcaatgctgctgctcaaaaccttgccatgctcattgttggcagaatcttacttggttgtggtgttggttttgctaatcaggctgtgccagttttcctttcagaaattgcaccttcaagaattcgtggagctttgaatatactgttccagctcaatgtcaccattggaattttgtttgctaaccttgtcaattacggcactaacaaaatttcaggtggatggggttggagactatctcttggtttggctggtatcccagcacttctcctaacagtgggtgcaatagtggttgtggacacccccaacagtctcattgagcgtggtcgccttgaagaaggaaaagctgtacttaaaaagattcgtggcactgacaacattgaacccgagttcttggagctttgtgaggcaagtcgtgttgctaaagaggtcaagcacccttttaggaatcttctcaaacgcaagaaccgacctcaacttatcatttccatcgcattacaaatattccaacaattcacaggcatcaacgcgatcatgttttatgcaccagttttgttcaatacagtgggattcaagaatgatgcttccctctattcagctgtgattactggtgcagttaatgtcctctccacaattgtgtctatctacttcgttgataaacttggtcgtcgtatgttactgttggaagccggtgtacaaatgttcttgtctcaaattgtgatagcaatcattcttgggatcaaggtgactgatcattctgacgatctttcaaaaggctatgcaatatttgttgttatcttggtatgcactttcgtgtctgcctttgcttggtcttggggtcctctcggttggcttattccaagtgagacatttccactcgagactcgatcagctggacaaagtgtcacagtttgtgtcaacatgttgttcacctttgtcattgctcaggcttttctatctatgttatgccacttcaagtttggaatcttcttgttcttctctggctgggttttgatcatgtcaatcttcgtgcttttcttggtgcccgagaccaagaacataccaattgaagaaatgaccgagagagtatggaaacaacattggttctggaagaggtttatggaagatgacaatgagaaagtatctaatgctgattatcctaagatcaaaaataatccaaattcccaattgtaa

SEQ ID NO: 97061 - protein, 521 aa, Medicago truncatula
MAGGGFATSGGGEFEAKITPIVIISCIMAATGGLMFGYDVGVSGGVTSMHPFLKKFFPAVYRKTVLEAGLDSNYCKYDNQGLQLFTSSLYLAALTSTFFASYTTRTMGRRLTMLIAGFFFIAGVAFNAAAQNLAMLIVGRILLGCGVGFANQAVPVFLSEIAPSRIRGALNILFQLNVTIGILFANLVNYGTNKISGGWGWRLSLGLAGIPALLLTVGAIVVVDTPNSLIERGRLEEGKAVLKKIRGTDNIEPEFLELCEASRVAKEVKHPFRNLLKRKNRPQLIISIALQIFQQFTGINAIMFYAPVLFNTVGFKNDASLYSAVITGAVNVLSTIVSIYFVDKLGRRMLLLEAGVQMFLSQIVIAIILGIKVTDHSDDLSKGYAIFVVILVCTFVSAFAWSWGPLGWLIPSETFPLETRSAGQSVTVCVNMLFTFVIAQAFLSMLCHFKFGIFLFFSGWVLIMSIFVLFLVPETKNIPIEEMTERVWKQHWFWKRFMEDDNEKVSNADYPKIKNNPNSQL

SEQ ID NO: 97062 - DNA, 1605 bp, Emericella nidulans
  CDS (1)..(1605)
atggcggacggtgtcgttgcgggtacccgggttgaggcccccgtcacctggaagacctacctcatgtgcgcgtttgccgcctttggtggtatcttttttggttatgattctggttatatcaacggtgttatggcaatggactacttcattcacgagttttcaggaaaggtcaaagccgagtatgaagccgccgataacctgagcggctatgtgatctcctcctccaacaagtcccttatcacctcgattctctctgcgggtaccttcttcggtgccatcattgccggtgacctggccgattggttcggccgtcgaacaacgatcatcagcggatgtggaatcttcatggttggtgtcgccctgcagactgcctccaccactgttgccttgctggttgtcggccgtttgattgctggattcggtgtcgggtttgtctctgccatcctgattctgtacatgtcggaaatcgcgccccgcaaggtccgtggtgccattgtttccggctaccagttctgcgtcaccgttggtctgatgctggcttcctgcgtggactacggtaccgagaaccgcaccgattccggctcgtaccgtattccaattggtctccagctgctctgggctatcatccttgctgttggtctcttcctccttcccgagtcgcctcgttactatgtgcgcaagggcgatgtgtctagcgccgccaaagtgcttgctcgcgtccgtgaccaggacgttgagtcggactatgtcaaggaggagcttgctgagatcgtcgccaacaacgagtacgaaatgagccttatccctcagggtggttactttgccacttggttcaactgcttccgcggaagtatctggtccccgaacagcaacctgcgccgtaccatcctgggcacctcgcttcagatgatgcagcagtggactggtgtcaacttcgtcttctacttcggtactaccttcttcaccaacctcggcactatttccgaccccttcctcatcagtatgatcaccaccatcgtcaacgtcttctccactccgatctctttctacacgatggagaagattggtcgtcgtcctctccttctctggggcgccctgggcatggttatctgccagttcattgtcgccattgccggtgtcgttgatggatctaacaacaagaccgtcagcgctcagatcgcatttatctgcatttacatcttcttcttcgcctccacctggggtcccggtgccagggtcgtcatcggcgagatctacccgttgccgatccgttcccgtggtgtcgctctctccactgcctccaactggctctggaactgcatcattgctgtcatcaccccctacatggtcgacgaggacaagggcaacctcaagtccaaggtgttcttcatctggggctccctctgcgcgtgcgcttttgtctacacctacttcctgattcccgagaccaagggtcttactcttgagcaggtcgacaagatgatggaggagaccacccctcgcacttcttccaagtggaagccccacggcaccttcgcggccgagatgggtatgactgagaaggatgtgactcagactgtggaggacattgctaagaaggcgtaa

SEQ ID NO: 97063 - protein, 534 aa, Emericella nidulans
MADGVVAGTRVEAPVTWKTYLMCAFAAFGGIFFGYDSGYINGVMAMDYFIHEFSGKVKAEYEAADNLSGYVISSSNKSLITSILSAGTFFGAIIAGDLADWFGRRTTIISGCGIFMVGVALQTASTTVALLVVGRLIAGFGVGFVSAILILYMSEIAPRKVRGAIVSGYQFCVTVGLMLASCVDYGTENRTDSGSYRIPIGLQLLWAIILAVGLFLLPESPRYYVRKGDVSSAAKVLARVRDQDVESDYVKEELAEIVANNEYEMSLIPQGGYFATWFNCFRGSIWSPNSNLRRTILGTSLQMMQQWTGVNFVFYFGTTFFTNLGTISDPFLISMITTIVNVFSTPISFYTMEKIGRRPLLLWGALGMVICQFIVAIAGVVDGSNNKTVSAQIAFICIYIFFFASTWGPGARVVIGEIYPLPIRSRGVALSTASNWLWNCIIAVITPYMVDEDKGNLKSKVFFIWGSLCACAFVYTYFLIPETKGLTLEQVDKMMEETTPRTSSKWKPHGTFAAEMGMTEKDVTQTVEDIAKKA

SEQ ID NO: 97064 - DNA, 1644 bp, Candida intermedia
  CDS (1)..(1644)
atgtcacaagattcgcattcttctggtgccgctacaccagtcaatggttccatccttgaaaaggaaaaagaagactctccagttcttcaagttgatgccccacaaaagggtttcaaggactacattgtcatttctatcttctgttttatggttgccttcggtggtttcgtcttcggtttcgacactggtaccatttccggtttcgtgaacatgtctgactttaaagacagattcggtcaacaccacgctgatggtactccttacttgtccgacgttagagttggtttgatgatttctattttcaacgttggttgcgctgtcggtggtattttcctctgcaaggtcgctgatgtctggggtagaagaattggtcttatgttctccatggctgtctacgttgttggtattattattcagatctcttcatccaccaagtggtaccagttcttcattggtcgtcttattgctggtttggctgttggtaccgtttctgtcgtttccccacttttcatctctgaggtttctccaaagcaaattagaggtactttagtgtgctgcttccagttgtgtatcaccttgggtatcttcttgggttactgtactacttacggtactaagacctacactgactctagacagtggagaattcctttgggtttgtgtttcgcttgggctatcttgttggttgtcggtatgttgaacatgccagagtctccaagatacttggttgagaagcacagaattgatgaggccaagagatccattgccagatccaacaagatccctgaggaggacccattcgtctacactgaggttcagcttattcaggccggtattgagagagaagctttggctggtcaggcatcttggaaggagttgatcactggtaagccaaagatcttcagaagagttatcatgggtattatgcttcagtccttgcaacagttgaccggtgacaactacttcttctactacggtactaccattttccaggctgtcggtttgaaggattctttccagacttctatcattttgggtattgtcaactttgcttccaccttcgttggtatctatgtcattgagagattgggtagaagattgtgtcttttgaccggttccgctgctatgttcatctgtttcatcatctactctttgattggtactcagcacttgtacaagcaaggttactccaacgagacctccaacacttacaaggcttctggtaacgctatgatcttcatcacttgtctttacattttcttctttgcttctacctgggctggtggtgtttactgtatcatttccgagtcctacccattgagaattagatccaaggccatgtctattgctaccgctgctaactggttgtggggtttcttgatttccttcttcactccattcatcaccagtgccatccacttctactacggtttcgttttcactggttgtttggctttctctttcttctacgtctacttcttcgtctacgaaaccaagggtctttctttggaggaggttgatgagatgtacgcttccggtgttcttccactcaagtctgccagctgggttccaccaaatcttgagcacatggctcactctgccggttacgctggtgctgacaaggccaccgacgaacaggtttaa

SEQ ID NO: 97065 - protein, 547 aa, Candida intermedia
MSQDSHSSGAATPVNGSILEKEKEDSPVLQVDAPQKGFKDYIVISIFCFMVAFGGFVFGFDTGTISGFVNMSDFKDRFGQHHADGTPYLSDVRVGLMISIFNVGCAVGGIFLCKVADVWGRRIGLMFSMAVYVVGIIIQISSSTKWYQFFIGRLIAGLAVGTVSVVSPLFISEVSPKQIRGTLVCCFQLCITLGIFLGYCTTYGTKTYTDSRQWRIPLGLCFAWAILLVVGMLNMPESPRYLVEKHRIDEAKRSIARSNKIPEEDPFVYTEVQLIQAGIEREALAGQASWKELITGKPKIFRRVIMGIMLQSLQQLTGDNYFFYYGTTIFQAVGLKDSFQTSIILGIVNFASTFVGIYVIERLGRRLCLLTGSAAMFICFIIYSLIGTQHLYKQGYSNETSNTYKASGNAMIFITCLYIFFFASTWAGGVYCIISESYPLRIRSKAMSIATAANWLWGFLISFFTPFITSAIHFYYGFVFTGCLAFSFFYVYFFVYETKGLSLEEVDEMYASGVLPLKSASWVPPNLEHMAHSAGYAGADKATDEQV

SEQ ID NO: 97066 - DNA, 1569 bp, Candida intermedia
  CDS (1)..(1569)
atgggtttggaggacaatagaatggttaagcgtttcgtcaacgttggcgagaagaaggctggctctactgccatggccatcatcgtcggtctttttgctgcttctggtggtgtccttttcggatacgatactggtactatttctggtgtgatgaccatggactacgttcttgctcgttacccttccaacaagcactcttttactgctgatgaatcttctttgattgtttctatcttgtctgttggtactttctttggtgcactttgtgctccattccttaacgacaccctcggtagacgttggtgtcttattctttctgctcttattgtcttcaacattggtgctatcttgcaggtcatctctactgccattccattgctttgtgctggtagagttattgcaggttttggtgtcggtttgatttctgctactattccattgtaccaatctgagactgctccaaagtggatcagaggtgccattgtctcttgttaccagtgggctattaccattggtcttttcttggcctcttgtgtcaacaagggtactgagcacatgactaactctggatcttacagaattccacttgctattcaatgtctttggggtcttatcttgggtatcggtatgatcttcttgccagagactccaagattctggatctccaagggtaaccaggagaaggctgctgagtctttggccagattgagaaagcttccaattgaccacccagactctctcgaggaattaagagacatcactgctgcttacgagttcgagactgtgtacggtaagtcctcttggagccaggtgttctctcacaagaaccaccagttgaagagattgttcactggtgtggctatccaggctttccagcaattgaccggtgttaacttcattttctactacggtactaccttcttcaagagagctggtgttaacggtttcactatctccttggccactaacattgtcaatgtcggttctactattccaggtattcttttgatggaagtcctcggtagaagaaacatgttgatgggtggtgctactggtatgtctctttctcaattgatcgttgccattgttggtgttgctacctcggaaaacaacaagtcttcccagtccgtccttgttgctttctcctgtattttcattgccttcttcgctgccacctggggtccatgtgcttgggttgttgttggtgagttgttcccattgagaaccagagctaagtctgtctccttgtgtactgcttccaactggttgtggaactggggtattgcttacgctactccatacatggtggatgaagacaagggtaacttgggttccaatgtgttcttcatctggggtggtttcaacttggcttgtgttttcttcgcttggtacttcatctacgagaccaagggtctttctttggagcaggtcgacgagttgtacgagcatgtcagcaaggcttggaagtctaagggcttcgttccatctaagcactctttcagagagcaggtggaccagcaaatggactccaaaactgaagctattatgtctgaagaagcttctgtttaa

SEQ ID NO: 97067 - protein, 522 aa, Candida intermedia
MGLEDNRMVKRFVNVGEKKAGSTAMAIIVGLFAASGGVLFGYDTGTISGVMTMDYVLARYPSNKHSFTADESSLIVSILSVGTFFGALCAPFLNDTLGRRWCLILSALIVFNIGAILQVISTAIPLLCAGRVIAGFGVGLISATIPLYQSETAPKWIRGAIVSCYQWAITIGLFLASCVNKGTEHMTNSGSYRIPLAIQCLWGLILGIGMIFLPETPRFWISKGNQEKAAESLARLRKLPIDHPDSLEELRDITAAYEFETVYGKSSWSQVFSHKNHQLKRLFTGVAIQAFQQLTGVNFIFYYGTTFFKRAGVNGFTISLATNIVNVGSTIPGILLMEVLGRRNMLMGGATGMSLSQLIVAIVGVATSENNKSSQSVLVAFSCIFIAFFAATWGPCAWVVVGELFPLRTRAKSVSLCTASNWLWNWGIAYATPYMVDEDKGNLGSNVFFIWGGFNLACVFFAWYFIYETKGLSLEQVDELYEHVSKAWKSKGFVPSKHSFREQVDQQMDSKTEAIMSEEASV

SEQ ID NO: 97068 - DNA, 1641 bp, Aspergillus oryzae
  CDS (1)..(1641)
atgggtgttgagacttctgccgagcatggggagatgatcagcccagctggcgctccccaatactccagccaagaatccgtggctgctaacaagcctatggaaattggtgttgacactcccgttccccgcattaccctgcgggcgtttgttatgggtgccttcgtttctatgggtggtcttcttttcggatacgacaccggtcagatctccggtttccaagagatggataactatcttgaacgctatggtcaactgaacgatgagggtaaatattatttcagccatgtccgctccggtcttattgtcagtctgttatccatcggtaccttgattggtgctctggttgccgctcctatagccgataagcttggtcgtaaatggtctatcactttctggtgtatcatcctcaatgtcggcttgattattcagatctcttcccctgccggtaaatgggttcagatggtcatgggccgttgggtgactggtcttggcgttggtggttgctccctgctcgttcccatgtaccagggtgagagtgctcctcgccaggtccgtggtgccatgatcagttgctaccagctgttcgtcactcttggtatcttcctttcctactgcattaacttgggaaccgagcatctcgaaggcactgagcagtggcggattaccttgggtcttaccttcctctttgctctcattctcggtggtggcatggcttgcttccctgagagcccacgtttcgagttccgtcacggccgtgtcgatagtgctcgtaacaccatgtccaagctctatggtgtccccgagaaccaccgcgtcatcctccaggaaatcgaggagatccagcaacaactcgacgccgaatcccaagagcaggtgtggcacgagttcatcaccgctcctcgcatgttgtaccgtatcgccctgggtatggttctgcagtctttgcaacagctgactggtgccaactacttcttctattatggtaccactatcttccaaggtgccggtatctccaacagcttcatcacccaagttattcttggtgctgttaacttcggtaccactttcggtggtctctacattgttgagaacttcggtcgtcgcaagtctctcatcgctggtgctgctttcatgtttgtttgcttcatgatcttcgcttctattggccacttcatgttggacgttcagaaccccgaaaacactcccggacctggtaagggcatggttgttgtcgcctgtttcttcatcaccgcctacgccatgacctggggtcccatgatctgggctatctgcgccgaactgttcccttccaagtaccgtgccaagggtatggctctggccaccgcatccaactggctctggaacttcctcatcggttttttcaccccattcatcaccggtgcaattgactttgcctacggatacgtcttcgctggatgcttggctgtcgctgctctcgtcgtctacttcttcgtcatcgagggtaagggccgcactctcgaggagctcgactggatgtacgtcaacaaggtcgctccctggaagagcagcaactttgagatgccttctcttcacgaccagcagtatggcaaccagcatggtcgcaaggaatctcgctcttatcacgccgagaacgcataa

SEQ ID NO: 97069 - protein, 546 aa, Aspergillus oryzae
MGVETSAEHGEMISPAGAPQYSSQESVAANKPMEIGVDTPVPRITLRAFVMGAFVSMGGLLFGYDTGQISGFQEMDNYLERYGQLNDEGKYYFSHVRSGLIVSLLSIGTLIGALVAAPIADKLGRKWSITFWCIILNVGLIIQISSPAGKWVQMVMGRWVTGLGVGGCSLLVPMYQGESAPRQVRGAMISCYQLFVTLGIFLSYCINLGTEHLEGTEQWRITLGLTFLFALILGGGMACFPESPRFEFRHGRVDSARNTMSKLYGVPENHRVILQEIEEIQQQLDAESQEQVWHEFITAPRMLYRIALGMVLQSLQQLTGANYFFYYGTTIFQGAGISNSFITQVILGAVNFGTTFGGLYIVENFGRRKSLIAGAAFMFVCFMIFASIGHFMLDVQNPENTPGPGKGMVVVACFFITAYAMTWGPMIWAICAELFPSKYRAKGMALATASNWLWNFLIGFFTPFITGAIDFAYGYVFAGCLAVAALVVYFFVIEGKGRTLEELDWMYVNKVAPWKSSNFEMPSLHDQQYGNQHGRKESRSYHAENA

SEQ ID NO: 97070 - DNA, 1788 bp, Aspergillus oryzae
  CDS (1)..(1788)
atggggcttcctaagctgaaattacctcgcgcaaatgcagatcgagcttacaaagatgagccggacccaagaccatcggatgccgtcctccgccaaagcgcgaacggagatgatggtctggtagacacaaaaatcccttttctgacatttcggtcatttagcatgtgtgtagtcatctcaatgggtgggtttcttttcggttatgataccggtcaaatctccggatttctagagatggaggatttcctccagcgatacggtgagcaaagggcagatggtacttattatttctcgaacgttcggtcgggcctgattgttgctctgctgtcaattggcaccttaatgggcgcattggtggccgcgccgattgcggatcgggttggtcgcaaatggtgtgtcagcgggtggtgtgtgattctctgcgccgggatcacggtccagatctcttctccgacaggcaagtggtatcaagttgcgttgggtcgatgggttgctggtcttggtgtgggagccttatccctcctggtccccatgtatcaagccgagactggccccagacatattcgaggatccttagtcagtacgtaccagttgtttatcactctgggcatcttcgttgccaactgtatcaacttcggtaccgagaagaaaaccagcacggcctcctggcgaattccaatgggagtaacgtatatctgggctatcattcttgggttcggtatatcgatgtttccagaaagtccgcgtcatgactatcgaaagggcaaggtggacaaggctatttcgacgctggcaaagatgtatggtgtacccaagaaccatcgcgcgctggcgattgagttcgacgagatcaagcaaaagtatgaagaagaggtggcacgcggtcaagtctcatggatccagctattcaaggccccacgaatggcgtaccgcgttgctgtcggggtagccctgcaagccttgcagcagttgacaggtgcgaactacttcttctactacggcacgaccatcttccagggcgccggaatcgaaaacagctacgtgacgcagatgatccttggtgcggtcaattttggttccacattcctgggactctatctcatcgagaactacggccgtcgtcgctcattgatcgctggcgcgctctggatgttttgctgcttcatcgtcttcgcttctgtgggccatttctccctgaatcgggatgacccgccgtctacgaagaccgcgggtgtggtcatggtcgtgttcgcctgtctgtttattctggcattcgcaagtacctggggccccatggtgtggacgattattgctgaactatacccgtcggaataccgagctcgtgcgatgtctcttgcgacggcgtccaattggctctggaacttcctgctggcattcttcacgccgttcatcacgagtgcgatcgactttcggtacggatacgtctttgcgggttgtctcttccttgctgcaggtctggtttatttcgcagtcatggaagggaaaggtcgtaccctcgaggagatcgatacgatgtatgtgtggaaggtgaagccatggcacagctccaaatatgtctttccagaaacagagccgagcatcatggagaaacggagggcgtctcacgcttcaaaccccagtaccaacccaacgactattgacgacaatcatgagactacggtcctttcggggaaaaatataaactgtcgatcatccctcaatcttcggccgaaatctcgggggttaatcaggagagaggaaaaaacatggtcgaagctccttgcataa

SEQ ID NO: 97071 - protein, 595 aa, Aspergillus oryzae
MGLPKLKLPRANADRAYKDEPDPRPSDAVLRQSANGDDGLVDTKIPFLTFRSFSMCVVISMGGFLFGYDTGQISGFLEMEDFLQRYGEQRADGTYYFSNVRSGLIVALLSIGTLMGALVAAPIADRVGRKWCVSGWCVILCAGITVQISSPTGKWYQVALGRWVAGLGVGALSLLVPMYQAETGPRHIRGSLVSTYQLFITLGIFVANCINFGTEKKTSTASWRIPMGVTYIWAIILGFGISMFPESPRHDYRKGKVDKAISTLAKMYGVPKNHRALAIEFDEIKQKYEEEVARGQVSWIQLFKAPRMAYRVAVGVALQALQQLTGANYFFYYGTTIFQGAGIENSYVTQMILGAVNFGSTFLGLYLIENYGRRRSLIAGALWMFCCFIVFASVGHFSLNRDDPPSTKTAGVVMVVFACLFILAFASTWGPMVWTIIAELYPSEYRARAMSLATASNWLWNFLLAFFTPFITSAIDFRYGYVFAGCLFLAAGLVYFAVMEGKGRTLEEIDTMYVWKVKPWHSSKYVFPETEPSIMEKRRASHASNPSTNPTTIDDNHETTVLSGKNINCRSSLNLRPKSRGLIRREEKTWSKLLA

SEQ ID NO: 97072 - DNA, 1617 bp, Aspergillus oryzae
  CDS (1)..(1617)
atgggtgacgctgtagctccaaacgccctcgccgataccacgcgagtggaggcacccgtcaccttcaagacgtatatgatgtgtgcctttgcagcctttggtggtatcttcttcggttatgattccggttatatcaacggtgtcatgggcatgagttatttcatccaagaatttgaaggcttggatcctgccaccaccgactcggatcatttcgttgtctcatcgtggaagaaatccttgatcacatccatcttgtcggcaggtacattcttcggtgctttgattgctggtgatcttgcggactggtttggacgtcgcatcaccatcgtctccggttgtgctatcttcatcgttggtgtcgttttgcagaccgcatcaaccaccgtagctcttctcgtagtgggacgtttgattgcgggattcggtgtcggttttgtgtcggccatcattatcctgtacatgtcagagattgctcctcgcaaggtccgcggtgccattgtgtcgggttaccagttctgtatcaccattggtctgatgctggcttcttgtgtcgactatgccactcagaatcgcactgactccggttcctatcgcattccaattggcattcagattgcttgggccctcatcctcggtggggggttgctcatgctacctgaatcgccccgttatttcgtcagaaagggccagctcgacaaggcgtcccatgtcctcgctcgtgtccgtggccagcccgaggattcggagtatatcaagcaggagctagcagagatcgttgccaacaacgaatacgagatgcaagcgatgccccagggtggctacttcaccacctggctgaactgcttccgtggaagtctgttccaccccaacagcaacctccgccgtaccgtcctaggtacttctcttcagatgatgcagcaatggaccggtgtcaacttcgtgttctacttcggtaccacgttcttcacctccctcggaacaatttcgaatcccttcctgattagcatgatcaccaccatcgtcaatgtttgctcgactcccgtctcattctacaccatggagaaggttggacgtcgtcccctgctgttgtggggtgctctgggcatggttatctgccagtttattgtcgccattaccggtaccgtcgtcggtgacaagggcggcaacaacgctgcggtcagcgcggagatctctttcatctgcatttacatcttcttcttcgccagcacctggggtcctggcgcctgggttgtcatcggcgagatcttccctctgcccattcgttcgcgcggtgtggctctgtccactgcgtctaactggctttggaactgcatcatcgccgtcatcactccatacatggttgaccaggacaagggcgatctcaagtccaaggtgttcttcatctggggatccctctgcgcctgcgccttcctctacacctacttcctcatccccgagaccaagggactcaccctcgagcaggtcgacaagatgatggaggagaccacgccacggacctctgccaagtggaagcctcacaccaccttcgccgccgacatgggactcaccgagaaggacatcaccgacaaagtccacgtcgcccaccgggaagtctaa

SEQ ID NO: 97073 - protein, 538 aa, Aspergillus oryzae
MGDAVAPNALADTTRVEAPVTFKTYMMCAFAAFGGIFFGYDSGYINGVMGMSYFIQEFEGLDPATTDSDHFVVSSWKKSLITSILSAGTFFGALIAGDLADWFGRRITIVSGCAIFIVGVVLQTASTTVALLVVGRLIAGFGVGFVSAIIILYMSEIAPRKVRGAIVSGYQFCITIGLMLASCVDYATQNRTDSGSYRIPIGIQIAWALILGGGLLMLPESPRYFVRKGQLDKASHVLARVRGQPEDSEYIKQELAEIVANNEYEMQAMPQGGYFTTWLNCFRGSLFHPNSNLRRTVLGTSLQMMQQWTGVNFVFYFGTTFFTSLGTISNPFLISMITTIVNVCSTPVSFYTMEKVGRRPLLLWGALGMVICQFIVAITGTVVGDKGGNNAAVSAEISFICIYIFFFASTWGPGAWVVIGEIFPLPIRSRGVALSTASNWLWNCIIAVITPYMVDQDKGDLKSKVFFIWGSLCACAFLYTYFLIPETKGLTLEQVDKMMEETTPRTSAKWKPHTTFAADMGLTEKDITDKVHVAHREV

SEQ ID NO: 97074 - DNA, 1680 bp, Aspergillus oryzae
  CDS (1)..(1680)
atgggtgtctctaatctgatggcccggctcaagcctcaggccgaccatgaacaccaggagcactccgatactcctaccccagtcagagccgactcaaacttggagaaggataatgccatgattgacgacagccccgtcaagtatctgacatggcggtccttcatcctgggtttgtgtgtctcgatgggtggttttatcttcggttactccaccggtcaaattgctggctttacgactatgaatgatttcaagatgcgctttgcggaacaacatgcggatggaacatatgctttcagcaacgtgcgcaatggtttgattgtcggtctgttgtccattggtactatgattggcgcccttgtcgccgctcctatcgccgaccgcattggtcgcaaatactctatctccttctggtcggtgattcacatggttggtatcatcatccagatcgccaccgatgacaactgggtccaagttgctatgggtcgttgggtggccggtttgggtgtcggcgctctgtccagcatcgttcctatgtaccagagtgaatctgctcctcgtcaggtccgtggtgccatggtcagcgccttccagctgttcgttgccttcggtattttcatctcttatctcgtcaacttcggtaccgaatccatcaacggtaccgcttcctggcgtatcactatgggcattggcttcgcctggcccttgatcttgggtgttggcactctgttccttcccgagtctccccgttatgcctaccgtaacggtcgtatcgaagaagcccgtgaggttatgtgcaagctttacggcgtcggccccaaccaccggtgcatcgcccaggagatgaaggacatgaaggacaagctcgatgaggagaaggctgccggacaggctggcatcttcgaagtcttcactggtccccgtatgttctaccgtgttatgctgggaattgctttgcagtcactgcagcagctcactggcgccaatttcctcttctactatggtaacaccatcttcacttctaccggtctgaacaacagctacgtcacccagattattctgggtgccgttaacttcggcatgacccttcctggtctctatgttgttgagcacttcggccgtcgtaatagtctgatggtcggtgcctcctggatgtttatctgctttatgatctgggcctccattggtcacttcgccttggacttggagaaccctcccaacacccctcaggctggtactgccatgattgtcttcacttgcttcttcatcgtcggcttcgccaccacctggggacctattgtgtgggctatctgtggtgagatgtaccctgctcgctaccgtgctgtctgcattggtcttgccactgccgccaattggacctggaacttcctgatctctttcttcacccccttcatctccagcgctatcgactttgcctacggttacgtctttgcaggctgctgcttcgccgccgtgcttgtggtcttcttcttcgtcaacgagacccagggtcgcacccttgaggaagtcgacaccatgtacgtcctccacgtcaagccctggaagagtgccaactggacgcccccggagggtatcgtccgcgatctccacgggccccccgcttcccccaagcaggagggtcgggctgagcacagcgagcccgccaccgagatccgcgagtaa

SEQ ID NO: 97075 - protein, 559 aa, Aspergillus oryzae
MGVSNLMARLKPQADHEHQEHSDTPTPVRADSNLEKDNAMIDDSPVKYLTWRSFILGLCVSMGGFIFGYSTGQIAGFTTMNDFKMRFAEQHADGTYAFSNVRNGLIVGLLSIGTMIGALVAAPIADRIGRKYSISFWSVIHMVGIIIQIATDDNWVQVAMGRWVAGLGVGALSSIVPMYQSESAPRQVRGAMVSAFQLFVAFGIFISYLVNFGTESINGTASWRITMGIGFAWPLILGVGTLFLPESPRYAYRNGRIEEAREVMCKLYGVGPNHRCIAQEMKDMKDKLDEEKAAGQAGIFEVFTGPRMFYRVMLGIALQSLQQLTGANFLFYYGNTIFTSTGLNNSYVTQIILGAVNFGMTLPGLYVVEHFGRRNSLMVGASWMFICFMIWASIGHFALDLENPPNTPQAGTAMIVFTCFFIVGFATTWGPIVWAICGEMYPARYRAVCIGLATAANWTWNFLISFFTPFISSAIDFAYGYVFAGCCFAAVLVVFFFVNETQGRTLEEVDTMYVLHVKPWKSANWTPPEGIVRDLHGPPASPKQEGRAEHSEPATEIRE

SEQ ID NO: 97076 - DNA, 1602 bp, Aspergillus oryzae
  CDS (1)..(1602)
atggccattggcaacatttatgtcattgcggccatcgccgtcatcggcggtggtcttttcggtttcgatatctcgtccatgtctgcgattatcggtacaaacacctataagtgttatttcaacaacggaggaagtgtgacgatcaatgagaatggtgaaaaggaatgtggaggtcccgatacaatgactcagggtggtatcactgcagccatggctggtggctcctggttaggtgctctggtctctggatacctgtctgatatgctcggtcgtaagcagtcgatcatggttggttccgtgatttggtgcattggatgtattcttgtctgcgccgcccagaacattcccatgttgattgttggtcgtatcatcaacggtttcagtgtcggtatctgctccgctcaggtcccggtctacatctctgagatcgcccctcctactaagcgtggtcgccttgttggtcttcagcaatgggccatcacgtggggtatcctgatcatgttctacatttcctatggatgcagctttatcaagggcaccgccgcgttccggattccctggggtctgcagatgattcctgctatccttcttttccttggaatgatgttgcttcctgagtctccccgttggctcgcccgcaaggaccgttgggaggagtgccatgctgtccttaccttggttcatggtcacggtgacccggactctccttttgtccagagcgaattcgaggagatcaagggcatgtgcgaatttgaacgtcagaatgccgacgtgagcttcatggaactcctcaagccgaacatgatcaaccgcactcacgtcggtgtcttcacgcaaatctggtcccagcttacgggcatgaacgtgatgatgtactacattacgtatgtgtttgcgatggccggtttgaatggtaacaaccttctggtgtcgtccagtatccaatatgtgatcaatgtgttcatgaccatccctgctatcttgtggctggatcgctggggtcgccgtcccactctccttattggtgccgccctcatggcggcctggctgtacgccaatgctggtctgatggccgcacacggtcatgccgctcccccaggcggtctcaatggaacacccgcagagtcctgggaaatcaccggccctccttccaaggctgtcattgcgtgtacctacctgttcgtcgcctcctacgccatcacctggggtcctgcctcgtgggtgtaccctcccgagctcttccccctgcgtgtccgtggcaaggccaacgctctgtgcacctccttcaactgggccttcaacttcgctctgggttggttcgtcccccctgccttcgagaacatcaagtggcaggtctacatcgtcttcggtgtcttctgtactgccatgttcattcatgtatttttcatgttccccgagaccgccggtaagaccctcgaggacgtcgaggccatcttcaccgacccaactggtattccgtacatcggtattcccgcctggaagaccagaaacgaattctcgcgcggcgccaccctggagcaggttggcttcgacgaggagaagaagattggcggtactgtccagcattccgagaccgcataa

SEQ ID NO: 97077 - protein, 533 aa, Aspergillus oryzae
MAIGNIYVIAAIAVIGGGLFGFDISSMSAIIGTNTYKCYFNNGGSVTINENGEKECGGPDTMTQGGITAAMAGGSWLGALVSGYLSDMLGRKQSIMVGSVIWCIGCILVCAAQNIPMLIVGRIINGFSVGICSAQVPVYISEIAPPTKRGRLVGLQQWAITWGILIMFYISYGCSFIKGTAAFRIPWGLQMIPAILLFLGMMLLPESPRWLARKDRWEECHAVLTLVHGHGDPDSPFVQSEFEEIKGMCEFERQNADVSFMELLKPNMINRTHVGVFTQIWSQLTGMNVMMYYITYVFAMAGLNGNNLLVSSSIQYVINVFMTIPAILWLDRWGRRPTLLIGAALMAAWLYANAGLMAAHGHAAPPGGLNGTPAESWEITGPPSKAVIACTYLFVASYAITWGPASWVYPPELFPLRVRGKANALCTSFNWAFNFALGWFVPPAFENIKWQVYIVFGVFCTAMFIHVFFMFPETAGKTLEDVEAIFTDPTGIPYIGIPAWKTRNEFSRGATLEQVGFDEEKKIGGTVQHSETA

SEQ ID NO: 97078 - DNA, 1545 bp, Aspergillus oryzae
  CDS (1)..(1545)
atgttattcacacgcccctccaacgagaaaggagctgcctggccagccatcttggtcggactgttcgccgcgttcggtggtatcctctatggctacgacactgggaccatctcaggcatccagactatgccctactggatcgaggagttcgacaacccgaacgcaggccgcatcgccctaatcgtttccatcttgtcagttggcaccttcgttggtgccctcgcagcgggtatcatggcagacattactgggcgacgatggggaatcatcctgtcggccatgttgcctttcaatctcggtgtcgccctccaaactgccgctacatcgcagcctctgttcattgctggtcgcttttttgcaggtcttggagttggcctgatttctgcccagatcccgatgtaccagtccgagactctacccaaatggatcagaggcgcagttgttggatcttaccagctttgtatcacaatcggcctgttcctggctgccattgtgaattgggcaacgcagcaccggccggacagtggaagctaccgtatccctcttgcaattcaattcgcatgggctctcattcttgccggcggcctcttcttcctccccgagacccctcgttttcttatcaaaaagggcaacgacacccaagctcttcgatcattggtttttcttcgccgcttgagtgctgatgatcctgaccttcttgccgagatggaagagttgaagaacaattgggagtatgagaagtccattggctctgcttcgtaccttgaatgcttcaagggaactgctggtaaacgtaccatcacgggaatcatacttcagtcacttcagcagctggtgggtatcaatttcatcatctattatgggacaagctactttgccgagaatgtgcaaggtctgcccgactccttcatcctgcaggtgattgtcaactccattaacgtggtcatgacgcttcctgggctgtgggcaattgaccgcttcgggcgacgacctgttctactgacgggagcactcggtatgggtgtctcgcaatatattgttgcggcttgtggcgccgccaccccgacttcgaattttacgtcgcagtgcgcccagttcgcttttatttgcatatatatctctttcttcgcatctaccttcggtccctgcgcctgggttgtcacaggagagatcttctccctccagactcgtgccaaaggtctttccatgaccactgcagcaaactggttcttcaattggctactctcttacattacgccatacctcactggagcgcttaacccaacccaatcgaacgtgttctggatttggggtagcttctgctggattgcgttcgtcttcacatttaccatgatctatgagaccaagggcctgtcccttgaacaggtcaatgagctttatgaaagtgtgtcaaaggcctggaggagcgctaattaccgttctgagctccgtaggatgtctgtttctgaagcctatcgcaaggagtcggtggatgaagagacgaagccttcggaaatggcttgtgaagattctagcaaagtctga

SEQ ID NO: 97079 - protein, 514 aa, Aspergillus oryzae
MLFTRPSNEKGAAWPAILVGLFAAFGGILYGYDTGTISGIQTMPYWIEEFDNPNAGRIALIVSILSVGTFVGALAAGIMADITGRRWGIILSAMLPFNLGVALQTAATSQPLFIAGRFFAGLGVGLISAQIPMYQSETLPKWIRGAVVGSYQLCITIGLFLAAIVNWATQHRPDSGSYRIPLAIQFAWALILAGGLFFLPETPRFLIKKGNDTQALRSLVFLRRLSADDPDLLAEMEELKNNWEYEKSIGSASYLECFKGTAGKRTITGIILQSLQQLVGINFIIYYGTSYFAENVQGLPDSFILQVIVNSINVVMTLPGLWAIDRFGRRPVLLTGALGMGVSQYIVAACGAATPTSNFTSQCAQFAFICIYISFFASTFGPCAWVVTGEIFSLQTRAKGLSMTTAANWFFNWLLSYITPYLTGALNPTQSNVFWIWGSFCWIAFVFTFTMIYETKGLSLEQVNELYESVSKAWRSANYRSELRRMSVSEAYRKESVDEETKPSEMACEDSSKV

SEQ ID NO: 97080 - DNA, 1593 bp, Aspergillus oryzae
  CDS (1)..(1593)
atgggcttcatgttgaagaagccggatgatgctacgggctctgctgcccctgccatcgttattggcttgtttgttgcctttggtggtgttttgttcggttatgataccggcaccatcagtggcatccttgccatgccttactggcgcaagctgttctccacgggctatatcaacccgtcagacaactatcccgatgtgacctcctctcaatcctccatgatcgtgtctctcctgtctgcaggaactttcttcggtgcccttggtgcagcacccattgctgattacttcggtcgtcggcttgctatgatcatcaacacatttgttttctgctttggtgtcatccttcagaccgctgctactgctatcccgttatttgttgcgggaagattctttgcaggcctaggtgttggattgctctctgcaacaatcccgctgtaccagtccgaaaccgctcctaagtggatccgtggtaccatcgttggtgcctaccagctggctatcaccattggattgctccttgctgccatcgtgaacaattccactaagggccgtgacgatactggttcctaccgtatccctgtcgctgttcagtttgcctgggctattatcctggttgttggcatgatcgtactccctgagacgcctcgcttcttgatcaagaagggcaagcatgaagctgctgccaaggctctctcacgccttcgccgcatcgatgtcaatgatcccgccattgtggaggagctggctgagatccaggccaaccatgaatatgaactcagtgtgggcaatgccagctacctctccattcttcgtgggagtatcggcaagcgactggccactggctgtgccgttcagggtctgcagcagctggctggagtcaacttcatcttctactacggaactactttcttcgaacactccggtatcaaggacggatttattattactttgatcaccaacattgttaatgtcgtctcaaccttccctggtctctatatggtcgagaaatggggtcgtcgtcctcttctcttgttcggtgctgtcggcatgtgtgtctctcaactcatcgttgccattgttggcaccgccaccacttccgacgtcgcaaacaaggtgctgatcgccttcgtctgtgtctacatcttcttcttcgcttgctcatggggttgcaccgcgtgggtggtgaccggtgagctcttccctctcaaggctcgtgccaagtgtctctcaatcacgaccgccaccaactggctcctcaactgggccatcgcatatgctaccccttatatggttaactccggcccgggcaacgccaacctgcagtccaaggtgttcttcatctggggtggattctgcttcattgccggtattttcgtctacacctgcatctacgagaccaagggtcttaccttggagcaggttgatgagctttacgctaagattcctgtggcctggcgctcccatgaatttgttccatccgtcagctatgctgacgttcgtgacgttgccgccggcaaagtgtctggcaacctcgctgatctagaggccgacgcccagatgaagcgtgatatggagcatgttgagaaggcctag

SEQ ID NO: 97081 - protein, 530 aa, Aspergillus oryzae
MGFMLKKPDDATGSAAPAIVIGLFVAFGGVLFGYDTGTISGILAMPYWRKLFSTGYINPSDNYPDVTSSQSSMIVSLLSAGTFFGALGAAPIADYFGRRLAMIINTFVFCFGVILQTAATAIPLFVAGRFFAGLGVGLLSATIPLYQSETAPKWIRGTIVGAYQLAITIGLLLAAIVNNSTKGRDDTGSYRIPVAVQFAWAIILVVGMIVLPETPRFLIKKGKHEAAAKALSRLRRIDVNDPAIVEELAEIQANHEYELSVGNASYLSILRGSIGKRLATGCAVQGLQQLAGVNFIFYYGTTFFEHSGIKDGFIITLITNIVNVVSTFPGLYMVEKWGRRPLLLFGAVGMCVSQLIVAIVGTATTSDVANKVLIAFVCVYIFFFACSWGCTAWVVTGELFPLKARAKCLSITTATNWLLNWAIAYATPYMVNSGPGNANLQSKVFFIWGGFCFIAGIFVYTCIYETKGLTLEQVDELYAKIPVAWRSHEFVPSVSYADVRDVAAGKVSGNLADLEADAQMKRDMEHVEKA

SEQ ID NO: 97082 - DNA, 1629 bp, Emericella nidulans
  CDS (1)..(1629)
atgggcattctcttcaaaaagcccgaagggaccgagggcaaggcatggcctgccattttgatcagcggcttcgtcgcattcgggggaattctattcggctatgacactggcacgatcagtggaatccttgccatgccgtactgggctcaaaccttttctacaggctaccgagacagcaccggccagttgaacgtaacctctagccagtcctctgccatcgtctcaatcctctcggccggaacattcttcggtgccctgggtgccgcgcctgtgggcgacatcatcggacgtcgttggggcctcattgcgtcaaacggtgtctttgtgctgggtgttgtcctacagacgattgccacctccatcccgccgttcctcgcaggtcgcttctttgccggattgggggttggtcttatatctgcgttggttcccctctaccaatccgagaccgcaccgaaatggatccgcggattcatcgtgggctcctaccagttctccataaccatcggcctccttcttgcctcagttctcaacaacgcaacccaccaccgcaacgactcgggctcctaccgcatcccaatcgccgtacaatttgcctggtccatcatcctcgtcggaggcatgcttatcctccccgaaacccctcggtacctgatcaagcgcgacgacaccaaagccgctgctctttccctctcgaagctccgccgtctcccgcaagaccacgagtccatccgccaggaactgtcggagatccaagctaaccaccagttcgaagtcagcctgggcaagtccgggtacgccgagtgtttccgggggagcctcctgaagcgtttgctcacggggtgtggcctgcaagcgctgcagcagctgaccggtatcaatttcatcttctactacgggacgcagttcttcaagaactccggattcaagaacgagtttgtcatcacgcttatcacgaactgtgtgaatgtgggctcgacgatccccggtctgtacgccatcgataaatggggtaggaggcctgtgcttcttacgggggcgattgggatggctgtgtctcagttgcttgttgccgtcctgggaacgacgacgactggccaggatgctcaggggaatattattgtgcacaatgctgcggcgcaaaaggccgcgattgcgtttatctgtctctacatcttcttctttgcggcttcgtgggggccaattgcttgggtcgtaacaggcgaaatcttccccctcaaaacccgcgcaaagtctctctccatgacgaccgccacaaactggctcctaaactgggcactgagcttcgcaaccccgtacttggtaaactacggtgacggaaacgcaaacctacagtccaagatcttcttcatctggttcggctgctgcttcctctgtattgggtttgtgtactttatgatctatgagacgaaggggcttacccttgaagaggtggatgagctttatcttgaggttaagagcgcgagggaaagcgtcagctggagtccgaaggggacttttgcgagagttgcggagaaggggaatggtagtgcaggtattctagagcgcaccgagaagggggatgttggggggcatagggagattggcgcgcctgatggggtgtcggtctag

SEQ ID NO: 97083 - protein, 542 aa, Emericella nidulans
MGILFKKPEGTEGKAWPAILISGFVAFGGILFGYDTGTISGILAMPYWAQTFSTGYRDSTGQLNVTSSQSSAIVSILSAGTFFGALGAAPVGDIIGRRWGLIASNGVFVLGVVLQTIATSIPPFLAGRFFAGLGVGLISALVPLYQSETAPKWIRGFIVGSYQFSITIGLLLASVLNNATHHRNDSGSYRIPIAVQFAWSIILVGGMLILPETPRYLIKRDDTKAAALSLSKLRRLPQDHESIRQELSEIQANHQFEVSLGKSGYAECFRGSLLKRLLTGCGLQALQQLTGINFIFYYGTQFFKNSGFKNEFVITLITNCVNVGSTIPGLYAIDKWGRRPVLLTGAIGMAVSQLLVAVLGTTTTGQDAQGNIIVHNAAAQKAAIAFICLYIFFFAASWGPIAWVVTGEIFPLKTRAKSLSMTTATNWLLNWALSFATPYLVNYGDGNANLQSKIFFIWFGCCFLCIGFVYFMIYETKGLTLEEVDELYLEVKSARESVSWSPKGTFARVAEKGNGSAGILERTEKGDVGGHREIGAPDGVSV

SEQ ID NO: 97084 - DNA, 1563 bp, Tuber borchii
  CDS (1)..(1563)
atgggtttcatcatcaagagaccagagggtgagtctggcaaagctttgccggctattctcataggtctcttcgtcgcctttggtggtatcctttttggatatgatactggtaccatcaatggtatccttgccatggacttcttccagagtgagttcgctacagatggaaggaaagaattgacctcgagtcaaacctcgttaattgtccctatcttatctgctggtaccttctttggagctctctgtgcctctcccttcggtgatatcttgggtcgtcgtatgggtcttattgcctcttgcctggttttctccatcggtgttgccctccaggttgctgctaccgctattcctcttatggctgctggtcgtgtaattgctggtcttggtgtcggtctagtctccgcactggtacctctctaccaatccgagtcagctccaaagtggatccgaggatccatcgttggttgttaccaattggctatcaccattggtctcctcctcgcagcttgcgccaaccagggaacccacgcccgaaataatcacggttcctatcgtatccccctggccattcagttcgtctgggctgccatcttggccggtggtatgttcatcctcccggagaccccccgttactatatcaagaaggacaacatggaggctgccgcaaagagtatgagccgtctccgctctctcccagccgaccaccccgctatcattgaggagttgaacgagatcaaggctatccacgacttggagatgcaagcgaccggggaggctacttatttagactgcgtcaagcccgacatgatcaagagattgttgaccggatgcggaattcaggccctccagcaacttactggtatcaacttcatcttctattacggaactcaattcttcaagaacgctggtatcaagaacgctttcctcatcggcctcatcactaacttggtcaatgtcatctctactttccccggtctttggatggttgagaagatgggtcgtcgcaatctcctcctcttcggtgccatcggtatgtgcgcctgtcaattcattgtcgcaattgtgggtattactactgtcagcgccatcgcaaacaatgtcctcattgcgttcgtctgcttctacatcttcttcttcgcctgctcttggggtccctgctcatgggtcgttaccggtgagatctaccctcttaaggtccgtgccaagtgcctctccatttccaccgcaaccaactggcttctcaattgggctatcggtttctcaactccttacctcgtcgccgagggtccgggcaaacctaacctcggaactaaaatcttcttcgtctggggttcatgctgcttcctctgtattgctttcgtttacctcttcatctacgagaccaaggggctctccctcgagaatgttgaccaactctacatgaccgtgggtcatgcatgggagtccaagaaattcactccatcagtttcctacaatagcgacaaaatgctttccaacggacacggggctgacggaaagtcctctgagctcgcccacattgagggcgggcacggcgaggtttag

SEQ ID NO: 97085 - protein, 520 aa, Tuber borchii
MGFIIKRPEGESGKALPAILIGLFVAFGGILFGYDTGTINGILAMDFFQSEFATDGRKELTSSQTSLIVPILSAGTFFGALCASPFGDILGRRMGLIASCLVFSIGVALQVAATAIPLMAAGRVIAGLGVGLVSALVPLYQSESAPKWIRGSIVGCYQLAITIGLLLAACANQGTHARNNHGSYRIPLAIQFVWAAILAGGMFILPETPRYYIKKDNMEAAAKSMSRLRSLPADHPAIIEELNEIKAIHDLEMQATGEATYLDCVKPDMIKRLLTGCGIQALQQLTGINFIFYYGTQFFKNAGIKNAFLIGLITNLVNVISTFPGLWMVEKMGRRNLLLFGAIGMCACQFIVAIVGITTVSAIANNVLIAFVCFYIFFFACSWGPCSWVVTGEIYPLKVRAKCLSISTATNWLLNWAIGFSTPYLVAEGPGKPNLGTKIFFVWGSCCFLCIAFVYLFIYETKGLSLENVDQLYMTVGHAWESKKFTPSVSYNSDKMLSNGHGADGKSSELAHIEGGHGEV

SEQ ID NO: 97086 - DNA, 1689 bp, Emericella nidulans
  CDS (1)..(1689)
atgggtgtggacatcaagggcctcttcaagcccaaagctgaacaacaagaacactcccaagccacaacgccttcaaggaccgactcaattgcggagaaggacaatggcatcatcgacgacagccctgtcaagtacctaacatggcggtcattcatcctgggtatcgttgtgtccatgggtggtttcatcttcggttactctactggtcaaatttccggcttcacaacaatggcagatttcaagaagcgcttcgccgagcgccaagcaaacggcgagtacgtcttcagcaacgtccgcaacggtctaatcgtcggtcttctctgcattggaaccatgatcggagccctcgtcgccgcccccatcgccgaccgcattggccgcaaactctccatgtccttctggtcgatcatccacatcgtcggtatcattatccagatcgccactgactccaactgggtccagattgccatgggccgttgggttgccggtctcggtgtcggtgccctctccagcgtcgtccccatgtaccaatccgaagctgcaccccgccaggtccgtggtgccatgatctcggccttccagcttttcgtcgcctttggtatcttcatctcttatatcatcaactacggtaccgagtcgatccaatccactgcctcgtggagaatcaccatgggcatcggtttcgcttggccactgatcttaggtctcggagctcttttcctgcccgagtccccccgttacgcttaccgtcttggccgtattgacgaggcccgcaaggtcatgaccaagctctatggtgttgaggttaaccaccgcgttgtcgtccaagaaatgaaggacatgaaggataagctcgaggaggagcgcgctgctggtgttgctccctggcacgaggttgtgactggcccccgtatgctctatcgtactcttcttggtattgctctgcagtccctgcagcagctctctggcgcaaacttcatcttctactacggtaactccattttcacctccaccggtctcaacaacagttacgtcacccagatcattcttggtgccgttaacttcggtatgaccctgcctggtctgtacattgtcgagcactttggtcgccgtgctagtctgatggtcggtggtgcctggatggccatctgcttctacatctgggcttctgtgggcaactccgttcttgatcttgacaacccgcagaacacccccaaggccggagccgccatgatcgtgttcacctgcttcttcatcgccggtttcgccaccacatggggtcccatcgtctggtccatctgctctgagatgtaccccaaccgcagccgcgccacaagcattggcattgccacttgtgccaactggacatggaacttcctgatctccttcttcaccccatttatctcaggctccatccactttgcctacggctacgtgtttgcctcctgctgtgttgttggtgtccttatcgtcttcttcttcgtcaacgagacccagggccgtaccctcgaggaagtcgacaccatgtatgtcttgcatgttgtcccctggaagagtgcttcctgggttcccgatgagagcatcgtccgtgatctccaccctggttccgatgctaacaagactgagggccttgggcaggcggagcatggtgaggagagcaggccggagcctgtggagattcgggagtga

SEQ ID NO: 97087 - protein, 562 aa, Emericella nidulans
MGVDIKGLFKPKAEQQEHSQATTPSRTDSIAEKDNGIIDDSPVKYLTWRSFILGIVVSMGGFIFGYSTGQISGFTTMADFKKRFAERQANGEYVFSNVRNGLIVGLLCIGTMIGALVAAPIADRIGRKLSMSFWSIIHIVGIIIQIATDSNWVQIAMGRWVAGLGVGALSSVVPMYQSEAAPRQVRGAMISAFQLFVAFGIFISYIINYGTESIQSTASWRITMGIGFAWPLILGLGALFLPESPRYAYRLGRIDEARKVMTKLYGVEVNHRVVVQEMKDMKDKLEEERAAGVAPWHEVVTGPRMLYRTLLGIALQSLQQLSGANFIFYYGNSIFTSTGLNNSYVTQIILGAVNFGMTLPGLYIVEHFGRRASLMVGGAWMAICFYIWASVGNSVLDLDNPQNTPKAGAAMIVFTCFFIAGFATTWGPIVWSICSEMYPNRSRATSIGIATCANWTWNFLISFFTPFISGSIHFAYGYVFASCCVVGVLIVFFFVNETQGRTLEEVDTMYVLHVVPWKSASWVPDESIVRDLHPGSDANKTEGLGQAEHGEESRPEPVEIRE

SEQ ID NO: 97088 - DNA, 1563 bp, Cryptococcus neoformans var
  CDS (1)..(1563)
atggcccccaggagttccaagaaggctttgaccctctgtcttttccagagtttggcgggtgtcattttcggatggagtaattctgaaggttctggtctgttctccatgtcaaagtaccaagaacgattcggtgaatgtgtcgacggcgtttgcaccctttcaactactcgacaatctgccattaccggtcttttgtcagtcggcgctgtcattggtgctgttggttccggttctattgctgaccgattcggtttgcgattgacctgtatggttttcatcttcatctacctttgtggtgctgccatcgagacttctgcctttaacacctatggtcaactctgcgttgctcgtcttctcaccggtctcggtgtcggtgctacctctggtcttgttcccgttttccaggctgaggcttctcctcctcgataccgaggtctcgtcactggttctttccagctttgtgttactcttggtatctggggtgttgccatgaccaactggggtatgagctcttatgccggtgatgtctcatggcgaatccccgtatctcttcaaatggtctgggctgctttgttgctagttggtttcctcttttcccccgagtctccccgattccttgccaagaagggcagatgggaacattgccgaaagaaccttgccaatctccgtggtcttcctgtcgatcaccctgacatcgataccgagatggaggaagtccgtgaggctaccatcaaggaccaggagcgcggtcaggccagctatgttgaatgcttctccactaaggaccgaattctctggcgaactatgattggtatctgtgtccagatcgggcagcaaatcaccggtgtcaactttttcttctcttacggtgtccagttcgcccagactgccggtcttgacgatacctatgtcttccagatcattctcgcttccgtcaacgtcctcttctctttccccggtattctcgctgtcgaccgagctggtcgacgacctatccttcttatcggtggcattctcatgtttattggtcaaatcgttgtcggtgctgtctccaaagcctaccctgatgacaagattgccggtgatgtcctcattgcctttacctgtcttttcattgcgtcctttgcgtcatcttggggtcctatcgcctgggttgtttgcggtgagactttccccatcaggttgtcttctctgtgtgtcactctcggtaccggtgccaactggctcttcaacctcatcatcgcctttgctgctcctcagatccaggcccgaattggtactggtatcacttttgtttgggccggctgtctcgcgatttctgtttcttttgccttcttctgcattcctgagacgagatcgatgtccatcgaacaggtagatgcgctctatctctctcacactcccgcttggcgatctcacaaatttgtggatgagcagctggctagggctcaaaatgcgcaagagaagcactactctcgatctatccacgctgagaacgagcaggtcaaatctagccaacagactagcgctcgaaccagcgctgaggacgacaggattgtctaa

SEQ ID NO: 97089 - protein, 520 aa, Cryptococcus neoformans var
MAPRSSKKALTLCLFQSLAGVIFGWSNSEGSGLFSMSKYQERFGECVDGVCTLSTTRQSAITGLLSVGAVIGAVGSGSIADRFGLRLTCMVFIFIYLCGAAIETSAFNTYGQLCVARLLTGLGVGATSGLVPVFQAEASPPRYRGLVTGSFQLCVTLGIWGVAMTNWGMSSYAGDVSWRIPVSLQMVWAALLLVGFLFSPESPRFLAKKGRWEHCRKNLANLRGLPVDHPDIDTEMEEVREATIKDQERGQASYVECFSTKDRILWRTMIGICVQIGQQITGVNFFFSYGVQFAQTAGLDDTYVFQIILASVNVLFSFPGILAVDRAGRRPILLIGGILMFIGQIVVGAVSKAYPDDKIAGDVLIAFTCLFIASFASSWGPIAWVVCGETFPIRLSSLCVTLGTGANWLFNLIIAFAAPQIQARIGTGITFVWAGCLAISVSFAFFCIPETRSMSIEQVDALYLSHTPAWRSHKFVDEQLARAQNAQEKHYSRSIHAENEQVKSSQQTSARTSAEDDRIV

SEQ ID NO: 97090 - DNA, 3229 bp, Torulaspora delbrueckii
  CDS (986)..(2689)
accaacctaccacatttggttatgacactgtggccagtctacaagatagcgtgatagatcccaacctggtaattgtacattctgggatggttgttggatattattcacgcaaattgtggtgctattcgtggttagcagccttgagccgatcttgtttacctttcgggaagctcatcgacaaggcttggcggaagatggaagaaaaaaacggaaaaactttttgtaggatcgcacgaattcttccgtgaatgttcacccagtttttccgtagatggtaagtttttccggagggcgagggacccccacctaaattaatgagaacgcgctggcagctgaccagcagccaacaatttctgagcgagtgtgtgtgtgtgtgtgtgtgtgactaacgaggtagtttcactttttcgtatagccagaattttatggtatgtttgagagcacaacagctcgaaatacactggttcaatatgccagcttagcagcaataatagctactccttgattactatctcatttactatgggttgactacaagttgaggaatttagtggtccggggctagcggggccccacaggctatggtataccatggagaatttacaaggagaatcctggattaaatctcgctgcgtcgctccactatcataggaacattgtttttccgccacgacgttttctacgccctaccgcgtttgcggtttttccgtatttttccggctatactaaaaacgcgtggcggattaatatggaaaatcttctgattcctccacagcagtacggaaaatagttgttccaagcgcccatctccatgtttttccgaagataatatcccgctgtcatctaatagtgagggaagatcgaaatgtataagaataacgaggttttgggtaggattgttcaggttctctcgaatattattctgtgctttttgattatctccacagatcaaaaataaattcaatcagcattgaataaaaataaaatgtctactacagagcatacaccagttgaccatttgtcgccagctgtgtctgcatcaggttctgggttatctaccccatctaataaagccgaaagagatgatataaaagatttcgacgctgccgctgatagagaagctgccgttgatataccaaagagaccagcttcttcttacatcggtgtctccattttgtgtttaatggttgcttttggtggtttcgtcttcggttgggatactggtactatttctggttttgtgaacttgtctgatttcctccaaagattcggtcaaagaagcaaggacggtgtttactacctgtccaaggttagaatgggtttaattgtttctatcttcaacattggttgcgctatcggtggtattattctatccaagattggtgatatatatggtcgccgtatcggtctagttgctgttactgtcatttatgtcgttggtatcttgattcaaatctgttctttcaacaaatggtaccaatactttatcggtagaattatctctggtctaggtgttggtggtatcgctgttttgtctccaatgttgatttccgaagtttctccaaagcaaattagaggtactctagtcgcttgttaccaactgatgatcactctaggtatcttcttgggttactgtactaactacggtaccaagacatacaatgactccactcaatggagagtcggtctaggtctatgtttcgcttgggctatctttatgattggtggtatgcttttcgttcctgaatctccacgttacctggtcgagcatggtaatattgaagaggccaagcgctctctatccaggtccaacaaactttctgttgatgatccagctgtgctagctgaattggatgccatttccgctggtgtggaagccgaaaaattggcaggtagcgcttcctggggtgaattgttctccactaagaccaaggttttccaacgtttgattatgggtgtcatgcttcaatctctacaacaattgactggtgataactacttcttctactacggtaccactgtcttcaagtctgtcggtttgaaagattctttccaaacttctatcattattggtgttgtcaacttcttctccactttcgtcggtatcttctgtatcgaaagatttggtcgtcgtacttgtttgctatggggtgccgcttccatggtctgttgtttcgtcgtgtttgcatctgtcggtgttacgaagctatggccagaaggtcctagccatcaagatatctcttccaagggtgctggtaactgtatgatcgtctttaccatgtttttcatcttctgtttcgctacctcttgggctggtggttgttacgttatcgtctctgaatctttcccattgagagttaagtctaagggtatggctattgctaccgctgctaactggctatggggtttcttaattgctttcttcactccattcattactggtgccattaacttctactacggttacgtcttcatgggatgtctagttttcggttacttctacgttttcttctttgttccagaaactaaaggtttgaccttggaagaagtggagaccatgtggctcgaaggtgtcctaccatggaagtctgctgcttgggttccaccagacagaagaggtgctgactacaacgctgaagaaatggctcacgatgataagccaatgtacaagagatttttctccaaataagtctctgagctttaatccatacatttcactgatcttttaatgacttttttttacgaccatcttttatgatacatttaagtaaatcagataaatatcgaataacacaactacattctacatttaaaaaatgaggctaaagactactccaataggtgttttatgcatcaatagctttatgcatttgatttaactctattatttaattttattataatttattttatttattttgacgctgacgccgacggaaaaaatttcgcctaatactcatcgcttgtcgattgaaatttcaagcgcacttatcagttctagtgaacagtcaattttgatattgatacttgtttatgttcaagagagtttcaagtactcttgtatcattacagaactgtcttttttcacagtttcgtggacaattgccgaagaacgctagaatctcgttgcacatatcgagagctactagtacactaatgagcgctccagctaccaataccatctctgcgcaattgcagaacctctccattcaagagcccacaaaagtgg

SEQ ID NO: 97091 - protein, 567 aa, Torulaspora delbrueckii
MSTTEHTPVDHLSPAVSASGSGLSTPSNKAERDDIKDFDAAADREAAVDIPKRPASSYIGVSILCLMVAFGGFVFGWDTGTISGFVNLSDFLQRFGQRSKDGVYYLSKVRMGLIVSIFNIGCAIGGIILSKIGDIYGRRIGLVAVTVIYVVGILIQICSFNKWYQYFIGRIISGLGVGGIAVLSPMLISEVSPKQIRGTLVACYQLMITLGIFLGYCTNYGTKTYNDSTQWRVGLGLCFAWAIFMIGGMLFVPESPRYLVEHGNIEEAKRSLSRSNKLSVDDPAVLAELDAISAGVEAEKLAGSASWGELFSTKTKVFQRLIMGVMLQSLQQLTGDNYFFYYGTTVFKSVGLKDSFQTSIIIGVVNFFSTFVGIFCIERFGRRTCLLWGAASMVCCFVVFASVGVTKLWPEGPSHQDISSKGAGNCMIVFTMFFIFCFATSWAGGCYVIVSESFPLRVKSKGMAIATAANWLWGFLIAFFTPFITGAINFYYGYVFMGCLVFGYFYVFFFVPETKGLTLEEVETMWLEGVLPWKSAAWVPPDRRGADYNAEEMAHDDKPMYKRFFSK

SEQ ID NO: 97092 - DNA, 1857 bp, Populus tremula x Populus tremuloides
  CDS (44)..(1552)
ctagttaatttggactccgaggaggagttaatcaaaggaggaaatggccggaggaggttttgttgccaatggacctgccagcggctttaacggtaagataactgtgccggtggtgatcacttgcatcgttgctgcatcaagtggtctcattttcggctatgacattgggatttcaggaggtgtaacaacaatggcaccatttctaattaaatttttccctgaggtattcagaaaggcatcagaggccaaaacaaacatgtattgtcaatttgatagccaagttttaacagctttcacatcatcactctacatagcagggctagcttcttcccttgtagctggccgcctcactgcagcagtgggccgcaagaacaccatggtgattggtggctgcactttccttgccggtgccgccatcaatggtggcgctgccaatattgccatgctcctacttggtcgtattttgcttggatttggggttggtttcactaaccaggcaactcctgtttacctatcagaggtagcacctccaaaatggcgtggtgcgttcagcactggcttccagttttttattggcgttggggtagtagcagccaattgcataaattttggaatggcgaagcatagctggggatggcgtttctccctcggcctcgccgtcgtacccgctgctataatgacaactggtgcgctcttcatctcagatacgccaagtagcctagtggagcgtggcaagatcgaacaagctcgacattctctgaccaaagttcgaggaatcaacagtaacgtggacgctgaactagctgatcttcttaagttcaatgagatggcaaaagatgccaagaaggaaccttttttgacaatattggagaggcagtacaggcctcacctggtgatggcaattgctataccttttttccaacagctaactgggattaacatcattgcattctacgcgccagttatttttcaatcagttggctttggaagcgattcggcattaattgcagctattgtgctaggattagttaatcttggttcgatccttgtctccacggggatggttgaccggcatggtcgaagatttctgttcataattggagggattcaaatgttcatctgtcaggttgcggtgaccatagtgctggctgtcactacgggcatttcaggcacgaagcacatctccaagggccacggcgttttattacttgtttttatgtgcatctatgctgctggttttggttggtcgtggggtccccttagctggctcgtgccaagtgaaatatttcctatgaaaattcgatccacaggccaaagcataactgtcgctgtgaattttgctactacatttgtgctatcacaaacctttttgaccatgctatgtcacttcaaatttggcactttcctattctatgctggttggattgccttgatgacggtttttatagtacttttcttgccggagacaaaaggaattcccttggactcgatgcatgaagtgtggcaacggcactggtattggggtcggtttgttcgaggcggtgggaggtaaatcttggcctaacaaaatttggttttgagatttgctcaattgaatgctggaagaaatattaacaaaagtaaaatcctgttctcttttctcccacgcaccgttctcttaccagacgggtctctgaagcattgtaagagttcgtatcatgtaagattatatgttttgcatctagtacgcagtagttcgttgctccggaccttgagcaagacaggggaggaggaggtgatcaagggtttcctgttcaattacaaattagtcttgtaatttatcaaaattaattaaatagctctttgattattgaaaaa

SEQ ID NO: 97093 - protein, 502 aa, Populus tremula x Populus tremuloides
MAGGGFVANGPASGFNGKITVPVVITCIVAASSGLIFGYDIGISGGVTTMAPFLIKFFPEVFRKASEAKTNMYCQFDSQVLTAFTSSLYIAGLASSLVAGRLTAAVGRKNTMVIGGCTFLAGAAINGGAANIAMLLLGRILLGFGVGFTNQATPVYLSEVAPPKWRGAFSTGFQFFIGVGVVAANCINFGMAKHSWGWRFSLGLAVVPAAIMTTGALFISDTPSSLVERGKIEQARHSLTKVRGINSNVDAELADLLKFNEMAKDAKKEPFLTILERQYRPHLVMAIAIPFFQQLTGINIIAFYAPVIFQSVGFGSDSALIAAIVLGLVNLGSILVSTGMVDRHGRRFLFIIGGIQMFICQVAVTIVLAVTTGISGTKHISKGHGVLLLVFMCIYAAGFGWSWGPLSWLVPSEIFPMKIRSTGQSITVAVNFATTFVLSQTFLTMLCHFKFGTFLFYAGWIALMTVFIVLFLPETKGIPLDSMHEVWQRHWYWGRFVRGGGR

SEQ ID NO: 97094 - DNA, 1722 bp, Saccharomyces mikatae IFO 1815
  CDS (1)..(1722)
atggcttttgaagagaacaataagcctgttgcttcagagcaaccccaagctgctgaagatttagtgtcttcattcagtaaagattcacacttaagtgcacaatctcaaaaatattccaatgatgaattgaaagctggcgaggcaaaccctgaagggtctgaaagtgtgcccatggagatacccaagaagcctatgtctgagtatgtaactgtttctctgctatgcttgtgtgtcgccttcggcggcttcatgtttggctgggataccggcaccatatctggttttgttgctcaaacagacttcttgagaagatttggtatgaaacacaaggatggaacccattatttgtcaaatgtcagaactggtttaattgtcgccattttcaacattggttgtgcctttggtggtattattctttccaaagctggcgatatgtatggccgtaaaaagggtctttcaattgttgtttccgtttatatagtcggaattatcattcaaattgcctccatcaacaaatggtaccaatattttatcggaagaattatctctggtctaggtgtcggtggtattgccgtcttatctcctatgttgatctctgaaattgccccaaaacatttgagaggtacactagtttcctgttaccagctgatgattactgcaggtattttcctaggctattgtactaactatggtacaaagaactattcgaactcagtccaatggagagtaccattggggctatgtttcgcttggtcattattcatgattggcgctttaacgctggtccctgaatccccacgttacttatgtgaaatgaatagggtcgaagatgcaaagcattctattgccaagtctaacaaagtgtcaccagaagatccagctgttcaagccgagttggatctgatcatggcgggtgtagaagctgaaaaactggctggcaatgcgtcatggggtgaattattttctacaaagaccaaagtcttccaacgtttgttaatgggtgtacttgtccaaatgttccaacaattgactggtaataactacttcttctactacggtaccattgtcttcaagtcagttggtcttaatgattcatttcaaacttccattgtcattggtgtggtcaactttgcttccactttcttcagtttgtggactgttgagaacttgggtcgtcgtaagtgtttgcttttaggcgccgccaccatgatggcctgtatggttatcttcgcttctgttggtgtaaccagattatatcctcatggtaagagccaaccttcttccaagggcgctggtaactgtatgattgtcttcacctgtttttatattttctgttatgccacgacttgggcaccagttgcctgggttattactgcagaatcattccccttgagagtcaagtcgaaatgtatggccatggcctcagcttccaattgggtatggggcttcttgattgcattcttcactccatttatcacctctgccattaatttctactacggttatgtctttatgggctgtttagttgctatgttcttttatgtttttttctttgttccagaaaccaagggcctgtcgttggaggaaatacaagagttatgggaagaaggtgttctcccatggaaatccgaaggctggatcccctcctctagaagaggtaatgattataatttggaagatttacaacatgacaacaaaccatggtacaaagccatgctataa

SEQ ID NO: 97095 - protein, 573 aa, Saccharomyces mikatae IFO 1815
MAFEENNKPVASEQPQAAEDLVSSFSKDSHLSAQSQKYSNDELKAGEANPEGSESVPMEIPKKPMSEYVTVSLLCLCVAFGGFMFGWDTGTISGFVAQTDFLRRFGMKHKDGTHYLSNVRTGLIVAIFNIGCAFGGIILSKAGDMYGRKKGLSIVVSVYIVGIIIQIASINKWYQYFIGRIISGLGVGGIAVLSPMLISEIAPKHLRGTLVSCYQLMITAGIFLGYCTNYGTKNYSNSVQWRVPLGLCFAWSLFMIGALTLVPESPRYLCEMNRVEDAKHSIAKSNKVSPEDPAVQAELDLIMAGVEAEKLAGNASWGELFSTKTKVFQRLLMGVLVQMFQQLTGNNYFFYYGTIVFKSVGLNDSFQTSIVIGVVNFASTFFSLWTVENLGRRKCLLLGAATMMACMVIFASVGVTRLYPHGKSQPSSKGAGNCMIVFTCFYIFCYATTWAPVAWVITAESFPLRVKSKCMAMASASNWVWGFLIAFFTPFITSAINFYYGYVFMGCLVAMFFYVFFFVPETKGLSLEEIQELWEEGVLPWKSEGWIPSSRRGNDYNLEDLQHDNKPWYKAML

SEQ ID NO: 97096 - DNA, 1707 bp, Vitis vinifera
  CDS (127)..(1629)
tataccccagcctcgaggggcaggtacaaaacaaactaggggtcatgacgcccttgctactcggaagacagtagtaagtcccgtttggactgcgagagagtgaaagaagggagaagaggagacaagatggcagtggggggtttcgccgctgacgacaattccagggccttcagtggcaaggtaacagcgtcggtggtgatcacctgcatcgttgccgcatctggtggcctcatttttgggtatgacatcggaatttcaggaggtgtaacaacgatgcaaccctttcttaagaaattcttcccggtggtactgaggaaagcggcggacgccaagaccaacatatactgtgtgtatgacagccacgtcttaacagcattcacatcctcactgtacatagcggggttagcagcgtccctggtggctagtcgcctcaccagagcagtgggacgtagaaacacaatgataattggtggtttgactttcctgattggcgctgctctcaatggtggggccgaaaatgttgccatgctcatcttgggccgtatattgctgggatttggtgttggtttcactaaccaggcaacccctatctacctctcggagatggcgccaccgaaatggcgcggtgctttcggcacaagttttcaattcttcataggcataggggtggtggtagccaattgcctaaattatggaaccgctaagatcagctgggggtggcgcctctccctcggccttgcgattgtgccctcggtaatcatgactgtgggtgcactacttatctcagacaccccaagtagccttgtggagcgtgggaaggtggcccaagctcgcgactctctccgtaaagcccgaggaaaagacatcgacatcgaacctgagctggctgagctagtgaagacgagcgaagcagtcaaagctgcaaatgaagagccgttcgttactatattcgaaaggcagtatcggccgcacctagtgatggcctttgccattcctttctttcagcagctcactgggattaacatcatcgccttctacgcgccggtcctctttcaatctgtgggatttggaagcgactcggctctgatagcctccataatactgggatgtgtgaaccttttgtccatcattgtgtctacatttatagttgatcgatatggcagaagaattctgttcctggagggtggaactcagatgatcatcggtcaggtggcggtggcgtgtgtgctagcagtaactacgggcgtttcgggaacaaaggacatacccagggggtacgcggtgttggtactggtacttatgtgcatctatgcagctggttttggttggtcatggggtcctctgagctggctcattcccagtgagatttttcctatgaaaatccgcacaaccggccaagctataagcgttgccgtcaacttcgcaacaaccttcgtgctagcccagacattcttgaccatgctgtgccactttaaatacggcactttcctcttctatgccggttggctcattgcaatgacccttttcgtaatacttttcgtgccggagaccaaaggaattcctctagaatccatgtatcaagtgtgggagagacattggttctggcggaggtttgtttctctgccatagctaaattccttctcaagtcccagtaatttcattgaaacattctggccagtttctacttatgctcacacatccggatcc

SEQ ID NO: 97097 - protein, 500 aa, Vitis vinifera
MAVGGFAADDNSRAFSGKVTASVVITCIVAASGGLIFGYDIGISGGVTTMQPFLKKFFPVVLRKAADAKTNIYCVYDSHVLTAFTSSLYIAGLAASLVASRLTRAVGRRNTMIIGGLTFLIGAALNGGAENVAMLILGRILLGFGVGFTNQATPIYLSEMAPPKWRGAFGTSFQFFIGIGVVVANCLNYGTAKISWGWRLSLGLAIVPSVIMTVGALLISDTPSSLVERGKVAQARDSLRKARGKDIDIEPELAELVKTSEAVKAANEEPFVTIFERQYRPHLVMAFAIPFFQQLTGINIIAFYAPVLFQSVGFGSDSALIASIILGCVNLLSIIVSTFIVDRYGRRILFLEGGTQMIIGQVAVACVLAVTTGVSGTKDIPRGYAVLVLVLMCIYAAGFGWSWGPLSWLIPSEIFPMKIRTTGQAISVAVNFATTFVLAQTFLTMLCHFKYGTFLFYAGWLIAMTLFVILFVPETKGIPLESMYQVWERHWFWRRFVSLP

SEQ ID NO: 97098 - DNA, 1590 bp, Sclerotinia sclerotiorum
  CDS (1)..(1590)
atgcttggtgctatcgcatctatcggtggtttcatgttcggttatgaatctggtcaaatttctggtttcgtccaaatgtccgacttcttagatcgattcggtgaaaatggtgaactttctgctgtccgtcaaggaaccatcgtcgccattctctgcgccggtactcttgttggatgccttggatctagttacctctgcgatacaatcggtcgtcgttacactatctccagttctgcattcttctacatcatcggtgttatcatcgaaatcacttcttctactcactgggttcaattcgctatggggagattcactgctggtttgggtattggtgctttgagtactagtgttcctatgtaccaatctgagtctgtgccaaagaacattcgtggtgctgtcgtttccagttatcagttgttgattactcttggtatctggactgcttatatgatcaactacggaactcattctgcctataccaacagtgcacagtggcggattcctaacggtctctccgcactctgggccatcatcctcggtaccgctgtcctcttcatgcccgaatccctcgctttgcataccgtatcggacgtgaagatgaaagctcgcaaaaacatggctctcctcaacggtgttgacccttactccccacttatcgattccgagatccaagaaatcgaacaaaagctcgcagccgaaagagaaggtggtgatcacccctggtacgaaatctttactggccctagaatgttgtaccgaacacttctcggaatggttcttcaagctggtcaacaattgactggtgccaatttcttcttctactatggtactaccatcttcaagtctggtggtatctccgattcttatgttacctctatcattctcggtaccgtcaatgtcgtcgctaccattggtggtctctggattgttaagaactgcggtcgtaggaaggctctcatggttggtgctgccgagatgtttgtttgcatgttgatctactctttcgtcggacacttcaagatccaaagacaagcccaatgctcaagcccctgggctgttttgatttgtttcacctgtatctacattgttggatctgctactacatggggacctttggtttgggccattgtcggagaattatacccagcacgttacagagcttcttgcatggctctcgccaccgcatcgaactggctcttcaacttccttatctctttcttcaccacatttatcaccaacgatatcgattactactatggtcttgtctttgccggatcccttttcgctctcttctggattgtatacttcttcgttatcgagaccaaggatcgctcccttgaggaaatcgacaccatgtacgtcctccacgtcaacccacgaacatcctccacttgggaccccaagtccctcggtgccgaaggtgtcaaaggtgttgataccgatggaatgttcttgaccactggagggaaagatattaagaagagtgagatggctggacgaccaatgttggaacatgacgagagaaggttccctgagaccgctggaggagctgcttctcaggagcacaaacctgagattatgaatgcttaa

SEQ ID NO: 97099 - protein, 529 aa, Sclerotinia sclerotiorum
MLGAIASIGGFMFGYESGQISGFVQMSDFLDRFGENGELSAVRQGTIVAILCAGTLVGCLGSSYLCDTIGRRYTISSSAFFYIIGVIIEITSSTHWVQFAMGRFTAGLGIGALSTSVPMYQSESVPKNIRGAVVSSYQLLITLGIWTAYMINYGTHSAYTNSAQWRIPNGLSALWAIILGTAVLFMPESLALHTVSDVKMKARKNMALLNGVDPYSPLIDSEIQEIEQKLAAEREGGDHPWYEIFTGPRMLYRTLLGMVLQAGQQLTGANFFFYYGTTIFKSGGISDSYVTSIILGTVNVVATIGGLWIVKNCGRRKALMVGAAEMFVCMLIYSFVGHFKIQRQAQCSSPWAVLICFTCIYIVGSATTWGPLVWAIVGELYPARYRASCMALATASNWLFNFLISFFTTFITNDIDYYYGLVFAGSLFALFWIVYFFVIETKDRSLEEIDTMYVLHVNPRTSSTWDPKSLGAEGVKGVDTDGMFLTTGGKDIKKSEMAGRPMLEHDERRFPETAGGAASQEHKPEIMNA

SEQ ID NO: 97100 - DNA, 1539 bp, Sclerotinia sclerotiorum
  CDS (1)..(1539)
atgaccatattggttgccatgggtggcttcatctttggttatgacactggacaaatttctggatttttggaaatgcatgtcttcctgcagagatttggtgaaagaagtagtaatctagtggcacatcctgctgggtattatttcacgaatttatcgatcggtacattgataggatgtttggttgctggacctcttgccaatagattcggacgcagaacatgcattccacctttcgtgattggtgttgttatacaaatggctgttggcaaaggtgagtgggtgggaattgtcatgggaagatgggttgctggtttgggagttggtggactgtctgtccttgtaccaatgtacatggctgaaacctctcctgttccagtgacaggagctgttatttcatgttaccaactcttcatcacgatcggtatcttcaccgccgactgcatcaactacggaaccgaatccttcaaaagtacagcttcctaccgaattcctatgggcgttggcttcatctgggcaattatccttggtggcggtatcctcttccttccagaaactcctcgatacaattggaaccatggaaagcccgaaaaagctcaagaaaccatggccgctttctacggtgtcgaagaatcccatccaatgatccgaaccgaggtcgctgaaattgagaaagttcgtgcagcaactgttggtgaccatccatggtacgaagccgttaccggcccaagaatgctctacagagtttctctcgcaatggcattgcaaatgttacaacaacttactggtgccaattacttcttctactacggtacaaccatattcgctggcgtcggtatcaaaaactcctatgtcactgctatgattcttggtggtgtaaccgttggagccactttctttggtgtttacatggcccgtcacttccgtcgtcgcgaatgcttgtacatcgctgctttgtggcaaaccatgtgtttcctcatttttgcatctgtcggacaattcatttttaaggatgccgcagagggaagtcacactgctaaaacttctggaaccgttatgattgtctttgctgtgcttttcatcgtcggttttgccagcacatggggaccccttgtctgggcatgcattggagagatgttcccatacagataccgagccgtcgcgatggcttttgctacatcggctaaatggttctggaatttcatgcttgcatttttcacccccttcatcacgcaagatatcaattacgcatatggatatgtctttgcaggttgcaacctcgcggctttcttcgtcgtcttctttttccttgttgaatcgagcggaaagactttgcaggaagtggatgctatgtacctgatgggtgtcaagcctattggaagtcacgccttccaatttgatagcgagctgagggagtctttgggtactgacatcaataccgatgccatgaatttggagaccagaaatggtagagtccagaaagttaatgaagccggccagggtggtgttttccacgatgagggcggaaacgtgaaggagtag

SEQ ID NO: 97101 - protein, 512 aa, Sclerotinia sclerotiorum
MTILVAMGGFIFGYDTGQISGFLEMHVFLQRFGERSSNLVAHPAGYYFTNLSIGTLIGCLVAGPLANRFGRRTCIPPFVIGVVIQMAVGKGEWVGIVMGRWVAGLGVGGLSVLVPMYMAETSPVPVTGAVISCYQLFITIGIFTADCINYGTESFKSTASYRIPMGVGFIWAIILGGGILFLPETPRYNWNHGKPEKAQETMAAFYGVEESHPMIRTEVAEIEKVRAATVGDHPWYEAVTGPRMLYRVSLAMALQMLQQLTGANYFFYYGTTIFAGVGIKNSYVTAMILGGVTVGATFFGVYMARHFRRRECLYIAALWQTMCFLIFASVGQFIFKDAAEGSHTAKTSGTVMIVFAVLFIVGFASTWGPLVWACIGEMFPYRYRAVAMAFATSAKWFWNFMLAFFTPFITQDINYAYGYVFAGCNLAAFFVVFFFLVESSGKTLQEVDAMYLMGVKPIGSHAFQFDSELRESLGTDINTDAMNLETRNGRVQKVNEAGQGGVFHDEGGNVKE

SEQ ID NO: 97102 - DNA, 1647 bp, Trichoderma reesei
  CDS (1)..(1647)
atgcccattggcaacatctacgtgatcgccggcgtgtccgtcgtcggcggcgcgttgttcggcttcgacatctcgtctgtgtcggcccagctggccgagcagtcgtacctctgctacttcaaccaagatgagaatccgcccaccaccgtcgatggcacctgtggtggcccgcggtccctcgtccagggcggcatcacggcctccatggctgctgggtcctggctgggcgccctgatctcgggtcccctgtctgatcgcctgggccgcaagtactccatcatggtcggatgtatcatttgggttattggctccaccctctcgtgcgcttctcaaaacattggcatgctcattgtcgcccgtatcatcaacggtctctccgtcggtatcgaatctgctcaggtccccgtctacattgccgagatttcgcctccctccaagcgcggccgcttcatcggcatgcagcagtgggccatcacctggggcatcctcatcatgtactacatctcctacggctgctccttcatcggcaagcagaaccctctcgagtacaacactgcctcgtggcgtattccatggggtctgcagatgattcccgccttcttcctcttcttcatgatgatgccgcttcccgagtctccccgttggctcgcccgcaaggaccgctgggaggactgccgcgccgtgctcaccctcgtccacggcaagggcgatcccaaccacccctttgttgcctacgaactgcaggacatcaaggacatgtgcgagtttgagcgtcgccatgctgatgtcacctacctcgacctgttcaagcccaacatgctcaaccgcacattcattggtctctttacccagatctggtcccagctgacgggcatgaacgtcatgatgtactacattgccaacatcttctccatggctggctacagcggcaacgccaacctgctcgcctcgtccatccagtacatcatcaacgtgctgatgaccattcccgccctgctttgggtcgacaaatggggtcgccgtcccacgctgctcgtcggttccgtcctcatggccctgtggatgtacgccaacgcgggtatcctcgccacctacggtgaagtcgtccccggcggcattgatcacgtcgctgcccagtcgatgcgtgtctcgggcgcccctgccaagggtctcattgcctgcacgtacctgtttgtggcctcgttcgcgcccacctggggtcccgtctcgtggacctaccctccggagctgttccccctccgcctccgaggcaagggcgtggctctggcgacttccggaaactgggccttcaacacggcgctgggtctcttcaccccggtggcctttgccaacatcaagtggaagtcgtacctcatctttgccatcttcaacactgtcgccttcttccacgtcttcttcgtcttccccgagacggccggcaagacgctcgaggagacggaggccatgttcgaggatcccaacggcatcaagtacctgggcacgcccgcgtggaagacgagggtggccacgagcctcacggagcgtgccgagcacggcgacattgaggccaagattggccatgacacggagaagcctccggtccacactcacgaggaggagaaggccagcactccccctccccagtag

SEQ ID NO: 97103 - protein, 548 aa, Trichoderma reesei
MPIGNIYVIAGVSVVGGALFGFDISSVSAQLAEQSYLCYFNQDENPPTTVDGTCGGPRSLVQGGITASMAAGSWLGALISGPLSDRLGRKYSIMVGCIIWVIGSTLSCASQNIGMLIVARIINGLSVGIESAQVPVYIAEISPPSKRGRFIGMQQWAITWGILIMYYISYGCSFIGKQNPLEYNTASWRIPWGLQMIPAFFLFFMMMPLPESPRWLARKDRWEDCRAVLTLVHGKGDPNHPFVAYELQDIKDMCEFERRHADVTYLDLFKPNMLNRTFIGLFTQIWSQLTGMNVMMYYIANIFSMAGYSGNANLLASSIQYIINVLMTIPALLWVDKWGRRPTLLVGSVLMALWMYANAGILATYGEVVPGGIDHVAAQSMRVSGAPAKGLIACTYLFVASFAPTWGPVSWTYPPELFPLRLRGKGVALATSGNWAFNTALGLFTPVAFANIKWKSYLIFAIFNTVAFFHVFFVFPETAGKTLEETEAMFEDPNGIKYLGTPAWKTRVATSLTERAEHGDIEAKIGHDTEKPPVHTHEEEKASTPPPQ

SEQ ID NO: 97104 - DNA, 1626 bp, Pichia angusta
  CDS (1)..(1626)
atggctggcgacagtattactggtgtggcaggaactgctgacgttaacagagtcgaggctcccttgactgtgagagcttatcttatgtgcgcctttggtgcgtttggaggtatccttttcggatacgactccggttacatttccggtgtcatgggtatggactactttatccatgaattcactggaaaggtgaaacacggcgacgatgactcctcttttgtcgttggatcgtctcaaaaatctcttattacttctattctttctgcaggtaccttttttggtgctgtgtgtgccggagacttggccgacatgtttggaagaagaaccattattgtgaccggctgcagtatctactcggtcggtgttgcgctccaggttgcctccaccacggtggctctgctttccgtaggaagagttatagcaggtgttggtgttggttttgtttcgtccgtggtggttttgtatctgtctgaaatttctccaaagaaaatcagaggtgccatcgtttccggttaccagttcttcgtcaccatcggattgctgctcgcgtcctgtgttgactacggcaccgagcacagaaacgactccggctcctacagaatccctattgctctgcaactcatctgggccatcattcttgctgtcggactcatcttgctcccagaatctcctagatactacgtcctcaagggcaagtttgacagggctgcaaaggtgctctccagacttaggggccagcctatcgattccgactacattcaagaagaactcgccgagatcgtggccaaccacgagtacgagaggagcgtcattccaactacgagctactggcaatcctgggcagcttgtttcaccggaggactcagaagaccatcctcgaacctcagaaagaccatcctcggaacctccatgcagatgatgcagcaatggaccggtgtcaacttcatcttctacttcggtaccaccttcttccagcagcttggcaccatccacaatgagttcctgatctcgatgatcactacgatcgtcaatgtggcctcaactcctctgtccttctacacgatcgagaaattcggtcgtcgtgcgctcatgatctacggtgcagcaggtatggttgtgtgtcagtttatcgtggccattggtggtaccgttgatggcgacaatcagaaaaccgtcagcgccatgatcgccttcatctgcatctacattttcttctttgcttcgacctggggtccgggagcttgggttattatcggagagatcttcccattgccaatcagatcgagaggtgttggtctgtcgaccgcctccaactggttgtggaactgtatcattgccgttatcactccttacatggttgacggcgataagggcaatttgggtgctaaggtgttcttcatctggggctcgctatgtggttgctgtcttctttatgccattatgctgatcccagaaaccaagggcctgactttggagcaagtcgacaagatgcttgaggagaccaccccatggacctctgccaaatggaaacctcactccaccttcgctgccgagatgggtcttgccaaggacgacaagggcgtcacccacgagctcaaggagcacgccagcgttgagagtgtatag

SEQ ID NO: 97105 - protein, 541 aa, Pichia angusta
MAGDSITGVAGTADVNRVEAPLTVRAYLMCAFGAFGGILFGYDSGYISGVMGMDYFIHEFTGKVKHGDDDSSFVVGSSQKSLITSILSAGTFFGAVCAGDLADMFGRRTIIVTGCSIYSVGVALQVASTTVALLSVGRVIAGVGVGFVSSVVVLYLSEISPKKIRGAIVSGYQFFVTIGLLLASCVDYGTEHRNDSGSYRIPIALQLIWAIILAVGLILLPESPRYYVLKGKFDRAAKVLSRLRGQPIDSDYIQEELAEIVANHEYERSVIPTTSYWQSWAACFTGGLRRPSSNLRKTILGTSMQMMQQWTGVNFIFYFGTTFFQQLGTIHNEFLISMITTIVNVASTPLSFYTIEKFGRRALMIYGAAGMVVCQFIVAIGGTVDGDNQKTVSAMIAFICIYIFFFASTWGPGAWVIIGEIFPLPIRSRGVGLSTASNWLWNCIIAVITPYMVDGDKGNLGAKVFFIWGSLCGCCLLYAIMLIPETKGLTLEQVDKMLEETTPWTSAKWKPHSTFAAEMGLAKDDKGVTHELKEHASVESV

SEQ ID NO: 97106 - DNA, 1545 bp, Aspergillus niger
  CDS (1)..(1545)
atgagattaccaaaaattaaaatgcctcgtaagaggccgcaagatgaactcaatggtgatgtgctgcagcaagaggcgcaagctaccggccccaatggccagaaatctgaagaggggattgtggatacacctatccctctgctcacgtggcgttctttcttaatgggcattttcgtgtcaatgggtggtttcctcttcggctacgacactggccaaatttcaggcttcttggagatgccgaactttctccaaagatacggacaacagcaagctgacggaacatactatttctccaatgcccgttcgggtctgattgtcgcgctgctttcaataggtaccttgatcggcgcccttattgcagctcccatcgcagatcgtgttggccggaaatggtccatcagcggctggagtgccatggtgtgtgtcggtatcaccatacaaatatcttcccctttcggaaagtggtaccaggtagccatgggtcgttgggtcgctggtctcggcgttggggctctatcattgcttgttcccatgtaccaagcggaaactggaccgaggcacattcgtggatctcttgttagcacttatcagcttttcatcacccttggaatcttcgtcgccaactgtatcaacttcggaacagaagctcgaaatgatacaggctcctggcgtattcccatgggcatcacctacatctgggccatgatcctgggcttcggaattgcactattccccgaaagtgcccggtacgactatagacatggaagggaggcgaaagcagctcgtaccctatcgagaataagttcgtggaaggaacaggaacgcggagagataacctggtctcatcttttccatgcaccccgcatgaagtatcgcgtcgcagtgggagtcgcccttcaagcactgcaacagttaacgggagcgaattactttttctactacgggacgacgatctttcgaggcgccgggatttcaaattcctacgtaacacaaatgattcttggcggtgtgaatttcggaacgacgttcctagggctgtacctgatcgagaactacggtcgtcgtcgatccctgataactggagcattgtggatgtttgtttgtttcatggttttcgcctccgtgggccatttctctctagaccatgaaaacccagaacggacacacacagctggcgtggtcatggttgttttcgcctgtcttttcattctcggtttcgcatcaacatggggtcccatggtgtggaccattatcgcagagctgtatccctccgaattccgtgcccgcgccatgtctctcgccacagcatccaattggctctggaacttccttctcgcctttttcacccccttcatcaccagtgccattgacttccgcctcggctacgtctttgccggctgcctcttccttgcggcgggcctggtttacgtggcagtcattgaaggtcgtggccgtacattggaagagatcgataccatgtacgttatgaaggtgccgccctggaaagagctccaagtatgtatttccggacatcgatccatatga

SEQ ID NO: 97107 - protein, 514 aa, Aspergillus niger
MRLPKIKMPRKRPQDELNGDVLQQEAQATGPNGQKSEEGIVDTPIPLLTWRSFLMGIFVSMGGFLFGYDTGQISGFLEMPNFLQRYGQQQADGTYYFSNARSGLIVALLSIGTLIGALIAAPIADRVGRKWSISGWSAMVCVGITIQISSPFGKWYQVAMGRWVAGLGVGALSLLVPMYQAETGPRHIRGSLVSTYQLFITLGIFVANCINFGTEARNDTGSWRIPMGITYIWAMILGFGIALFPESARYDYRHGREAKAARTLSRISSWKEQERGEITWSHLFHAPRMKYRVAVGVALQALQQLTGANYFFYYGTTIFRGAGISNSYVTQMILGGVNFGTTFLGLYLIENYGRRRSLITGALWMFVCFMVFASVGHFSLDHENPERTHTAGVVMVVFACLFILGFASTWGPMVWTIIAELYPSEFRARAMSLATASNWLWNFLLAFFTPFITSAIDFRLGYVFAGCLFLAAGLVYVAVIEGRGRTLEEIDTMYVMKVPPWKELQVCISGHRSI

SEQ ID NO: 97108 - DNA, 1752 bp, Aspergillus niger
  CDS (1)..(1752)
atgggtgtctctaatatgatgtcccggttcaagcctcaggcggaccactctgagtcctccactgaggctcctactcctgctcgctccaactccgccgtcgagaaggacaatgtcttgctcgatgacagtcccgtcaagtacttgacctggcgctccttcatcctgggtatcgtcgtgtccatgggtggtttcatcttcggttactctactggtcaaatctctggtttcgagactatggatgacttcctccaacgtttcggtcaggaacaggcggatggatcctatgctttcagcaacgtccgtagtggtctcattgtcggtctgctgtgtatcggtactatgatcggtgccctggttgctgctcctatcgcagaccgcatgggccgcaagctctccatctgtctctggtctgtcatccacatcgtcggtatcatcattcagattgccaccgactccaactgggtccaggtcgctatgggtcgttgggttgccggtctgggtgttggtgccctctccagcattgtccccatgtaccagagtgaatctgctccccgtcaggtccgtggtgccatggtcagtgccttccagctgttcgttgccttcggtatcttcatctcctacatcatcaacttcggtaccgagagaatccagtcgactgcttcctggcgtatcaccatgggcattggcttcgcctggcccttgattctggctgttggctctctcttcctgcccgagtctcctcgtttcgcctaccgtcagggtcgtatcgatgaggcccgtgaggttatgtgcaagctgtacggtgtcagcccgaaccaccgcgtcatcgcccaggagatgaaggacatgaaggacaagctcgacgaggagaaggccgccggtcaggctgcctggcacgagctgttcaccggccctcgcatgctctaccgtaccctgctcggtattgctctgcagtccctccagcagctgaccggtgccaactttatcttctactacggaaacagtatcttcacctccactggtctgagcaacagctacgtcactcagatcattctgggtgctgtcaacttcggtatgaccctgcccggtctgtacgtcgtcgagcacttcggtcgtcgtaacagtctgatggttggtgctgcctggatgttcatttgcttcatgatctgggcttccgttggtcacttcgctctggatcttgccgaccctcaggccactcctgccgctggtaaggccatgatcatcttcacttgcttcttcattgtcggtttcgccaccacctggggtcctatcgtctgggccatctgtggtgagatgtaccccgcccgctaccgtgctctctgcattggtattgccaccgctgccaactggacctggaacttcctcatctccttcttcacccccttcatctctagctccattgacttcgcctacggctacgtctttgctggatgctgtttcgccgccatcttcgttgtcttcttcttcgtcaatgagacccagggtcgcactcttgaggaggttgacaccatgtacgtgctccacgtcaagccctggcagagtgccagctgggttcccccggagggcattgtccaggacatgcccgccccccttcctcttccaagcaggagggtcaggctgagatggctgagcacaccgagcccactgagctccgcgagtaagccactcgcactcgcgcgaactcattttgctagttgctcttgtacattgaacctgcatcttaagctttga

SEQ ID NO: 97109 - protein, 583 aa, Aspergillus niger
MGVSNMMSRFKPQADHSESSTEAPTPARSNSAVEKDNVLLDDSPVKYLTWRSFILGIVVSMGGFIFGYSTGQISGFETMDDFLQRFGQEQADGSYAFSNVRSGLIVGLLCIGTMIGALVAAPIADRMGRKLSICLWSVIHIVGIIIQIATDSNWVQVAMGRWVAGLGVGALSSIVPMYQSESAPRQVRGAMVSAFQLFVAFGIFISYIINFGTERIQSTASWRITMGIGFAWPLILAVGSLFLPESPRFAYRQGRIDEAREVMCKLYGVSPNHRVIAQEMKDMKDKLDEEKAAGQAAWHELFTGPRMLYRTLLGIALQSLQQLTGANFIFYYGNSIFTSTGLSNSYVTQIILGAVNFGMTLPGLYVVEHFGRRNSLMVGAAWMFICFMIWASVGHFALDLADPQATPAAGKAMIIFTCFFIVGFATTWGPIVWAICGEMYPARYRALCIGIATAANWTWNFLISFFTPFISSSIDFAYGYVFAGCCFAAIFVVFFFVNETQGRTLEEVDTMYVLHVKPWQSASWVPPEGIVQDMPAPLPLPSRRVRLRWLSTPSPLSSASKPLALARTHFASCSCTLNLHLKL

SEQ ID NO: 97110 - DNA, 1593 bp, Aspergillus niger
  CDS (1)..(1593)
atggctgaaggcttcgttgacgcctcgcgcgtcgaggccccagtcaccctcaagacctacttgatgtgtgcctttgcggcttttggtggtatcttcttcggttatgactctggttatatcagcggtgtcatgggaatgagatacttcatcgaggagtttgagggcttggactataacactacccccaccgattccttcgtcctcccgtcctggaaaaaatcgttgatcacgtcgatcctctcggctggaaccttctttggtgccctcattgctggtgacttggcagactggttcggtcgtcgcactaccattgtcagtggttgtgttgtcttcatcgttggtgttatcctgcagaccgcttcgacctccttgggtctgcttgttgccggccgtctggtcgcgggatttggtgtgggcttcgtctccgccatcattatcctgtacatgtctgagattgcacctcgcaaggttcgcggtgctattgtctcagggtaccagttctgcatcaccatcgggctcatgttggcctcgtgcgtcgactacggcactgagaaccgtctcgactctggctcctaccgtatcccaatcggcctccagctcgcctgggccttgatcctgggaggtggtctgctctgcctgcccgagtcccctcgttactttgttaaaaagggcgacctggctaaggctgcggaggttcttgcccgcgttcgtggtcaaccccaagactcggattatatcaaggatgagctggcggagattgtggcaaatcatgagtacgagatgcaggtgattccggaaggtggatatttcgtcagctggatgaactgcttccgtggcagtatattctcgcccaacagcaatctccgtcggactgtcctaggtacttctctgcagatgatgcaacagtggaccggtgtcaactttgtcttctactttggaacgacctttttccagtcgctgggaaccatcgatgaccccttcctcatcagcatgattaccactatcgtcaacgtctgctcgacccccgtctcgttctacacaattgagaagtttggccgccgttcgctccttttgtggggagcacttggtatggtcatctgccagttcattgtcgctatcgtcggcaccgtggacggtagcaataagcacgctgtcagtgcagagatttctttcatctgcatttacatcttcttctttgctagcacgtggggcccgggcgcctgggttgtgattggcgagattttccccctacctattcggtcgcgtggtgtggctctgtcgacggcatcgaactggctgtggaattgcatcatcgctgtcatcaccccttacatggtcgacaaggacaagggtgacttgaaggccaaggtgttcttcatctggggctcgctgtgtgcctgcgcttttgtctacacgtacttcctaattccggagaccaagggtcttactcttgagcaggtggacaagatgatggaagagaccacgcctcgcacctcagccaagtggactccacatggcaccttcacggccgagatgggtcttactgcgaatgccgtggccgaaaaggctactgcggttcaccaggaggtgtga

SEQ ID NO: 97111 - protein, 530 aa, Aspergillus niger
MAEGFVDASRVEAPVTLKTYLMCAFAAFGGIFFGYDSGYISGVMGMRYFIEEFEGLDYNTTPTDSFVLPSWKKSLITSILSAGTFFGALIAGDLADWFGRRTTIVSGCVVFIVGVILQTASTSLGLLVAGRLVAGFGVGFVSAIIILYMSEIAPRKVRGAIVSGYQFCITIGLMLASCVDYGTENRLDSGSYRIPIGLQLAWALILGGGLLCLPESPRYFVKKGDLAKAAEVLARVRGQPQDSDYIKDELAEIVANHEYEMQVIPEGGYFVSWMNCFRGSIFSPNSNLRRTVLGTSLQMMQQWTGVNFVFYFGTTFFQSLGTIDDPFLISMITTIVNVCSTPVSFYTIEKFGRRSLLLWGALGMVICQFIVAIVGTVDGSNKHAVSAEISFICIYIFFFASTWGPGAWVVIGEIFPLPIRSRGVALSTASNWLWNCIIAVITPYMVDKDKGDLKAKVFFIWGSLCACAFVYTYFLIPETKGLTLEQVDKMMEETTPRTSAKWTPHGTFTAEMGLTANAVAEKATAVHQEV

SEQ ID NO: 97112 - DNA, 1662 bp, Neurospora crassa
  CDS (1)..(1662)
atgaagccatttctggggctcagaggtcagcccctcaacctggccgtgggcgcagttgccggatgtgattttcttcttttcggatacgatcagggtgttatgggcggaattctgactctccccgagttcctcggttactttgaacaaatcaatccagacgcaccgggcctcacaccacacgaatcttctatgcgatctacttaccaaggcatctccgtcgcttcctacaacctgggatgttttatcggcgccatcatcactatcttcattggcaatccctggggccgtaagaaaataatattgctcgggacttctatcatgattgtcggtgccattcttcaggccagcgctactactctaggccatttcatcattgggcgtatcattaccggcattggaaacggaggaaacacatctactgtccctacttggcaatccgagacttcgaaagcacacaagcgaggcaagatggtcatgatcgaaggatctctcgtcaccgccggcatcatgttgagttactggattgacctcgggttaagttttgcccctggctcagttgcttggcgcttccctcttgccttccagatcatcttctgcatcctcatcctcatctttattcccttcctgcccgaatcacctcgttggttggttttcaaaggccgcgacgcggaagccaaggaaatcctggccgccctcaacgacgtggaacttgacgatcccattgtcgacaccgagttccatttcatccacgatacggttgtcgagatgtccaaaggcagcttcaaggacctcttcaccatggacaaggaccgcaacttccaccgcactctgctggcatacctcaaccaggttttccagcagatctctggtataaacctcatcacctactatgccgccgtcatctacagcggacttggcatgtccgacttcctggcccgtctcctcgccgccctcaacggcaccgagtacttcattgcctcgtggccagccgtcttccttgtcgagcgcgtcggccgccgcaagctcatgttgtttggtgccatcggccaagcggccaccatggccatcctggcaggcgtcaactcccggccagacgacaagccataccaaattgcgggaatcgtctttctgttcgtcttcaacacggttttcgcggtcggctggctcggcatgtcctggctctacccagccgagatcgtgccgctccgcatccgcgccccggctaacgcgctatccacgtcggcgaactggatcttcaactttatggttgtcatgatcactccggttgcgttcaacaaaatcaagtatcagacgtacatcatcttcgccgtcatcaacgcctttattgttccagtcgtctatttcttctatccggaaacggcgtgccggtcactagaggaaatggatatgatcttccacaaggttgatgggtggaaggggtacttcacggtagtgcaccaggccaaggttgagcctaaatggtacgacaaggatggccagcgcattggcggggctgactttgagaagactgctgggtaccagagccactcgattccggagtcgtctggatttgaaaagccgacgaaggcgcatgttgagtcgcctagggcggatgacgggatcacttcgtcgagtagtgatggaggtaatcgggagtcgtag

SEQ ID NO: 97113 - protein, 553 aa, Neurospora crassa
MKPFLGLRGQPLNLAVGAVAGCDFLLFGYDQGVMGGILTLPEFLGYFEQINPDAPGLTPHESSMRSTYQGISVASYNLGCFIGAIITIFIGNPWGRKKIILLGTSIMIVGAILQASATTLGHFIIGRIITGIGNGGNTSTVPTWQSETSKAHKRGKMVMIEGSLVTAGIMLSYWIDLGLSFAPGSVAWRFPLAFQIIFCILILIFIPFLPESPRWLVFKGRDAEAKEILAALNDVELDDPIVDTEFHFIHDTVVEMSKGSFKDLFTMDKDRNFHRTLLAYLNQVFQQISGINLITYYAAVIYSGLGMSDFLARLLAALNGTEYFIASWPAVFLVERVGRRKLMLFGAIGQAATMAILAGVNSRPDDKPYQIAGIVFLFVFNTVFAVGWLGMSWLYPAEIVPLRIRAPANALSTSANWIFNFMVVMITPVAFNKIKYQTYIIFAVINAFIVPVVYFFYPETACRSLEEMDMIFHKVDGWKGYFTVVHQAKVEPKWYDKDGQRIGGADFEKTAGYQSHSIPESSGFEKPTKAHVESPRADDGITSSSSDGGNRES

SEQ ID NO: 97114 - DNA, 1725 bp, Saccharomyces cerevisiae
  CDS (1)..(1725)
atggcagttgaggagaacaatatgcctgttgtttcacagcaaccccaagctggtgaagacgtgatctcttcactcagtaaagattcccatttaagcgcacaatctcaaaagtattctaatgatgaattgaaagccggtgagtcagggtctgaaggctcccaaagtgttcctatagagatacccaagaagcccatgtctgaatatgttaccgtttccttgctttgtttgtgtgttgccttcggcggcttcatgtttggctgggataccggtactatttctgggtttgttgtccaaacagactttttgagaaggtttggtatgaaacataaggatggtacccactatttgtcaaacgtcagaacaggtttaatcgtcgccattttcaatattggctgtgcctttggtggtattatactttccaaaggtggagatatgtatggccgtaaaaagggtctttcgattgtcgtctcggtttatatagttggtattatcattcaaattgcctctatcaacaagtggtaccaatatttcattggtagaatcatatctggtttgggtgtcggcggcatcgccgtcttatgtcctatgttgatctctgaaattgctccaaagcacttgagaggcacactagtttcttgttatcagctgatgattactgcaggtatctttttgggctactgtactaattacggtacaaagagctattcgaactcagttcaatggagagttccattagggctatgtttcgcttggtcattatttatgattggcgctttgacgttagttcctgaatccccacgttatttatgtgaggtgaataaggtagaagacgccaagcgttccattgctaagtctaacaaggtgtcaccagaggatcctgccgtccaggcagagttagatctgatcatggccggtatagaagctgaaaaactggctggcaatgcgtcctggggggaattattttccaccaagaccaaagtatttcaacgtttgttgatgggtgtgtttgttcaaatgttccaacaattaaccggtaacaattattttttctactacggtaccgttattttcaagtcagttggcctggatgattcctttgaaacatccattgtcattggtgtagtcaactttgcctccactttctttagtttgtggactgtcgaaaacttgggacatcgtaaatgtttacttttgggcgctgccactatgatggcttgtatggtcatctacgcctctgttggtgttactagattatatcctcacggtaaaagccagccatcttctaaaggtgccggtaactgtatgattgtctttacctgtttttatattttctgttatgccacaacctgggcgccagttgcctgggtcatcacagcagaatcattcccactgagagtcaagtcgaaatgtatggcgttggcctctgcttccaattgggtatgggggttcttgattgcatttttcaccccattcatcacatctgccattaacttctactacggttatgtcttcatgggctgtttggttgccatgtttttttatgtctttttctttgttccagaaactaaaggcctatcgttagaagaaattcaagaattatgggaagaaggtgttttaccttggaaatctgaaggctggattccttcatccagaagaggtaataattacgatttagaggatttacaacatgacgacaaaccgtggtacaaggccatgctagaataa

SEQ ID NO: 97115 - protein, 574 aa, Saccharomyces cerevisiae
MAVEENNMPVVSQQPQAGEDVISSLSKDSHLSAQSQKYSNDELKAGESGSEGSQSVPIEIPKKPMSEYVTVSLLCLCVAFGGFMFGWDTGTISGFVVQTDFLRRFGMKHKDGTHYLSNVRTGLIVAIFNIGCAFGGIILSKGGDMYGRKKGLSIVVSVYIVGIIIQIASINKWYQYFIGRIISGLGVGGIAVLCPMLISEIAPKHLRGTLVSCYQLMITAGIFLGYCTNYGTKSYSNSVQWRVPLGLCFAWSLFMIGALTLVPESPRYLCEVNKVEDAKRSIAKSNKVSPEDPAVQAELDLIMAGIEAEKLAGNASWGELFSTKTKVFQRLLMGVFVQMFQQLTGNNYFFYYGTVIFKSVGLDDSFETSIVIGVVNFASTFFSLWTVENLGHRKCLLLGAATMMACMVIYASVGVTRLYPHGKSQPSSKGAGNCMIVFTCFYIFCYATTWAPVAWVITAESFPLRVKSKCMALASASNWVWGFLIAFFTPFITSAINFYYGYVFMGCLVAMFFYVFFFVPETKGLSLEEIQELWEEGVLPWKSEGWIPSSRRGNNYDLEDLQHDDKPWYKAMLE

SEQ ID NO: 97116 - DNA, 1674 bp, Schizosaccharomyces pombe
  CDS (1)..(1674)
atgagtaagacattgaccattacgatgctgttgtttgtgtccatggccggatggatgttcggtgctgacacgggttccattggtggtatcaccaatatgcgagactttcaatctcgtttcgcagatcggtataatccggtgactgacacgtattcgtattcttcagcgcggcaaggtttaattactggtatggtcaacgttggttctttcttcggctgtttaatttcttctcccactactgatcgaattggtaagcgtaattccattattgggttctgtgttatttacctcatcggcgttatcattcaagtcaccgctgttccatcctgggtccaaatcatggttgctaagatttggaccggtctaggaatcggtgccttgtctgtgcttgctcccggttaccaatctgaagtggctcctccccatattcgtggtaccattgtcgttacctatcaattgtgtgttacagctggtattttcattgccgcttgtatcaacatgggtacccacaaactttataaaactgctcaatggcgtgtatccatcggtattaacttgctctggggtatcatcacccttgtcggtgtctcattcttgtcggaatctcctcgttatcttgtgtccattggtaaggatgatgaggcaatccaggttatgtgtaagaacgctgagcttcctcccgattcggacatcattcaaacggaatacaagcaaatcaagtcggactgtgaagccgccgtcgagggtggtccatgcacatggccagagatttttggtaaggaaatcagatacagaacatttttgggaatggctattatgtcctttaaccaattgaccggttgcaactattatttctactacggtacccaagtgttcaagggaaccggtatggaatctccttacttggcctcattgattcttgatgccgttaactttggatgtacgtttggtggtcttttcgtacttgaatattgcggacgtcgtgttccattgatcatcggtggtgtttggcaatccatttgtttcttcatctatgcagctgttggtaatcgtgctcttactcgtaagaatggtacctcaaaccatcgtgccggtgccgttatgattgtgttctcatgtcttttcattttcagttttgctcaaacttggggtcctgccgcatacgttatcgttggtgaatcgtatcccattcgttatcgttccaagtgtgctgccgttgcgacaactagtaattggctttggaatttcttgatttccttcttcactccatttatcaccaactccattggattcaagtatggttacatctttgcatcgtgcaacctttgtgcctccatcgtaacgttcttgtttgctcacgagtccaagggtcttaccttggaagaaattaacgaactctatctctctgacgccaaaccctggatgtcacgtcccaagaatttgtcggaaatggcagaagccaaagaagtggagcgcgaggagactcgtccaaagggcgaatcagccagatatttggagcacgctgattccaattccgattctgaagacctctcttccagtgcgaacaacgacgttcatgagcctgttgcccgccaagatccatttaatgaaaatgaagtggaaaagtctcgtacccgaccaagccaagaatcatacacaacctcctccaactaa

SEQ ID NO: 97117 - protein, 557 aa, Schizosaccharomyces pombe
MSKTLTITMLLFVSMAGWMFGADTGSIGGITNMRDFQSRFADRYNPVTDTYSYSSARQGLITGMVNVGSFFGCLISSPTTDRIGKRNSIIGFCVIYLIGVIIQVTAVPSWVQIMVAKIWTGLGIGALSVLAPGYQSEVAPPHIRGTIVVTYQLCVTAGIFIAACINMGTHKLYKTAQWRVSIGINLLWGIITLVGVSFLSESPRYLVSIGKDDEAIQVMCKNAELPPDSDIIQTEYKQIKSDCEAAVEGGPCTWPEIFGKEIRYRTFLGMAIMSFNQLTGCNYYFYYGTQVFKGTGMESPYLASLILDAVNFGCTFGGLFVLEYCGRRVPLIIGGVWQSICFFIYAAVGNRALTRKNGTSNHRAGAVMIVFSCLFIFSFAQTWGPAAYVIVGESYPIRYRSKCAAVATTSNWLWNFLISFFTPFITNSIGFKYGYIFASCNLCASIVTFLFAHESKGLTLEEINELYLSDAKPWMSRPKNLSEMAEAKEVEREETRPKGESARYLEHADSNSDSEDLSSSANNDVHEPVARQDPFNENEVEKSRTRPSQESYTTSSN

SEQ ID NO: 97118 - DNA, 1596 bp, Schizosaccharomyces pombe
  CDS (1)..(1596)
atggggttcaagcgtggaaagaattttacccttgttatgttaattttcgtctccatggccggttggatgtttggtgctgataccggttccattggtggtgttactagtatgcgcgattttcgtgagcgttatgctgatagatatgacccgatcaccgaccagtattctttgtcttcggctcgtcaaggtcttttaactggtatggttaacgttggttccttgtttggatgtatcatttcttctcccattgccgatcgttttggtaagagactttctatcattggtttttgtgctgtttatatcattggtatcatcgttcaagttaccgctgttccctcttgggtacaaatcatggttgccaagatttggactggtattggtattggcgctctttctgtcttggctcctggatatcaatcagagactgctcctcccagtattcgtggtaccgtcgtcgtcacttatcagttgtttgtcactggtggaattttcattgccgcttgtatcaatatgggtactcacaaacttcataaaactgcccagtggcgtgtttcaattggtattaatctcctttggggtatcattaccatgattggaattctcttccttcccgaatcccctcgttatcttattcaagttggcaaggatgaagaggctgttagagttctttctgaaagtgctgagctttttcctgatagtgaggaagttcaaaatgaatatcaccgtctcaaatcatctattgacgaagaatttgctggtggcccttgcagctgggcaagcattttcggtaaagacattcgttatcgtactttccttggtatgtttgttatgtcgcttcaacaattgaccggtaacaactatttcttctactatggtttctcagttatgcaaggagctggtattaattctccttacctatctgctatgattcttgatgcagttaattttggctgcacttttggtggtatgtatgtattggaaaggtttggtcgtcgtaaccctcttatcattggtggtatttggcagtcaatttgctttttcatttattcagctgtcggttctcgtgctttatatcataagaacggtacttcaaatacccgtgctggtgccgttatgattgtcatggcatgtcttttcatttttggatttgctcaaacttgggctcctgccgcatacgttattgttggtgagtcataccctgttcgttaccgctctaagtgtgctgccgtcgctactgctagcaactggctctggaatttcctaatttcattctttactccattcattcaagcttctattggattcaagtacggttacgtttttgcttcttgtaatttgaccggtgcaattgttattttcttgtttgctaaagagactaaaggtcttactttggaagaaattaatgagttgtatatgtctgtcatcaagccctgggaatctggtaactttaagcttaactattctgagcaaaagaaagttgagaaagagaaatccagaaagggcggtgcccgtggtgagtctgttgagtatgttgagcgtgcttcaaacactgactcatctccacaatactcttcccatgaggaagattacgcataa

SEQ ID NO: 97119 - protein, 531 aa, Schizosaccharomyces pombe
MGFKRGKNFTLVMLIFVSMAGWMFGADTGSIGGVTSMRDFRERYADRYDPITDQYSLSSARQGLLTGMVNVGSLFGCIISSPIADRFGKRLSIIGFCAVYIIGIIVQVTAVPSWVQIMVAKIWTGIGIGALSVLAPGYQSETAPPSIRGTVVVTYQLFVTGGIFIAACINMGTHKLHKTAQWRVSIGINLLWGIITMIGILFLPESPRYLIQVGKDEEAVRVLSESAELFPDSEEVQNEYHRLKSSIDEEFAGGPCSWASIFGKDIRYRTFLGMFVMSLQQLTGNNYFFYYGFSVMQGAGINSPYLSAMILDAVNFGCTFGGMYVLERFGRRNPLIIGGIWQSICFFIYSAVGSRALYHKNGTSNTRAGAVMIVMACLFIFGFAQTWAPAAYVIVGESYPVRYRSKCAAVATASNWLWNFLISFFTPFIQASIGFKYGYVFASCNLTGAIVIFLFAKETKGLTLEEINELYMSVIKPWESGNFKLNYSEQKKVEKEKSRKGGARGESVEYVERASNTDSSPQYSSHEEDYA

SEQ ID NO: 97120 - DNA, 1668 bp, Schizosaccharomyces pombe
  CDS (1)..(1668)
atgaataggtttattacatcaattctcgtggtgtttatctcaatgtccggatggttgcaaggcgccgatactggttccattagcggcatcttgggcatgcgagattttcaatctcgttttgctgatcgttacaatcccatttcaaattcctacagttactcagcatggagacaagctttgttgactggtacaatcaatgctggctgtttatttggtgctatgctttcttcgccgtttaccgaaagaattggtaagaaatactctatttgctttttcagcggggtatatattattgcagagcttcttttagtcacagcagtcccttcttggattcaagtattggttggtaaaatccttgctggtgttggtatcggagctttgtcagtcttgagtcctggataccaatctgaagtagcaccaccacaaattcgtggtgcagttgttgcaacctatcaaattttctcgacaggtgctgctttagttgcagcctgtatcaatatgggaactcataaactgcgtaagactgcatcatggagaacttcttttggcataaatatgctttggggaatcctgttaatggttggtgtactctttttgcctgaatcaccgcgttatcttatttacaaaggacgagatgaagaagctcttcgaattatgtgcaatatggcggaactaagtcctgaaagtgaaattattcaaactaattttaataccattaagagtgatattgaaatagaaatggctggaggtaaagcaagatggatagaaattttcggtaaggatattcgataccgtacctgcttaggatttcttgtcatgttgttcagagagttgattggtaacaattattatttctattatgctacacaagttttcaagggaactggtatgacggatatattcttaccagccgttattttaggtgctattaattttggtacaacgtttggtgctttatacacaattgataacttaggacgtcgtaacccactaatttttggagctgctttccaatcgatatgcttctttatatatgccgctgtaggcgatcgaaagctcatatataagaatggtactagtgatcacagagcaggatctgtaatgattgtgttttcttgtttgtttcttttctcttactgctgttcttggggcccaatgggctgggtaattgtgggtgaaacttttcccattcgttatcgcagtaaatgcgcttctgtagccacatcgggaaactggctgggtaatttcatgatttctttttttactcctttcattaacaatgcgatcggattcaagcttggttacatttacgcctgcattaatttgtttagttcatttatgattttctttttggctaaagaaactaaaggtcttactttggaggaagtcaatgacttatacatgtccaacattaagccatgggaatcttacaaatatgtaagagaaattgaatctcatcgtatacactttagtaaagaagaagaaaagcgtgaaagagagaaatcgaaaggtattcgcggccaagaagaagaattcattgaaaatgctgatgaagacaataacgatagtagttcttcttcaggatctgtcgtgtctgctgtcaagccacggagatccgctgtttccaacgatcgcttttcagaggattcacaccctacgtatatctaa

SEQ ID NO: 97121 - protein, 555 aa, Schizosaccharomyces pombe
MNRFITSILVVFISMSGWLQGADTGSISGILGMRDFQSRFADRYNPISNSYSYSAWRQALLTGTINAGCLFGAMLSSPFTERIGKKYSICFFSGVYIIAELLLVTAVPSWIQVLVGKILAGVGIGALSVLSPGYQSEVAPPQIRGAVVATYQIFSTGAALVAACINMGTHKLRKTASWRTSFGINMLWGILLMVGVLFLPESPRYLIYKGRDEEALRIMCNMAELSPESEIIQTNFNTIKSDIEIEMAGGKARWIEIFGKDIRYRTCLGFLVMLFRELIGNNYYFYYATQVFKGTGMTDIFLPAVILGAINFGTTFGALYTIDNLGRRNPLIFGAAFQSICFFIYAAVGDRKLIYKNGTSDHRAGSVMIVFSCLFLFSYCCSWGPMGWVIVGETFPIRYRSKCASVATSGNWLGNFMISFFTPFINNAIGFKLGYIYACINLFSSFMIFFLAKETKGLTLEEVNDLYMSNIKPWESYKYVREIESHRIHFSKEEEKREREKSKGIRGQEEEFIENADEDNNDSSSSSGSVVSAVKPRRSAVSNDRFSEDSHPTYI

SEQ ID NO: 97122 - DNA, 1674 bp, Schizosaccharomyces pombe
  CDS (1)..(1674)
atgggaagaacacttacatctgtcctcgtggtcttcatttctatggccggatggctaggaggtgctgataccggttccattagtggtatcttgggaatgcgtgattttcaatctcgttttgctgaccggtataatcctatcacgaactcttatagttactcagcctggcgacaagcactgttgacaggaaccgttaacgctggttgcttatttggtgctatgctttcctctccatttactgaagccattggcaaaaaatactccattgccttctttagcggttgttacattattggtcaaattcttttggtaactgctgttccttcttgggttcagattatggttggtaagttatttacaggtttaactattggtgctttgtcggtgttgagtcctggataccaatctgaagttgctcctccgcaaattcgtggtgcagttgtttcgacctatcaactatttcaaacttgcggtactttaatcgctgcttgtatcaatatgggaactcataaacttcgtaaaacagcgtcctggagaacttcctttggcattaacatactttggggtatctttttgatggtgggtgtactgtttttacctgaatcaccgcgttacctcatctataagggaagagatgaagaggctcttcgaatcatgtgtcaaactgctgaactagatcctgagagtgaaatcattcaaaccaattttaataccattaagagtgatattgaaatggaaatggctggaggtaaggcaagatggcctgaggtttttggaaaagaagttcgctatcgtactgtcttgggattccttactatgttactgagagaattgattggtaataactattacttttattatgctacacaagttttcaagggaactggtatgacggatatattcttaccagccgttattttaggtgctattaattttggtacaacgtttggtgctttatacacaattgataacttaggacgtcgtaacccactaatttttggagctgctttccaatcgatatgcttctttatatatgccgctgtaggcgatcgaaagctcatatataagaatggtactagtgatcacagagcaggagctgtaatgattgtgttttcttgtttgtttcttttctcttactgctgttcttggggcccaatgggctgggttattgtcggcgaaacctttccaatacggtatcgtagcaaatgtgctgctgtagccacatcgggtaattggctgggcaactttatggtttcattcttcactcctttcatctcaaattctattgggttcaaacttggatatatttatgcttgtatcaatatgacttctgcgtttcaaatatttttgatggccaaagaaactaaaggccttaccttggaagaagttaatgaattatacgagtctgacattaagccatgggattcctataagtacgtgagacaaattgaatctcgtcgtatacacttcagtaaagaagaagaaaagcgagaaagagagaagtcaaaaggataccgcggtcaagaagaacgttttatcgaaaatgcagatggtgcggataatgacgatagcagcgcttcttcagaatcctttgcatctgctggcgcacactccagatcggtttttcctaggaggtcaaacgtgtcagaagaatcacacccgacttgggtataa

SEQ ID NO: 97123 - protein, 557 aa, Schizosaccharomyces pombe
MGRTLTSVLVVFISMAGWLGGADTGSISGILGMRDFQSRFADRYNPITNSYSYSAWRQALLTGTVNAGCLFGAMLSSPFTEAIGKKYSIAFFSGCYIIGQILLVTAVPSWVQIMVGKLFTGLTIGALSVLSPGYQSEVAPPQIRGAVVSTYQLFQTCGTLIAACINMGTHKLRKTASWRTSFGINILWGIFLMVGVLFLPESPRYLIYKGRDEEALRIMCQTAELDPESEIIQTNFNTIKSDIEMEMAGGKARWPEVFGKEVRYRTVLGFLTMLLRELIGNNYYFYYATQVFKGTGMTDIFLPAVILGAINFGTTFGALYTIDNLGRRNPLIFGAAFQSICFFIYAAVGDRKLIYKNGTSDHRAGAVMIVFSCLFLFSYCCSWGPMGWVIVGETFPIRYRSKCAAVATSGNWLGNFMVSFFTPFISNSIGFKLGYIYACINMTSAFQIFLMAKETKGLTLEEVNELYESDIKPWDSYKYVRQIESRRIHFSKEEEKREREKSKGYRGQEERFIENADGADNDDSSASSESFASAGAHSRSVFPRRSNVSEESHPTWV

SEQ ID NO: 97124 - DNA, 1641 bp, Schizosaccharomyces pombe
  CDS (1)..(1641)
atgggaaaaaatttgaccattgtcatgttggtcttcgtgtccatggccggatggatgtttggcgccgataccggttccattggtggtatcaccaacatgagagatttccaatctcgtttcgcagatcggtataatccggtaacagattcgtattcgtattcttcggcgcggcaaggtctaattactggtatggttaacgttggttctttctttggttgtttcctttcttcccctcttatggatcgcattggtaagcgtacctctattatgttttggactattgtttatttgattggtattattcttcaagttaccgctgtcccatcttgggtccaaatcatggttgctaagatttggactggtctttccattggcgccttgtctgtgcttgcccccggtttccaatctgaggttgctcccgccgatcttcgtggtaccattgtcaccacctatcaattggctgtcactggtggtattttcattgccgcttgtatcaacatgggtactcacaagttgcacaagactgctcaatggcgtgtatccatgggtattaacttgctttggggtatcatcaccttcatcggtatttctttccttcctgaatcccctcgttatttgatctctgttggtagagatgaagaggctcttcaaattatggccaagaacaacgatcttcctatcgaacacgaagttatccaaacggaataccatgttattaagtctgattgtgaagctgaattggctggtggtcccgctacttggcccgaaatttttggtcccgacattcgttatcgtaccttccttggtcttggtgtcatgtctcttcaacaacttaccggtgataactactacttctactatggtttcgaggtgtttgagggtactggtatgaactctccttatctttctgctttgattcttgatgccgttaactttggatgtacgtttggtggtcttttcgtcctagagttctttggtcgtcgtatgccattgattattggtgctctttggcaatccattactttcttcatttacgcagctgttggtaatcgtgctcttactcgtaagaatggtacctcaaaccatcgtgccggtgccgttatgattgtgttctcatgtcttttcattttcagttttgctcaaacttggggtcctgccgcatacgttatcgttggtgaatcgtatcccattcgttatcgttccaagtgtgctgccgtcgctaccactggtaactggttgtggggtttccttatttcctttttcactcccttcattaccaactccattggattcaagtatggttacattttcgctgcttgtaacttgtgtgctgcttgtattattttcttgtttgctcatgaaaccaaaggtcttaccttggaagagattaacgaactatatatctctggtgctaagccctggatgcctagacctaagaaccttggtaacttcaccaagcaacaagaagaggttcgtgaaaaatcccgtggtgttcaaggcgaaagtgccgctcatcttgaaaacgttgacggtgaggaaggtattgaggactctagcaatgacattagttccacaacatcttcggatggccgtgccaagcccgaatctagctaccacgatcaggaagaacaattcgcatag

SEQ ID NO: 97125 - protein, 546 aa, Schizosaccharomyces pombe
MGKNLTIVMLVFVSMAGWMFGADTGSIGGITNMRDFQSRFADRYNPVTDSYSYSSARQGLITGMVNVGSFFGCFLSSPLMDRIGKRTSIMFWTIVYLIGIILQVTAVPSWVQIMVAKIWTGLSIGALSVLAPGFQSEVAPADLRGTIVTTYQLAVTGGIFIAACINMGTHKLHKTAQWRVSMGINLLWGIITFIGISFLPESPRYLISVGRDEEALQIMAKNNDLPIEHEVIQTEYHVIKSDCEAELAGGPATWPEIFGPDIRYRTFLGLGVMSLQQLTGDNYYFYYGFEVFEGTGMNSPYLSALILDAVNFGCTFGGLFVLEFFGRRMPLIIGALWQSITFFIYAAVGNRALTRKNGTSNHRAGAVMIVFSCLFIFSFAQTWGPAAYVIVGESYPIRYRSKCAAVATTGNWLWGFLISFFTPFITNSIGFKYGYIFAACNLCAACIIFLFAHETKGLTLEEINELYISGAKPWMPRPKNLGNFTKQQEEVREKSRGVQGESAAHLENVDGEEGIEDSSNDISSTTSSDGRAKPESSYHDQEEQFA

SEQ ID NO: 97126 - DNA, 1608 bp, Schizosaccharomyces pombe
  CDS (1)..(1608)
atggcgaaaatcttaaccattgtcatgttggtcttcgtgtccatggccggatggatgttcggtgctgacacgggttccattggtggtatcactaatatgcgggactttcaatctcgatacgcagacaggtatgatcctgtcacagatacgtattcgtattcttctgctcgccaaggtcttttggttggtatggttaacactggaactactgttggatgtttactttcttcacctcttggagatcgattcggtaaacgtaagtgtatcatgggatggacattggtttacattaccggtgttatcgttcaactcaccacaattccatcttgggttcaaatgatggtagctaaaatttggactggtcttggcattggtgctttgtcagtcattgctcctggttaccaatccgaatcttctcccccccatattcgtggtgccattgtaactacttatcaattgttcattactcttggtatttttattgccgcctgtatcaacatgggtactcacaaatacaccactcatcctgaagctcaatggcgtgttcccatcggtattaacttactttggggtattctcatgttctttggaatgcttttcctccctgaatccccacgttaccttgcagttaaaggaagaaatgaagaatgtatgaaaattcttactcgtaatgctggcctcccagccgatcatcccatcatgcaaaaagaatacaatgccattcaagctgacgttgaggcagaattggctggtggtccttgctcctggcctcagatctttagcaacgaaattcgttacagaacacttttgggaatgggtgtcatggcattccaacaattgaccggtaacaattacttcttctactatggtactcaggtattccgcggtactggcttgaactcccccttcctcgcagctttgattcttgatgctgtcaactttggatgtacgtttggtgctatctttgttcttgaatactttggtcgtcgtggtcccctcatcgttggtggtgtttggcaatctatttgtttctttatttatgcttctgtaggtgatcgtgcacttacccgccccaatggtacttcgaatcatcgtgctggtgccgttatgattgtgttctcatgtcttttcattttcagttttgctcaaacttgggctcctgccgcatacgttatcgttggtgaatcgtatcccattcgttatcgttccaagtgtgctgccgtcgctactgctagcaactggttctggaactttatgatttccttcttcactccctttattagcaactcaattggtttcaagtatggttatgtgtttgcagcttgcaacttgtgtgccgctattattattttcctattcgccaaggaaaccaaaggtcttaccttggaagagattaaccaactttatttgtcgaatattaagccctggaacactggtgcttaccagcgtgatcgggaagatattaagcaaagcgactcagaaaaggagcgtggacctacttctaagttacatgaatacgttgagcatgctcccaactcgtatgcttcaacacactctacagagagtgagaattatcctcaacaagtcaccaatccggttggcttatga

SEQ ID NO: 97127 - protein, 535 aa, Schizosaccharomyces pombe
MAKILTIVMLVFVSMAGWMFGADTGSIGGITNMRDFQSRYADRYDPVTDTYSYSSARQGLLVGMVNTGTTVGCLLSSPLGDRFGKRKCIMGWTLVYITGVIVQLTTIPSWVQMMVAKIWTGLGIGALSVIAPGYQSESSPPHIRGAIVTTYQLFITLGIFIAACINMGTHKYTTHPEAQWRVPIGINLLWGILMFFGMLFLPESPRYLAVKGRNEECMKILTRNAGLPADHPIMQKEYNAIQADVEAELAGGPCSWPQIFSNEIRYRTLLGMGVMAFQQLTGNNYFFYYGTQVFRGTGLNSPFLAALILDAVNFGCTFGAIFVLEYFGRRGPLIVGGVWQSICFFIYASVGDRALTRPNGTSNHRAGAVMIVFSCLFIFSFAQTWAPAAYVIVGESYPIRYRSKCAAVATASNWFWNFMISFFTPFISNSIGFKYGYVFAACNLCAAIIIFLFAKETKGLTLEEINQLYLSNIKPWNTGAYQRDREDIKQSDSEKERGPTSKLHEYVEHAPNSYASTHSTESENYPQQVTNPVGL

SEQ ID NO: 97128 - DNA, 1638 bp, Candida albicans
  CDS (1)..(1638): transl_table=12
atgtcgtccaagatcgaaagaatcttttctggacctgctttaaaaatcaatacttatttggacaagcttccaaaaatttacaatgttttcttcatcgctagtatatccaccattgctggtatgatgtttggttttgatatttcttcaatgtctgcctttattggtgctgaacattatatgaggtatttcaattccccaggatcggatatccaagggttcattacttcatccatggctttgggttctttctttggttctattgcctcctcatttgtttctgaaccctttggtagaagattatcattattgacttgtgctttcttctggatggtcggtgctgctattcaatcatcagttcaaaatcgtgctcaattgattattggtagaatcatttctggtattggtgttggtttcggttctgctgttgctccagtttatggtgctgaattggctccaagaaaaattagaggtcttatcggtggtatgttccaattctttgtcaccttgggtatcatgatcatgttttacttatccttcggattgggccacattaatggtgttgcttcattcagaattgcttggggacttcaaattgtccctggtctttgtttgttcttgggttgtttctttattccagaatctcctcgttggttggctaaacaaggtcaatgggaagctgctgaagaaattgttgccaagatccaagctcatggtgatcgtgaaaatcctgatgttttgattgaaatttctgaaatcaaagatcaattattattggaggagtccagtaaacaaattggatatgctactttattcaccaaaaaatacattcaaagaaccttcactgctattttcgctcaaatttggcaacaattgactggtatgaacgttatgatgtactatatcgtttatattttccaaatggctggttattctggtaacagtaacttggttgcttcatccattcaatatgttatcaacacttgtgtcaccgtgcctgcattatattttattgataaagtaggtagaagaccattattgattggtggtgccactatgatgatggctttccaattcggtcttgctggtattttgggtcaatactcaattccttggccagatagtggtaacgactcagtcaacattagaattccagaagacaataagtctgcctccaaaggtgccattgcttgttgctacttgttcgttgcttcctttgcctttacttggggggtcggtatttgggtctactgtgctgaaatatggggtgataacagagttgctcaacgtggtaatgccatctccacttctgccaattggattttgaatttcgctattgccatgtataccccaactggtttcaagaatattagctggaaaacatatatcatttatggtgtcttctgtttcgctatggctacccatgtctactttggattcccagaaaccaagggtaaaagattggaagaaattggtcaaatgtgggaagaacgtgttcctgcttggagatcaagatcttggcaaccaaccgttcctattgcttccgatgccgaattggcaagaaagatggaagttgaacacgaagaagataaattgatgaatgaagactctaactccgaatccagagaaaatcaagcctaa

SEQ ID NO: 97129 - protein, 545 aa, Candida albicans
MSSKIERIFSGPALKINTYLDKLPKIYNVFFIASISTIAGMMFGFDISSMSAFIGAEHYMRYFNSPGSDIQGFITSSMALGSFFGSIASSFVSEPFGRRLSLLTCAFFWMVGAAIQSSVQNRAQLIIGRIISGIGVGFGSAVAPVYGAELAPRKIRGLIGGMFQFFVTLGIMIMFYLSFGLGHINGVASFRIAWGLQIVPGLCLFLGCFFIPESPRWLAKQGQWEAAEEIVAKIQAHGDRENPDVLIEISEIKDQLLLEESSKQIGYATLFTKKYIQRTFTAIFAQIWQQLTGMNVMMYYIVYIFQMAGYSGNSNLVASSIQYVINTCVTVPALYFIDKVGRRPLLIGGATMMMAFQFGLAGILGQYSIPWPDSGNDSVNIRIPEDNKSASKGAIACCYLFVASFAFTWGVGIWVYCAEIWGDNRVAQRGNAISTSANWILNFAIAMYTPTGFKNISWKTYIIYGVFCFAMATHVYFGFPETKGKRLEEIGQMWEERVPAWRSRSWQPTVPIASDAELARKMEVEHEEDKLMNEDSNSESRENQA

SEQ ID NO: 97130 - DNA, 1641 bp, Saccharomyces cerevisiae
  CDS (1)..(1641)
atggttagttcaagtgtttccattttggggactagcgccaaggcatccacttctctaagtagaaaggatgaaattaaactaacccctgaaacaagggaagctagcttggacattccatacaaacccattattgcatactggacggtgatgggtctctgtctgatgattgcctttggtggattcatttttggttgggatacaggaaccatttcagggtttattaaccaaacagatttcaagagaaggtttggtgagttacaaagggacggcagttttcaactatcagatgtcaggacagggctaattgtcggtatcttcaacataggttgtgctttaggtggcctaacgctgggacgcctgggcgatatttatgggcgtaaaatcggcttaatgtgtgttatactggtgtatgttgttggtatcgtgatccagattgcttcctctgacaaatggtatcaatattttattggtagaattgtttctggaatgggtgttggaggtgttgctgtgctgtcgccaactttgatctcagaaatttccccaaagcacctaagaggcacttgtgtctctttttaccagctaatgattacccttggaattttcttgggctactgtaccaattatggtacaaagaaatattcaaattcaatacagtggcgggttcccttgggtttgtgttttgcgtgggcaatctttatggtgattggaatggttatggttccggaatcgcccagatatttagtagaaaaaggtaagtatgaagaagctagaaggtctttggccaaatcaaacaaggtcacagttactgatccaggcgttgtttttgagtttgatactatagttgcaaatatggaattagaaagggctgttggaaatgccagttggcacgaactcttctcaaataaaggagcaattctaccaagggtaataatgggaatcgttatccagtcactgcaacagcttactggctgtaattattttttctactacggcacgaccattttcaatgctgttggaatgcaagactctttcgagacttccattgtccttggggctgttaattttgcttctacatttgttgcactatacattgtggataaatttgggcgtcgaaaatgtttattgtgggggtctgcctcgatggcaatttgtttcgtcatattcgccaccgttggcgtcactagattatggccacaagggaaagaccaaccttcttcgcaaagtgctggtaatgttatgatcgtttttacttgtttcttcattttctcttttgccattacttgggctcctatcgcctatgtcattgtggcagaaacttatccattaagagttaaaaatcgtgccatggccattgcggttggtgcgaactggatgtggggtttcttgattggatttttcacaccctttatcactagatccataggattttcttatggctatgttttcatgggttgcttaatcttttcgtacttctacgttttcttctttgtttgcgaaacaaagggattaactctggaggaagttaatgaaatgtacgaagaaagaataaagccatggaagtccggaggttggattcccagttctagaagaacaccacaaccaacaagcagtacaccattagttattgttgatagtaaataa

SEQ ID NO: 97131 - protein, 546 aa, Saccharomyces cerevisiae
MVSSSVSILGTSAKASTSLSRKDEIKLTPETREASLDIPYKPIIAYWTVMGLCLMIAFGGFIFGWDTGTISGFINQTDFKRRFGELQRDGSFQLSDVRTGLIVGIFNIGCALGGLTLGRLGDIYGRKIGLMCVILVYVVGIVIQIASSDKWYQYFIGRIVSGMGVGGVAVLSPTLISEISPKHLRGTCVSFYQLMITLGIFLGYCTNYGTKKYSNSIQWRVPLGLCFAWAIFMVIGMVMVPESPRYLVEKGKYEEARRSLAKSNKVTVTDPGVVFEFDTIVANMELERAVGNASWHELFSNKGAILPRVIMGIVIQSLQQLTGCNYFFYYGTTIFNAVGMQDSFETSIVLGAVNFASTFVALYIVDKFGRRKCLLWGSASMAICFVIFATVGVTRLWPQGKDQPSSQSAGNVMIVFTCFFIFSFAITWAPIAYVIVAETYPLRVKNRAMAIAVGANWMWGFLIGFFTPFITRSIGFSYGYVFMGCLIFSYFYVFFFVCETKGLTLEEVNEMYEERIKPWKSGGWIPSSRRTPQPTSSTPLVIVDSK

SEQ ID NO: 97132 - DNA, 1704 bp, Saccharomyces cerevisiae
  CDS (1)..(1704)
atgtcaggtgttaataatacatccgcaaatgagttatctactaccatgtctaactctaactcagcagtaggcgctccctctgttaagactgaacacggtgactctaaaaattcccttaacctagatgccaatgagccacctattgacttacctcaaaaacccctctctgcgtataccaccgtcgcaatcctgtgtttgatgattgcatttggcggcttcatctttggttgggataccggtaccatttctggttttgttaacctttctgatttcatcagaaggttcggtcaaaaaaatgacaagggaacctactacttatcgaaagtaagaatgggtttgatcgtctcaatattcaacattggctgcgccataggcggaattgtcttgtcaaaagtcggtgatatatatggtcgtcgtattggattgattacagttactgccatttacgttgtaggcatcctaatccaaataacttccataaacaagtggtaccaatacttcattggaagaattatttctggcctaggagtgggaggcattgctgtcctttccccaatgttgatatctgaagttgctcccaaacatatcagaggaactctggtccaattgtaccagctgatgggtacgatgggtatttttctaggatactgtaccaattacggtaccaagaactatcacaacgccactcaatggagagtcggccttggtctttgctttgcctgggctacattcatggttagtggaatgatgtttgtaccagaatcaccacgttacctgattgaggttggtaaagatgaggaagcgaaacgttcactatcgaaatccaacaaagtctcagttgacgatccagccttgctagttgaatatgacactataaaggcaggaattgaacttgaaaagctggcaggtaacgcatcatggtctgaactactctccactaaaacaaaggtctttcagcgtgttctcatgggagtgatgatccaatcgctgcagcaattaaccggtgacaactacttcttttactacggtaccaccatcttcaaatctgtcggtctaaaggactcctttcagacttcgatcattatcggtgtggttaattttttctcttcattcatagcggtatacaccattgagaggtttggacgccgtacgtgtctattgtggggtgctgcttctatgctatgctgctttgctgtgtttgcctccgtcggtgtgacaaagttgtggcctcaaggaagcagtcaccaagacattacttctcagggcgccggtaactgtatgattgtgtttactatgttcttcattttttcgttcgccaccacttgggcaggcggctgttacgttattgtctcagagacgtttcctcttagggtcaaatcaagaggaatggcaatcgcaacagctgcaaactggatgtggggtttcctgattagtttctttaccccattcattaccggggcaatcaacttttactacggttacgtattcttaggctgtctggtttttgcatacttttatgtctttttctttgtcccagaaacaaaaggcctgacactggaggaggtgaatactatgtggctggaaggtgtgccagcatggaaatcggcctcatgggtgccaccggagagaagaaccgcagattacgatgctgatgcaatagatcatgacaatagaccaatttacaagaggttcttttccagctga

SEQ ID NO: 97133 - protein, 567 aa, Saccharomyces cerevisiae
MSGVNNTSANELSTTMSNSNSAVGAPSVKTEHGDSKNSLNLDANEPPIDLPQKPLSAYTTVAILCLMIAFGGFIFGWDTGTISGFVNLSDFIRRFGQKNDKGTYYLSKVRMGLIVSIFNIGCAIGGIVLSKVGDIYGRRIGLITVTAIYVVGILIQITSINKWYQYFIGRIISGLGVGGIAVLSPMLISEVAPKHIRGTLVQLYQLMGTMGIFLGYCTNYGTKNYHNATQWRVGLGLCFAWATFMVSGMMFVPESPRYLIEVGKDEEAKRSLSKSNKVSVDDPALLVEYDTIKAGIELEKLAGNASWSELLSTKTKVFQRVLMGVMIQSLQQLTGDNYFFYYGTTIFKSVGLKDSFQTSIIIGVVNFFSSFIAVYTIERFGRRTCLLWGAASMLCCFAVFASVGVTKLWPQGSSHQDITSQGAGNCMIVFTMFFIFSFATTWAGGCYVIVSETFPLRVKSRGMAIATAANWMWGFLISFFTPFITGAINFYYGYVFLGCLVFAYFYVFFFVPETKGLTLEEVNTMWLEGVPAWKSASWVPPERRTADYDADAIDHDNRPIYKRFFSS

SEQ ID NO: 97134 - DNA, 1695 bp, Saccharomyces cerevisiae
  CDS (1)..(1695)
atgtctagtgcgcaatcctctattgatagcgatggagatgttcgagatgctgatattcatgtcgcaccacccgtggaaaaagagtggtcagatggatttgatgacaacgaagtcataaacggggataacgttgagccaccaaaaagagggctcataggttatcttgtcatttacttactgtgttatccaatatcctttgggggtttcctgcctggttgggatagtggtatcacagcaggtttcattaacatggacaactttaaaatgaacttcggttcttacaagcatagcactggtgaatattatttgagcaacgtgcgtatgggtcttcttgtggctatgttcagtattggatgtgccataggtggccttatttttgcccgtcttgctgatactttaggtagaaggctggcaattgtgatcgtggtgttggtatatatggttggtgcaattattcagatcagttcaaatcacaaatggtaccagtactttgtcggtaagatcatctacggtcttggtgctggtggctgttcggtgttgtgtccaatgcttttgtctgaaatagcccccacagatttgagaggtggactggtctcattgtaccaactgaacatgacgttcggtattttcttgggttattgtagcgtttatggtacgagaaaatacgataacactgcacaatggagagtcccccttgggctttgctttttatgggctttgattatcatcattggtatgttattggttccagagtccccaagatatctgattgaatgtgagagacacgaagaggcccgtgcttccattgccaaaatcaacaaggtttcaccagaggatccatgggtactcaaacaggctgatgaaatcaacgccggtgtccttgcccaaagggaactaggagaagcttcatggaaagaacttttctctgtaaaaactaaagtccttcaacgtttgatcacaggtattcttgtgcaaacctttttgcaacttactggtgaaaactacttcttcttctacggaactaccatttttaaatcagtcggtcttactgatgggtttgagacgtcgatcgtcctaggtacagtgaacttcttctccactattattgctgttatggtcgtagacaaaattggccgtcgtaaatgtctgttatttggtgcagctgggatgatggcttgtatggtcatatttgcaagtatcggggtgaaatgtctttaccctcatggccaggacggtccttcttcgaaaggtgcaggtaatgccatgattgtgttcacttgtttctatatattctgctttgcaacgacatgggctcctgttgcttatattgtggttgccgagtcgttcccttcgaaggtcaagtctagagccatgtcgatttcaactgcatgcaactggttatggcaatttttgatcggttttttcacaccattcattactgggtctatccacttctattatggttatgtgttcgtaggttgtttggttgctatgtttttgtacgttttcttctttttaccagaaacgattggtctatctttggaggaaatccaattactatacgaagaaggtataaaaccatggaaatctgcatcttgggtcccaccttctaggagaggtatttcttccgaagaaagtaagaccgagaagaaggattggaagaaatttttgaagttctcaaagaattctgattga

SEQ ID NO: 97135 - protein, 564 aa, Saccharomyces cerevisiae
MSSAQSSIDSDGDVRDADIHVAPPVEKEWSDGFDDNEVINGDNVEPPKRGLIGYLVIYLLCYPISFGGFLPGWDSGITAGFINMDNFKMNFGSYKHSTGEYYLSNVRMGLLVAMFSIGCAIGGLIFARLADTLGRRLAIVIVVLVYMVGAIIQISSNHKWYQYFVGKIIYGLGAGGCSVLCPMLLSEIAPTDLRGGLVSLYQLNMTFGIFLGYCSVYGTRKYDNTAQWRVPLGLCFLWALIIIIGMLLVPESPRYLIECERHEEARASIAKINKVSPEDPWVLKQADEINAGVLAQRELGEASWKELFSVKTKVLQRLITGILVQTFLQLTGENYFFFYGTTIFKSVGLTDGFETSIVLGTVNFFSTIIAVMVVDKIGRRKCLLFGAAGMMACMVIFASIGVKCLYPHGQDGPSSKGAGNAMIVFTCFYIFCFATTWAPVAYIVVAESFPSKVKSRAMSISTACNWLWQFLIGFFTPFITGSIHFYYGYVFVGCLVAMFLYVFFFLPETIGLSLEEIQLLYEEGIKPWKSASWVPPSRRGISSEESKTEKKDWKKFLKFSKNSD

SEQ ID NO: 97136 - DNA, 1623 bp, Saccharomyces cerevisiae
  CDS (1)..(1623)
atgactgctcagattccgtatcaacatagctcgggatacatctctcattttcacaataatgagcttgatgcaggcaggggaagggattataatgtaaccattaagtatctagatgataaagaagaaaatatagaaggccaagcagcaaagattagtcacaatgcgagtctgcatattcccgttttattgtgcttggtaatctcgcttggtggctttatttttggatgggacattggaaccatcggtggaatgacaaatatggttagctttcaagaaaaatttggcacaactaatattatccatgacgatgaaacaatttttgtatctactaagaaacttactgatctgcaaataggcctaattatcagtatttttaacatcagttgtggcgtaggggctttaactctgtcaaaaatcggtgattggattggtaggaaaggtggtatatggtttgccttagtagtgtactgcatcggtataaccattcaaattctctcctatggaaggtggtattttttgacattgggaagagccgtaacgggaatcggtgtgggagtaaccactgtcttggtgccaatgtttctctccgagaattctccactaaaaatcagaggctccatggtatctacgtatcaattgattgtaacatttggcatactaatgggaaacattttaaatttcatatgcgaaagatgttataaagatcctacacaaaatatagcctggcaattgccattgttcttgggatacatttgggcaattataattggaatgtcacttgtttacgttcctgaatctccacagtacttggcaaaaatcaaaaatgatgtgccctctgctaaatactcttttgcgaggatgaatggcatccctgcgacggatagcatggtaattgaattcatcgatgatttgctggaaaataactataataatgaggaaactaacaacgaatcaaaaaagcaaagcttagttaaaagaaacacatttgaatttattatgggaaagccaaagttatggttgagactgattattggtatgatgataatggcatttcaacagctgtccggaataaattatttcttttattacggaacgtctgttttcaaaggtgtcgggattaaggatccttatattacttcaatcatactgtcaagtgttaacttcctttctacgatattaggcatatattacgtggagaaatggggccacaagacatgtttattatatggttcaacaaatttattattttatatgatgacatatgctactgtggggacatttggaagagaaacggacttctcaaatattgttttaattatcgtgacttgttgttttattttttggtttgcaataacattgggcccagttacatttgtactagtgtccgaattgttccctctaagaacgagggccatatcaatggctatttgcacatttatcaattggatgttcaatttcttaatatcacttttaacaccaatgattgtatccaaaattgatttcaaactaggatacatatttgctgcttgcctattagcgttgataatattcagttggatactagttcctgaaacgaggaaaaagaatgagcaagagatcaataaaatatttgaaccggagtag

SEQ ID NO: 97137 - protein, 540 aa, Saccharomyces cerevisiae
MTAQIPYQHSSGYISHFHNNELDAGRGRDYNVTIKYLDDKEENIEGQAAKISHNASLHIPVLLCLVISLGGFIFGWDIGTIGGMTNMVSFQEKFGTTNIIHDDETIFVSTKKLTDLQIGLIISIFNISCGVGALTLSKIGDWIGRKGGIWFALVVYCIGITIQILSYGRWYFLTLGRAVTGIGVGVTTVLVPMFLSENSPLKIRGSMVSTYQLIVTFGILMGNILNFICERCYKDPTQNIAWQLPLFLGYIWAIIIGMSLVYVPESPQYLAKIKNDVPSAKYSFARMNGIPATDSMVIEFIDDLLENNYNNEETNNESKKQSLVKRNTFEFIMGKPKLWLRLIIGMMIMAFQQLSGINYFFYYGTSVFKGVGIKDPYITSIILSSVNFLSTILGIYYVEKWGHKTCLLYGSTNLLFYMMTYATVGTFGRETDFSNIVLIIVTCCFIFWFAITLGPVTFVLVSELFPLRTRAISMAICTFINWMFNFLISLLTPMIVSKIDFKLGYIFAACLLALIIFSWILVPETRKKNEQEINKIFEPE

SEQ ID NO: 97138 - DNA, 1704 bp, Saccharomyces cerevisiae
  CDS (1)..(1704)
atggcaagcgaacagtcctcaccagaaattaatgcagataatctaaacagtagtgcagctgacgttcatgtacagccacccggagagaaagaatggtcagacgggttttatgacaaagaagtcattaatggaaatacgccagacgcaccgaagagaggctttttaggttaccttattatctacttactatgctatcctgtatcctttggcggttttttacctggttgggatagtggtattactgcaggcttcatcaatatggataactttaaaatgaattttggttcttacaagcacagtactggtgagtattatttgagcaacgtgcgtatgggtcttctcgtggccatgttcagtgtaggatgttccattggcggtgttgcttttgcgagacttgctgatactttaggtagaaggctagcaattgtaatcgtggttttggtatatatggttggtgcaattattcagatcagttcgaatcacaaatggtaccaatactttgtcggtaagatcatctacggtcttggtgctggtggctgttcggtgttgtgtccaatgcttttatctgaaatagcccccacagatttgagaggtggacttgtctcattgtaccaacttaacatgaccttcggtattttcttgggttattgtagcgtttatggaacaaggaagtatagtaatactgcgcaatggaggattcctgtgggactatgctttctgtgggctctaattatcatcgttggcatgttattagttccagagtccccaagatatctgattgaatgtgagagacatgaagaggcctgtgtctccatcgccaagatcaacaaggtttcaccagaggatccatgggtactcaaacaggctgatgaaatcaacgccggtgtccttgcccaaagagaactaggggaagcctcatggaaagaacttttctccgtcaaaacaaaagtccttcaacgtttgatcacaggtattcttgtgcaaacctttttgcaacttactggtgaaaactacttcttcttctacggaactaccattttcaaatcagttgggcttactgatgggtttgagacttcgatcgtcctaggtacagtgaatttcttctccactattattgctgttatggtcgtagacaaaataggccgtcgtaaatgtctgttattcggagcggcttcaatgatggcttgtatggtcatatttgcaagtatcggggtaaaatgtctttaccctcatggccaggatggtccatcctcgaaaggtgcaggtaatgccatgattgtgttcacatgcttctatatattctgctttgcaacgacatgggcccctgttgcttatattgtggttgccgagtcattcccttcgaaggtcaaatctaaagcaatgtcaatttcgactgcattcaactggttatggcaattcttgattggttttttcacaccattcattactgggtctatccacttctattatggttatgtgttcgtaggttgtttggttgctatgtttttgtacgttttcttctttttaccagaaacaattggtctatctttggaggaaatccagttactatatgaagaaggtataaaaccatggaaatctgcatcttgggtaccaccctcaaggagaggagcttcttccagggaaactgaggctaagaagaaaagctggaaagaagttttgaagttcccaaagagttttaattga

SEQ ID NO: 97139 - protein, 567 aa, Saccharomyces cerevisiae
MASEQSSPEINADNLNSSAADVHVQPPGEKEWSDGFYDKEVINGNTPDAPKRGFLGYLIIYLLCYPVSFGGFLPGWDSGITAGFINMDNFKMNFGSYKHSTGEYYLSNVRMGLLVAMFSVGCSIGGVAFARLADTLGRRLAIVIVVLVYMVGAIIQISSNHKWYQYFVGKIIYGLGAGGCSVLCPMLLSEIAPTDLRGGLVSLYQLNMTFGIFLGYCSVYGTRKYSNTAQWRIPVGLCFLWALIIIVGMLLVPESPRYLIECERHEEACVSIAKINKVSPEDPWVLKQADEINAGVLAQRELGEASWKELFSVKTKVLQRLITGILVQTFLQLTGENYFFFYGTTIFKSVGLTDGFETSIVLGTVNFFSTIIAVMVVDKIGRRKCLLFGAASMMACMVIFASIGVKCLYPHGQDGPSSKGAGNAMIVFTCFYIFCFATTWAPVAYIVVAESFPSKVKSKAMSISTAFNWLWQFLIGFFTPFITGSIHFYYGYVFVGCLVAMFLYVFFFLPETIGLSLEEIQLLYEEGIKPWKSASWVPPSRRGASSRETEAKKKSWKEVLKFPKSFN

SEQ ID NO: 97140 - DNA, 1704 bp, Saccharomyces cerevisiae
  CDS (1)..(1704)
atggcaagcgaacagtcctcaccagaaattaatgcagataatctaaacagtagtgcagctgacgttcatgtacagccacccggagagaaagaatggtcagacgggttttatgacaaagaagtcattaatggaaatacgccagacgcaccgaagagaggctttttaggttaccttattatctacttactatgctatcctgtatcctttggcggttttttacctggttgggatagtggtattactgcaggcttcatcaatatggataactttaaaatgaattttggttcttacaagcacagtactggtgagtattatttgagcaacgtgcgtatgggtcttctcgtggccatgttcagtgtaggatgttccattggcggtgttgcttttgcgagacttgctgatactttaggtagaaggctagcaattgtaatcgtggttttggtatatatggttggtgcaattattcagatcagttcgaatcacaaatggtaccaatactttgtcggtaagatcatctacggtcttggtgctggtggctgttcggtgttgtgtccaatgcttttatctgaaatagcccccacagatttgagaggtggacttgtctcattgtaccaacttaacatgaccttcggtattttcttgggttattgtagcgtttatggaacaaggaagtatagtaatactgcgcaatggaggattcctgtgggactatgctttctgtgggctctaattatcatcgttggcatgttattagttccagagtccccaagatatctgattgaatgtgagagacatgaagaggcctgtgtctccatcgccaagatcgacaaggtttcaccagaggatccatgggtactcaaacaggctgatgaaatcaacgccggtgtccttgcccaaagagaactaggggaagcctcatggaaagaacttttctccgtcaaaacaaaagtccttcaacgtttgatcacaggtattcttgtgcaaacctttttgcaacttactggtgaaaactacttcttcttctacggaactaccattttcaaatcagttgggcttactgatgggtttgagacttcgatcgtcctaggtacagtgaatttcttctccactattattgctgttatggtcgtagacaaaataggccgtcgtaaatgtctgttattcggagcggcttcaatgatggcttgtatggtcatatttgcaagtatcggggtaaaatgtctttaccctcatggccaggatggtccatcctcgaaaggtgcaggtaatgccatgattgtgttcacatgcttctatatattctgctttgcaacgacatgggcccctgttgcttatattgtggttgccgagtcattcccttcgaaggtcaaatctaaagcaatgtcaatttcgactgcattcaactggttatggcaattcttgattggttttttcacaccattcattactgggtctatccacttctattatggttatgtgttcgtaggttgtttggttgctatgtttttgtacgttttcttctttttaccagaaacaattggtctatctttggaggaaacccagttactatatgaagaaggtataaaaccatggaaatctgcatcttgggtaccaccctcaaggagaggagcttcttccagggaaactgaggctaagaagaaaagctggaaagaagttttgaagttcccaaagagttttaattga

SEQ ID NO: 97141 - protein, 567 aa, Saccharomyces cerevisiae
MASEQSSPEINADNLNSSAADVHVQPPGEKEWSDGFYDKEVINGNTPDAPKRGFLGYLIIYLLCYPVSFGGFLPGWDSGITAGFINMDNFKMNFGSYKHSTGEYYLSNVRMGLLVAMFSVGCSIGGVAFARLADTLGRRLAIVIVVLVYMVGAIIQISSNHKWYQYFVGKIIYGLGAGGCSVLCPMLLSEIAPTDLRGGLVSLYQLNMTFGIFLGYCSVYGTRKYSNTAQWRIPVGLCFLWALIIIVGMLLVPESPRYLIECERHEEACVSIAKIDKVSPEDPWVLKQADEINAGVLAQRELGEASWKELFSVKTKVLQRLITGILVQTFLQLTGENYFFFYGTTIFKSVGLTDGFETSIVLGTVNFFSTIIAVMVVDKIGRRKCLLFGAASMMACMVIFASIGVKCLYPHGQDGPSSKGAGNAMIVFTCFYIFCFATTWAPVAYIVVAESFPSKVKSKAMSISTAFNWLWQFLIGFFTPFITGSIHFYYGYVFVGCLVAMFLYVFFFLPETIGLSLEETQLLYEEGIKPWKSASWVPPSRRGASSRETEAKKKSWKEVLKFPKSFN

SEQ ID NO: 97142 - DNA, 1695 bp, Saccharomyces cerevisiae
  CDS (1)..(1695)
atgcaatcatccactgaaagtgatagagatattcaggatggtcctgatgctgatattcacgtcgcaccacccgtggaaaaagagtggtcagatggatttgatgacaacgaagtcataaacggggataacgttgagccaccaaaaagagggctcataggttatcttgtcatttacttattgtgttatccaatatccttcgggggtttcctgcctggttgggatagtggtatcacagcaggtttcattaacatggacaactttaaaatgaacttcggttcttacaagcatagcactggtgaatattatttgagcaacgtgcgtatgggtcttcttgtggctatgttcagtattggatgtgccataggtggtcttatttttgcccgtcttgctgatactttaggtagaaggctggcaattgtaatcgtggtgttggtatatatggttggtgcaattattcagatcagttcgaatcacaaatggtaccaatacttcgttggtaagattatctatggtcttggtgctggtggctgttcggtgttgtgtccaatgcttttgtctgaaatagctcctacagatttgagaggtggacttgtctcattgtaccaacttaacatgaccttcggtattttcttgggttattgtagcgtttatggtacgagaaaatacgataacactgcacaatggagagtcccacttgggctttgctttttatggactttgattatcatcattggtatgttattggttccagagtccccaagatatcttattgaatgtgagagacacgaagaggcccgtgcttccattgccaaaatcaacaaggtttcaccagaggatccatgggtactcaaacaggctgatgaaatcaacgccggtgtccttgcccaaagagaactaggagaagcttcatggaaagaacttttctccgtcaaaactaaagtccttcaacgtttgatcacaggtattcttgtgcaaacctttttgcaacttactggtgaaaactactttttcttctacggaactaccattttcaaatcagtcggtcttactgatgggtttgagacgtcgatcgttctaggtacagtgaacttcttttccactattattgctgttatggtcgtagacaaaattggccgtcgtaaatgtcttttatttggtgcagctgggatgatggcttgtatggtcatatttgcaagtatcggggtgaaatgtctttaccctcatggccaggatggtccatcctcaaaaggtgcaggtaatgccatgattgtgttcacttgcttctatatattttgctttgcaacgacatgggctcctgttgcttatattgtggttgccgagtcgttcccttcgaaggtcaaatctagggccatgtcgatttcgactgcatgcaactggttgtggcaatttttgatcgggtttttcacaccattcattactgggtctatccacttctattatggttatgtgttcgtaggttgtttggttgcaatgtttctgtacgttttcttctttttaccagaaacgattggtctatctttggaggaaatccaattactatatgaagaaggtataaaaccatggaaatctgcatcttgggtcccaccttctaggagaggtattccttccgaagaaagtaagaccgagaagaaggattggaagaaatttttgaagttctcaaagggttctgattga

SEQ ID NO: 97143 - protein, 564 aa, Saccharomyces cerevisiae
MQSSTESDRDIQDGPDADIHVAPPVEKEWSDGFDDNEVINGDNVEPPKRGLIGYLVIYLLCYPISFGGFLPGWDSGITAGFINMDNFKMNFGSYKHSTGEYYLSNVRMGLLVAMFSIGCAIGGLIFARLADTLGRRLAIVIVVLVYMVGAIIQISSNHKWYQYFVGKIIYGLGAGGCSVLCPMLLSEIAPTDLRGGLVSLYQLNMTFGIFLGYCSVYGTRKYDNTAQWRVPLGLCFLWTLIIIIGMLLVPESPRYLIECERHEEARASIAKINKVSPEDPWVLKQADEINAGVLAQRELGEASWKELFSVKTKVLQRLITGILVQTFLQLTGENYFFFYGTTIFKSVGLTDGFETSIVLGTVNFFSTIIAVMVVDKIGRRKCLLFGAAGMMACMVIFASIGVKCLYPHGQDGPSSKGAGNAMIVFTCFYIFCFATTWAPVAYIVVAESFPSKVKSRAMSISTACNWLWQFLIGFFTPFITGSIHFYYGYVFVGCLVAMFLYVFFFLPETIGLSLEEIQLLYEEGIKPWKSASWVPPSRRGIPSEESKTEKKDWKKFLKFSKGSD

SEQ ID NO: 97144 - DNA, 1713 bp, Saccharomyces cerevisiae
  CDS (1)..(1713)
atgaattcaactcccgatctaatatctcctcagaaatccaattcatccaactcatatgaattggaatctggtcgttcaaaggccatgaatactccagaaggtaaaaatgaaagttttcacgacaacttaagtgaaagtcaagtgcaacccgccgttgcccctccaaacaccggaaaaggtgtctacgtaacggtttctatctgttgtgttatggttgctttcggtggtttcatatttggatgggatactggtaccatttctggttttgttgctcaaactgattttctaagaagatttggtatgaagcaccacgacggtagtcattacttgtccaaggtgagaactggtttaattgtctctatttttaacattggttgtgccattggtggtatcgtcttagccaagctaggtgatatgtatggtcgtagaatcggtttgattgtcgttgtagtaatctacactatcggtatcattattcaaatagcctcgatcaacaagtggtaccaatatttcattggtagaattatctctggtttaggtgtcggtggtatcacagttttatctcccatgctaatatctgaggtcgcccccagtgaaatgagaggcaccttggtttcatgttaccaagtcatgattactttaggtattttcttaggttactgtaccaattttggtaccaagaattactcaaactctgtccaatggagagttccattaggtttgtgtttcgcctgggccttatttatgattggtggtatgatgtttgttcctgaatctccacgttatttggttgaagctggcagaatcgacgaagccagggcttctttagctaaagttaacaaatgcccacctgaccatccatacattcaatatgagttggaaactatcgaagccagtgtcgaagaaatgagagccgctggtactgcatcttggggcgaattattcactggtaaaccagccatgtttcaacgtactatgatgggtatcatgattcaatctctacaacaattaactggtgataactatttcttctactacggtaccattgttttccaggctgtcggtttaagtgactcttttgaaacttctattgtctttggtgtcgtcaacttcttctccacttgttgttctctgtacaccgttgaccgttttggccgtcgtaactgtttgatgtggggtgctgtcggtatggtctgctgttatgttgtctatgcctctgttggtgttaccagattatggccaaacggtcaagatcaaccatcttcaaagggtgctggtaactgtatgattgttttcgcatgtttctacattttctgtttcgctactacctgggccccaattgcttacgttgttatttcagaatgtttcccattaagagtcaaatccaagtgtatgtctattgccagtgctgctaactggatctggggtttcttgattagtttcttcaccccatttattactggtgccatcaacttctactacggttacgttttcatgggctgtatggttttcgcttacttttacgtctttttcttcgttccagaaactaaaggtttatcattagaagaagttaatgatatgtacgccgaaggtgttctaccatggaaatcagcttcctgggttccagtatccaagagaggcgctgactacaacgctgatgacctaatgcatgatgaccaaccattttacaagagtttgtttagcaggaaataa

SEQ ID NO: 97145 - protein, 570 aa, Saccharomyces cerevisiae
MNSTPDLISPQKSNSSNSYELESGRSKAMNTPEGKNESFHDNLSESQVQPAVAPPNTGKGVYVTVSICCVMVAFGGFIFGWDTGTISGFVAQTDFLRRFGMKHHDGSHYLSKVRTGLIVSIFNIGCAIGGIVLAKLGDMYGRRIGLIVVVVIYTIGIIIQIASINKWYQYFIGRIISGLGVGGITVLSPMLISEVAPSEMRGTLVSCYQVMITLGIFLGYCTNFGTKNYSNSVQWRVPLGLCFAWALFMIGGMMFVPESPRYLVEAGRIDEARASLAKVNKCPPDHPYIQYELETIEASVEEMRAAGTASWGELFTGKPAMFQRTMMGIMIQSLQQLTGDNYFFYYGTIVFQAVGLSDSFETSIVFGVVNFFSTCCSLYTVDRFGRRNCLMWGAVGMVCCYVVYASVGVTRLWPNGQDQPSSKGAGNCMIVFACFYIFCFATTWAPIAYVVISECFPLRVKSKCMSIASAANWIWGFLISFFTPFITGAINFYYGYVFMGCMVFAYFYVFFFVPETKGLSLEEVNDMYAEGVLPWKSASWVPVSKRGADYNADDLMHDDQPFYKSLFSRK

SEQ ID NO: 97146 - DNA, 1626 bp, Saccharomyces cerevisiae
  CDS (1)..(1626)
atgtctgaattcgctactagccgcgttgaaagtggctctcaacaaacttctatccactctactccgatagtgcagaaattagagacggatgaatctcctattcaaaccaaatctgaatacactaacgctgaactcccagcaaagccaatcgccgcatattggactgttatctgtttatgtctaatgattgcatttggtgggtttgtctttggttgggatactggtaccatctctggttttgttaatcaaaccgatttcaaaagaagatttggtcaaatgaaatctgatggtacctattatctttcggacgtccggactggtttgatcgttggtatcttcaatattggttgtgcctttggtgggttaaccttaggacgtctgggtgatatgtatggacgtagaattggtttgatgtgcgtcgttctggtatacatcgttggtattgtgattcaaattgcttctagtgacaaatggtaccaatatttcattggtagaattatctctggtatgggtgtcggtggtattgctgtcctatctccaactttgatttccgaaacagcaccaaaacacattagaggtacctgtgtttctttctatcagttaatgatcactctaggtattttcttaggttactgtaccaactatggtactaaagactactccaattcagttcaatggagagtgcctttgggtttgaactttgccttcgctattttcatgatcgctggtatgctaatggttccagaatctccaagattcttagtcgaaaaaggcagatacgaagacgctaaacgttctttggcaaaatctaacaaagtcaccattgaagatccaagtattgttgctgaaatggatacaattatggccaacgttgaaactgaaagattagccggtaacgcttcttggggtgagttattctccaacaaaggtgctattttacctcgtgtgattatgggtattatgattcaatccttacaacaattaactggtaacaattacttcttctattatggtactactattttcaacgccgtcggtatgaaagattctttccaaacttccatcgttttaggtatagtcaacttcgcatccactttcgtggccttatacactgttgataaatttggtcgtcgtaagtgtctattgggtggttctgcttccatggccatttgttttgttatcttctctactgtcggtgtcacaagcttatatccaaatggtaaagatcaaccatcttccaaggctgccggtaacgtcatgattgtctttacctgtttattcattttcttcttcgctattagttgggccccaattgcctacgttattgttgccgaatcctatcctttgcgtgtcaaaaatcgtgctatggctattgctgttggtgccaactggatttggggtttcttgattggtttcttcactcccttcattacaagtgcaattggattttcatacgggtatgtcttcatgggctgtttggtattttcattcttctacgtgtttttctttgtctgtgaaaccaagggcttaacattagaggaagttaatgaaatgtatgttgaaggtgtcaaaccatggaaatctggtagctggatctcaaaagaaaaaagagtttccgaggaataa

SEQ ID NO: 97147 - protein, 541 aa, Saccharomyces cerevisiae
MSEFATSRVESGSQQTSIHSTPIVQKLETDESPIQTKSEYTNAELPAKPIAAYWTVICLCLMIAFGGFVFGWDTGTISGFVNQTDFKRRFGQMKSDGTYYLSDVRTGLIVGIFNIGCAFGGLTLGRLGDMYGRRIGLMCVVLVYIVGIVIQIASSDKWYQYFIGRIISGMGVGGIAVLSPTLISETAPKHIRGTCVSFYQLMITLGIFLGYCTNYGTKDYSNSVQWRVPLGLNFAFAIFMIAGMLMVPESPRFLVEKGRYEDAKRSLAKSNKVTIEDPSIVAEMDTIMANVETERLAGNASWGELFSNKGAILPRVIMGIMIQSLQQLTGNNYFFYYGTTIFNAVGMKDSFQTSIVLGIVNFASTFVALYTVDKFGRRKCLLGGSASMAICFVIFSTVGVTSLYPNGKDQPSSKAAGNVMIVFTCLFIFFFAISWAPIAYVIVAESYPLRVKNRAMAIAVGANWIWGFLIGFFTPFITSAIGFSYGYVFMGCLVFSFFYVFFFVCETKGLTLEEVNEMYVEGVKPWKSGSWISKEKRVSEE

SEQ ID NO: 97148 - DNA, 1704 bp, Saccharomyces cerevisiae
  CDS (1)..(1704)
atgaattcaactccagatttaatatctccacaaaagtcaagtgagaattcgaatgctgacctgccttcgaatagctctcaggtaatgaacatgcctgaagaaaaaggtgttcaagatgatttccaagctgaggccgaccaagtacttaccaacccaaatacaggtaaaggtgcatatgtcactgtgtctatctgttgtgttatggttgccttcggtggtttcgttttcggttgggatactggtaccatttctggtttcgtcgcccaaactgatttcttgagaagattcggtatgaagcataaagatggtagttattatttgtctaaggttagaactggtttaattgtctccattttcaacattggttgtgccattggtggtattattttggctaaattgggtgatatgtacggtcgtaaaatgggtttgattgtcgttgttgttatctacatcatcggtattattattcaaattgcatccatcaacaaatggtaccaatatttcatcggtagaattatttccggtttgggtgttggtggtattgccgttttatctcctatgttgatttctgaagtcgctcctaaggaaatgagaggtactttagtctcctgttaccaactgatgattaccttgggtattttcttgggttactgtaccaacttcggtactaagaactactccaactctgtgcaatggagagttccattaggtttgtgttttgcctgggctttgtttatgatcggtggtatgactttcgttccagaatccccacgttatttggttgaagctggtcaaattgacgaagcaagagcatctctttccaaagttaacaaggttgccccagaccatccattcattcaacaagagttggaagttattgaagctagtgttgaagaagctagagctgctggttcagcatcatggggtgagttgttcactggtaagccggccatgtttaagcgtactatgatgggtatcatgatccaatctctacaacaattgactggtgataactatttcttctactatggtactaccgtttttaacgctgttggtatgagtgattctttcgaaacttctattgttttcggtgtcgtcaacttcttctctacttgttgttctttgtacactgtcgatcgttttggacgtcgtaactgtttgttatatggtgccattggtatggtctgctgttatgtagtttacgcttctgttggtgtcaccagactatggccaaatggtgaaggtaatggttcatccaagggtgctggtaactgtatgattgtctttgcctgtttctatattttctgttttgctaccacttgggctccaattgcttatgttgttatttctgaaactttcccattgagagtcaagtctaaggctatgtctattgctacagctgctaattggttgtggggtttcttgattggtttcttcactccatttattactggtgctattaacttctactacggttacgttttcatgggctgtatggttttcgcctacttctacgttttcttctttgtgccagaaactaagggtttgactttggaagaagtcaatgatatgtacgctgaaggtgttctaccatggaagtctgcttcatgggttccaacatctcaaagaggtgctaactacgatgctgatgcattgatgcatgatgaccagccattctacaagaaaatgttcggcaagaaataa

SEQ ID NO: 97149 - protein, 567 aa, Saccharomyces cerevisiae
MNSTPDLISPQKSSENSNADLPSNSSQVMNMPEEKGVQDDFQAEADQVLTNPNTGKGAYVTVSICCVMVAFGGFVFGWDTGTISGFVAQTDFLRRFGMKHKDGSYYLSKVRTGLIVSIFNIGCAIGGIILAKLGDMYGRKMGLIVVVVIYIIGIIIQIASINKWYQYFIGRIISGLGVGGIAVLSPMLISEVAPKEMRGTLVSCYQLMITLGIFLGYCTNFGTKNYSNSVQWRVPLGLCFAWALFMIGGMTFVPESPRYLVEAGQIDEARASLSKVNKVAPDHPFIQQELEVIEASVEEARAAGSASWGELFTGKPAMFKRTMMGIMIQSLQQLTGDNYFFYYGTTVFNAVGMSDSFETSIVFGVVNFFSTCCSLYTVDRFGRRNCLLYGAIGMVCCYVVYASVGVTRLWPNGEGNGSSKGAGNCMIVFACFYIFCFATTWAPIAYVVISETFPLRVKSKAMSIATAANWLWGFLIGFFTPFITGAINFYYGYVFMGCMVFAYFYVFFFVPETKGLTLEEVNDMYAEGVLPWKSASWVPTSQRGANYDADALMHDDQPFYKKMFGKK

SEQ ID NO: 97150 - DNA, 1731 bp, Saccharomyces cerevisiae
  CDS (1)..(1731)
atgtctgaagaagctgcctatcaagaggatacagcagtccaaaatactccagctgatgctttgtcgccagttgaatccgattctaattccgctttgtctactccatccaacaaagctgaaagagatgacatgaaagatttcgacgagaatcacgaagaatctaataactacgttgaaattccaaagaagcccgcctccgcctacgttacagtttccatctgttgtttaatggttgctttcggtggttttgttttcggttgggatactggtaccatttctggttttgttgctcaaactgattttatcagaagatttggtatgaagcaccacgatggtacttattatttgtctaaggttagaactggtttaattgtctccattttcaacattggttgtgccattggtggtattattttagcaaaattaggtgatatgtatggtcgtaaaatgggtttgattgtcgttgttgtcatctacattatcggtatcattatccaaattgcctcaatcaacaagtggtaccaatatttcattggtagaattatctctggtttaggtgtcggtggtattgccgttttatctcctatgttgatttctgaagtctctccaaagcatattagaggtactttggtttcatgttaccaacttatgattactttgggtattttcttgggttactgtacaaactacggtaccaagacctacaccaattctgtccaatggagagttccattaggtctaggtttcgcttgggctttgtttatgattggtggtatgacattcgttccagaatctccacgttatttagttgaagtcggtaaaattgaagaagctaagcgttctattgctctttcaaataaggtcagcgcagacgatccagctgttatggctgaagtcgaagttgttcaagctacagttgaagctgaaaaattagctggtaatgcctcctggggtgaaatatttagcactaagactaaggttttccaacgtttgatcatgggtgctatgattcaatcattgcaacaattgacaggtgataactatttcttctattacggtactaccgttttcactgctgtcggtttggaagattcttttgaaacttctattgtcttgggtattgtcaactttgcttccacctttgttggtattttcttagtcgaaagatatggtcgtcgtagatgtttattatggggtgctgcttccatgacagcttgtatggttgttttcgcttctgttggtgttacaagattgtggccaaatggtaagaagaacgggtcttctaagggtgctggtaactgtatgattgtcttcacatgtttctacttattctgttttgccactacctgggctccaattccatttgttgttaactctgaaactttcccattgagagttaagtccaagtgtatggctattgctcaagcttgtaactggatctggggtttcttgattggtttctttactccatttatttcaggtgctattgatttctactacggttatgttttcatgggctgtttggtcttttcttacttctacgtcttcttcttcgttccagaaactaaaggtttgactttagaagaagttaacaccttatgggaagaaggtgttttgccatggaaatcaccttcttgggttccaccaaacaagagaggtactgactacaacgctgatgatctaatgcatgatgatcaaccattttacaagaagatgttcggaaaaaagtag

SEQ ID NO: 97151 - protein, 576 aa, Saccharomyces cerevisiae
MSEEAAYQEDTAVQNTPADALSPVESDSNSALSTPSNKAERDDMKDFDENHEESNNYVEIPKKPASAYVTVSICCLMVAFGGFVFGWDTGTISGFVAQTDFIRRFGMKHHDGTYYLSKVRTGLIVSIFNIGCAIGGIILAKLGDMYGRKMGLIVVVVIYIIGIIIQIASINKWYQYFIGRIISGLGVGGIAVLSPMLISEVSPKHIRGTLVSCYQLMITLGIFLGYCTNYGTKTYTNSVQWRVPLGLGFAWALFMIGGMTFVPESPRYLVEVGKIEEAKRSIALSNKVSADDPAVMAEVEVVQATVEAEKLAGNASWGEIFSTKTKVFQRLIMGAMIQSLQQLTGDNYFFYYGTTVFTAVGLEDSFETSIVLGIVNFASTFVGIFLVERYGRRRCLLWGAASMTACMVVFASVGVTRLWPNGKKNGSSKGAGNCMIVFTCFYLFCFATTWAPIPFVVNSETFPLRVKSKCMAIAQACNWIWGFLIGFFTPFISGAIDFYYGYVFMGCLVFSYFYVFFFVPETKGLTLEEVNTLWEEGVLPWKSPSWVPPNKRGTDYNADDLMHDDQPFYKKMFGKK

SEQ ID NO: 97152 - DNA, 1779 bp, Saccharomyces cerevisiae
  CDS (1)..(1779)
atgtcggaacttgaaaacgctcatcaaggccccttggaagggtctgctactgtgagcacaaattctaactcatacaacgagaagtcaggaaactcgactgctcctggtaccgccggttacaacgataatttggcacaagctaaacccgtctcaagttacatttcccatgaaggccctcccaaagacgaactggaagagcttcagaaggaggttgacaaacaactagagaagaaatcgaagtcggatttactatttgtatccgtctgctgtttgatggttgcttttggtgggttcgtgtttgggtgggatactggtactatatctggttttgtcaggcaaacagacttcattaggcgatttggcagcacccgtgcaaacgggactacctatctttccgatgtcagaaccggtttgatggtttctattttcaacatcggctgcgctatcggaggtatagttttgtcaaagctcggtgatatgtatggacgtaagattggtctgatgactgttgtcgtcatttactcaattgggatcatcatccaaatcgcctccattgacaaatggtatcaatatttcattggaagaatcatctcaggactgggcgttggtggtattacagttttggcgcctatgctaatttctgaagtgtcgcctaagcagttgcgtggtactctggtttcatgttaccaattaatgatcactttcggtatctttttgggatattgtactaattttggtaccaagaattactcaaactctgtccaatggagggtaccattaggcttatgctttgcatggtctatttttatgattgttggtatgacgttcgttcctgaatccccacgttatctggtagaagtgggaaaaattgaagaggccaagcggtccttagcaagagctaacaaaaccactgaagactctcctttagtaactttagaaatggagaactatcagtcttctattgaagctgagagattggcgggctctgcttcttggggggaattggttactggtaagccccagatgttcagacgtacactaatgggtatgatgattcaatctttacaacagctgacaggtgacaattacttcttttactatggtactacaattttccaggctgttggtttggaagattcatttgaaactgctattgttttgggtgttgttaattttgtttcgacttttttctcgctatataccgtcgatcgttttggtcgtcgtaattgtttgttatggggctgtgtaggtatgatttgttgctatgtcgtctatgcctctgttggtgttaccagattatggccaaacggtcaagatcaaccatcttcaaagggtgctggtaactgtatgattgttttcgcatgtttctacattttctgtttcgctaccacttgggcccccgttgcctatgtccttatctctgagtcgtatcccttaagagtacgtggtaaagcaatgtcgattgcaagtgcctgtaactggatttgggggttcttgatcagttttttcactccatttattacttcagcaatcaatttctattatggctatgtctttatgggttgtatggtgttcgcatacttttatgtgttcttctttgttccagagacaaagggcttaacattagaagaagtcaacgaaatgtatgaagaaaatgtgctaccttggaagtctaccaaatggatcccaccatctaggagaacaacagattatgacctagacgctactagaaatgatccgagaccattttataaaaggatgttcactaaagaaaaataa

SEQ ID NO: 97153 - protein, 592 aa, Saccharomyces cerevisiae
MSELENAHQGPLEGSATVSTNSNSYNEKSGNSTAPGTAGYNDNLAQAKPVSSYISHEGPPKDELEELQKEVDKQLEKKSKSDLLFVSVCCLMVAFGGFVFGWDTGTISGFVRQTDFIRRFGSTRANGTTYLSDVRTGLMVSIFNIGCAIGGIVLSKLGDMYGRKIGLMTVVVIYSIGIIIQIASIDKWYQYFIGRIISGLGVGGITVLAPMLISEVSPKQLRGTLVSCYQLMITFGIFLGYCTNFGTKNYSNSVQWRVPLGLCFAWSIFMIVGMTFVPESPRYLVEVGKIEEAKRSLARANKTTEDSPLVTLEMENYQSSIEAERLAGSASWGELVTGKPQMFRRTLMGMMIQSLQQLTGDNYFFYYGTTIFQAVGLEDSFETAIVLGVVNFVSTFFSLYTVDRFGRRNCLLWGCVGMICCYVVYASVGVTRLWPNGQDQPSSKGAGNCMIVFACFYIFCFATTWAPVAYVLISESYPLRVRGKAMSIASACNWIWGFLISFFTPFITSAINFYYGYVFMGCMVFAYFYVFFFVPETKGLTLEEVNEMYEENVLPWKSTKWIPPSRRTTDYDLDATRNDPRPFYKRMFTKEK

SEQ ID NO: 97154 - DNA, 1710 bp, Saccharomyces cerevisiae
  CDS (1)..(1710)
atgactgatcgtaaaaccaacttgccagaagaaccgattttcgaagaggcagaagatgatggctgcccttcgatagaaaattcttcacatctgtcagtacctacagtggaggaaaacaaggacttttccgagtataatggggaagaggcagaggaagttgttgttccagaaaagcctgcttcagcctatgctactgtttctatcatgtgtttatgtatggctttcggtggatttatgtccggttgggacacaggtacgatttctggtttcgtcaatcagactgattttttaagaagatttggtaattatagccattccaagaacacttactacttatctaatgtgagaactgggttgattgtgtccatcttcaatgtgggaagcgccattggctgtcttttcttgtctaaattgggtgatatttacggccgctgcatgggtttgattatagttattgtcgtttatatggttggtattgtcattcaaattgcctctatagataagtggtatcagtattttattggaagaattatcgctggtataggtgctggttccattagtgttcttgccccgatgcttatttcggaaactgcgccaaagcatatcagaggtacgttgctagcttgttggcaattgatggtgactttcgcaattttcttgggttattgtaccaattatggtaccaagacttactcgaattctgtccagtggcgtgttccgcttggtctatgttttgcatgggctattattatgattggtggtatgacgtttgttccggaatctcctcggtttttggtgcaagtcggtaagattgagcaagctaaagcttcttttgccaagtcgaacaagcttagtgttgacgatcctgctgtggttgcagagattgatcttcttgttgctggtgtggaggcagaagaagcaatgggaactgcttcatggaaggaattattttcgagaaagactaaagtttttcaacgtttaacgatgacagtcatgattaactctctgcagcaactaaccggtgacaactatttcttctactacggtactactatcttcaaatctgtcggtatgaatgactcttttgagacttcaattgtcttgggtattgtgaattttgcttcttgcttcttttcactttattctgttgataagttgggccgtcgtagatgtcttttacttggagcagccaccatgacggcgtgcatggttatttacgcctccgttggcgtcacaagactatatccgaacggtaaaagtgaaccatcatctaaaggtgctggtaattgtacgattgttttcacgtgtttttacattttctgcttttcctgcacctggggacctgtatgttatgtgattatttctgaaacatttccattaagggtgagatccaagtgtatgtccgttgcaacagcggccaacttattgtgggggttcctaatcgggtttttcactccttttattacttcggcaattaatttctactacggttacgttttcatgggttgcttagcgttttcatatttttacgtctttttctttgttccagaaacaaaaggtctaactttagaagaagttgatgagatgtggatggacggtgtattaccttggaaatctgaatcctgggtaccagcttctagaagggatggtgattatgataacgaaaaattacagcatgacgagaaacccttctacaaaagaatgttttag

SEQ ID NO: 97155 - protein, 569 aa, Saccharomyces cerevisiae
MTDRKTNLPEEPIFEEAEDDGCPSIENSSHLSVPTVEENKDFSEYNGEEAEEVVVPEKPASAYATVSIMCLCMAFGGFMSGWDTGTISGFVNQTDFLRRFGNYSHSKNTYYLSNVRTGLIVSIFNVGSAIGCLFLSKLGDIYGRCMGLIIVIVVYMVGIVIQIASIDKWYQYFIGRIIAGIGAGSISVLAPMLISETAPKHIRGTLLACWQLMVTFAIFLGYCTNYGTKTYSNSVQWRVPLGLCFAWAIIMIGGMTFVPESPRFLVQVGKIEQAKASFAKSNKLSVDDPAVVAEIDLLVAGVEAEEAMGTASWKELFSRKTKVFQRLTMTVMINSLQQLTGDNYFFYYGTTIFKSVGMNDSFETSIVLGIVNFASCFFSLYSVDKLGRRRCLLLGAATMTACMVIYASVGVTRLYPNGKSEPSSKGAGNCTIVFTCFYIFCFSCTWGPVCYVIISETFPLRVRSKCMSVATAANLLWGFLIGFFTPFITSAINFYYGYVFMGCLAFSYFYVFFFVPETKGLTLEEVDEMWMDGVLPWKSESWVPASRRDGDYDNEKLQHDEKPFYKRMF

SEQ ID NO: 97156 - DNA, 1704 bp, Saccharomyces cerevisiae
  CDS (1)..(1704)
atgtccggtgttaataatacatccgcaaatgatttatccactaccgagtctaactctaactcagtagcaaatgcaccatctgtaaaaactgagcataatgactctaaaaactccctcaacctggatgccactgaaccacctattgacttacctcaaaaacccctctctgcatataccaccgtcgcaatcctgtgtttgatgattgcatttggcggcttcatctttggttgggataccggtaccatttctggttttgttaacctttctgatttcatcagaaggttcggtcaaaaaaatgacaagggaacctactacttatcgaaagtaagaatgggtttgatcgtctcaatattcaacattggctgcgccataggcggaattgtcttgtcaaaagtcggtgatatatatggtcgtcgtattggattgattacagttactgccatttacgttgtaggcatcctaatccaaataacttccataaacaagtggtaccaatacttcattggaagaattatttctggcctaggagtgggaggcattgctgtcctttccccaatgttgatatctgaagttgctcccaaacaaatcagaggaaccctggtccaattgtaccagctgatgtgtacgatgggtatttttctaggatactgtaccaattacggtaccaagaactatcacaacgccactcaatggagagtcggccttggtctttgctttgcctggactacattcatggttagtggaatgatgtttgtaccagaatcaccacgttacctgattgaggttggtaaagatgaggaagcgaaacgttcactttcgaaatccaacaaagtctcagtcgacgatccagccttgttagcagaatatgacactataaaggcgggaatcgaacttgaaaagctggcaggtaacgcatcatggtctgaactactctccactaaaacaaaggtctttcagcgtgttctcatgggagtgatgatccaatcgctgcagcaattaaccggtgataactacttcttttactacggcaccaccatcttcaaatctgtcggtctaaaggactcctttcagacttcgatcattatcggtgtggttaattttttctcttcattcatagcggtatacaccattgagaggtttggacgccgtacgtgtctattgtggggtgctgcttctatgctatgctgctttgctgtgtttgcctccgtcggtgtgacaaagttgtggcctcaaggaagcagtcaccaagacattacttctcagggcgccggtaactgtatgattgtgtttactatgttcttcattttttcgttcgccaccacttgggcaggcggctgttacgttattgtctcagagacgtttcctcttagggtcaaatcaagaggaatggcaatcgcaacagctgcaaactggatgtggggtttcctgattagtttctttaccccattcattaccggggcaatcaacttttactacggttatgtattcttaggctgtctggtttttgcatacttttatgtctttttctttgtcccagaaacaaaaggcctgacgctggaggaggtgaatactatgtggctggaaggtgtgccagcatggaaatcagcctcatgggtgccaccagaaagaagaaccgcagattacgatgctgacgccatagaccatgacgatagaccaatctacaagaggttcttttccagctaa

SEQ ID NO: 97157 - protein, 567 aa, Saccharomyces cerevisiae
MSGVNNTSANDLSTTESNSNSVANAPSVKTEHNDSKNSLNLDATEPPIDLPQKPLSAYTTVAILCLMIAFGGFIFGWDTGTISGFVNLSDFIRRFGQKNDKGTYYLSKVRMGLIVSIFNIGCAIGGIVLSKVGDIYGRRIGLITVTAIYVVGILIQITSINKWYQYFIGRIISGLGVGGIAVLSPMLISEVAPKQIRGTLVQLYQLMCTMGIFLGYCTNYGTKNYHNATQWRVGLGLCFAWTTFMVSGMMFVPESPRYLIEVGKDEEAKRSLSKSNKVSVDDPALLAEYDTIKAGIELEKLAGNASWSELLSTKTKVFQRVLMGVMIQSLQQLTGDNYFFYYGTTIFKSVGLKDSFQTSIIIGVVNFFSSFIAVYTIERFGRRTCLLWGAASMLCCFAVFASVGVTKLWPQGSSHQDITSQGAGNCMIVFTMFFIFSFATTWAGGCYVIVSETFPLRVKSRGMAIATAANWMWGFLISFFTPFITGAINFYYGYVFLGCLVFAYFYVFFFVPETKGLTLEEVNTMWLEGVPAWKSASWVPPERRTADYDADAIDHDDRPIYKRFFSS

SEQ ID NO: 97158 - DNA, 1701 bp, Kluyveromyces lactis
  CDS (1)..(1701)
atgtctgaattagagacaggaacagccgctcacggcactcctgtggagaacaagtctgtttccagttcgcaagcgtccactccaaccaatgtcggttccagagacgacttgaaggttgatgacgacaaccattctgttgacgccattgagcttccaaagaaaccacgttccgcttacatcaccgtttccatcttatgtttgatggttgcctttggtggtttcgttttcggttgggatactggtaccatttccggtttcgttaaccaaactgattttattagaagattcggtcaagaaaaggccgatggttctcactacttgtccaatgttagaactggtttgattgtttccattttcaatattggttgtgctatcggtggtattatcttgtccaagctaggtgacatgtacggtcgtcgtattggtttgatgattgttgtgttgatttacgttgttggtatcattattcaaattgcttccatcgacaaatggtaccaatacttcattggtagaattatctctggtctaggtgttggtggtatctctgtgttatccccaatgttgatttctgaaaccgctccaaaacatatcagaggtactttggtctctttctaccaattgatgattactttcggtattttcttgggttactgtactaactacggtaccaagacttactctaactctgttcaatggagagttccattaggtctatgtttcgcttgggccatctttatgatcactggtatgttgttcgttccagaatctccaagattcttggttgaaaaggacagaattgatgaggccaagagatccattgctaagtctaacaaggtttcctacgaagatccagctgttcaagctgaagtcgatttgatttgcgccggtgtcgaagctgaaagattggctggtagtgcttccatcaaagaattgttctctactaagaccaaggttttccaacgtttaatcatgggtatgttaatccaatctttccaacaattgactggtaacaattatttcttctactatggtaccaccattttcaactctgtcggtatggatgattctttcgaaacttccattgtcttgggtattgttaactttgcttctactttcgttgccatttatgtcgttgataagtttggtcgtcgtaaatgtttgttgtggggtgccgctgctatgactgcttgtatggttgtttttgcttctgtcggtgtcaccagattatggccagatggtgcaaaccatcctgaaactgcttccaagggtgctggtaactgtatgattgtcttcgcttgtttctacattttctgtttcgctacgtcgtgggctccaattgcttacgtcgtcgtcgctgaatcttacccattgagagttaaggctaagtgtatggctattgctactgcttccaactggatctggggtttccttaacggtttcttcacaccatttattacatctgctattcacttctactacggttacgtctttatgggttgtttggttgccatgttcttctacgtcttcttctttgttcctgaaactaagggtctaactttggaagaagtccaagaaatgtgggaagaaggtgtcctaccatggaaatcttcatcctgggtcccatcttccagaagaaacgctggttatgatgttgatgctttgcaacatgacgaaaagccatggtacaaggctatgttgtaa

SEQ ID NO: 97159 - protein, 566 aa, Kluyveromyces lactis
MSELETGTAAHGTPVENKSVSSSQASTPTNVGSRDDLKVDDDNHSVDAIELPKKPRSAYITVSILCLMVAFGGFVFGWDTGTISGFVNQTDFIRRFGQEKADGSHYLSNVRTGLIVSIFNIGCAIGGIILSKLGDMYGRRIGLMIVVLIYVVGIIIQIASIDKWYQYFIGRIISGLGVGGISVLSPMLISETAPKHIRGTLVSFYQLMITFGIFLGYCTNYGTKTYSNSVQWRVPLGLCFAWAIFMITGMLFVPESPRFLVEKDRIDEAKRSIAKSNKVSYEDPAVQAEVDLICAGVEAERLAGSASIKELFSTKTKVFQRLIMGMLIQSFQQLTGNNYFFYYGTTIFNSVGMDDSFETSIVLGIVNFASTFVAIYVVDKFGRRKCLLWGAAAMTACMVVFASVGVTRLWPDGANHPETASKGAGNCMIVFACFYIFCFATSWAPIAYVVVAESYPLRVKAKCMAIATASNWIWGFLNGFFTPFITSAIHFYYGYVFMGCLVAMFFYVFFFVPETKGLTLEEVQEMWEEGVLPWKSSSWVPSSRRNAGYDVDALQHDEKPWYKAML

SEQ ID NO: 97160 - DNA, 1704 bp, Kluyveromyces lactis
  CDS (1)..(1704)
atgtctaatcaaatgacagatagtacgagtgctggaagtggcactgaacattccgtcgacactaataccgcattaaaagccggtagtcccaatgaccttaaggtatcgcatgaagaggatttgaatgaccttgaaaagacagccgaagaaaccttacaacaaaagccagcaaaggaatacatatttgtttcattatgttgtgttatggttgcctttggtggtttcgttttcggttgggatactggtaccatttctggttttgttaaccaaactgatttccttagaagattcggtcaagaaaaggccgatggttctcactacttgtccaatgttagaactggtttgattgtttccattttcaatattggttgtgccgttggtggtattgttttgtctaacatcggtgatagatggggtcgtagaattggtttgattaccgttattataatctatgttattggtatcattattcaaattgcatctgtggacaaatggtaccaatatttcattggtagaattatttctggtttaggtgttggtggtatcacagttttgtcgccaatgttgatttcggaaaccgctcctaaacatttaagaggtactttggtctcatgttaccaattgatgattacttttggtattttcttgggttactgtactaactacggtaccaagaactactctaactctgtccaatggagagttccattaggtctatgtttcgcttgggccatctttatggttcttggtatgatgtttgttccagaatctgcaagattcttggttgaaactgatcaaattgaagaggccagaaaatctttggcaaagaccaacaaagtttctattgacgatcctgttgtgaaatatgagctcctaaagatccaatccagtatcgaattggaaaaggctgcaggtaacgcatcatggggtgaattgattaccggtaagccaagtatgttcagacgtactttaatgggtattatgattcaatctctgcaacaattgactggtgataactatttcttctattacggtaccacaattttccaatctgtcggtatggacgattctttcgaaacttcgatcgtcttgggtatcgtgaacttcgcttctaccttctttgctttatacacagttgatcatttcggtcgtcgtaactgtctattatacggttgtgttggtatggttgcatgttacgttgtttatgcatctgttggtgttacaagattatggccagacggtccagatcatcctgatatttcttccaagggtgctggtaactgtatgattgtctttgcgtgcttttatatcttctgtttcgctactacttgggctccaatcgcatacgtggttatctccgaatcctatccacttagagttaagggtaaggcaatggctatcgcttccgcctcgaactggatctggggtttcctgattgggttcttcacaccatttattacatctgctattcacttctactacggttacgtctttatgggttgtatggtattcgccttcttctacgtctacttcttcgttcctgaaaccaagggtctaactttggaagaagttaatgaaatgtactctgaaggtgtcctaccatggaaatcttcatcatgggtcccatcttcaagaagaggtgcagagtacgatgtcgatgctttgcaacatgacgacaagccatggtacaaggctatgttgtaa

SEQ ID NO: 97161 - protein, 567 aa, Kluyveromyces lactis
MSNQMTDSTSAGSGTEHSVDTNTALKAGSPNDLKVSHEEDLNDLEKTAEETLQQKPAKEYIFVSLCCVMVAFGGFVFGWDTGTISGFVNQTDFLRRFGQEKADGSHYLSNVRTGLIVSIFNIGCAVGGIVLSNIGDRWGRRIGLITVIIIYVIGIIIQIASVDKWYQYFIGRIISGLGVGGITVLSPMLISETAPKHLRGTLVSCYQLMITFGIFLGYCTNYGTKNYSNSVQWRVPLGLCFAWAIFMVLGMMFVPESARFLVETDQIEEARKSLAKTNKVSIDDPVVKYELLKIQSSIELEKAAGNASWGELITGKPSMFRRTLMGIMIQSLQQLTGDNYFFYYGTTIFQSVGMDDSFETSIVLGIVNFASTFFALYTVDHFGRRNCLLYGCVGMVACYVVYASVGVTRLWPDGPDHPDISSKGAGNCMIVFACFYIFCFATTWAPIAYVVISESYPLRVKGKAMAIASASNWIWGFLIGFFTPFITSAIHFYYGYVFMGCMVFAFFYVYFFVPETKGLTLEEVNEMYSEGVLPWKSSSWVPSSRRGAEYDVDALQHDDKPWYKAML

SEQ ID NO: 97162 - DNA, 1785 bp, Neurospora crassa
  CDS (1)..(1785)
atggcgatcttcgccatgggctggcagaagcccgacaatgtcgctggctcatctgccccagcgattatggtcggcctgtttgtcgccacaggcggcttactccttggctatgacactggaaccatcaacggcattcttgccatgaaatcgttcaaagaccacttttcaaccggctacatcgacggcaacggacagcctggcatatacccaaaggagagtgcgttaatcgttgccatgctcagcgccggaaccgccatcggagccttactcgctgcgcctctcggagatcactatggacgtcgccggtcccttattggcgccatcggaattttcgtaataggcgccatcctgcaggtttgtgcatataacatcgatctgttggtggcaggaaggacggttgccggtgttggtatcggcattgtctcagtgcttgtccccttatatcagtctgagatggcacccaagtggattcgaggaacactggtgtgcacctaccaactctccatcaccatggggcttcttgccgctgccgtggtcaacatcctcacatacaaattgaagacagctgctgcctaccgggtaccaataggacttcagctaacctgggcctgcgtcttggccctgggcttgaccgtgttacccgaaactcctcgttacctcatcaaacgtggagacaagaacgccgctgcgctttctctcagtcggctgcgtcgactggacattactcaccctgccttggtcgaggagcttgccgaaatcgaagcaaaccatcaatacgagatggcactgggtcccgactcttacaaggacattctctttggcgaacctcaccttggccgtcgcacgtttacaggttgctgtctgcagatgctacaacagcttaccggcgtgaactttatcatgtactatggaaccaccttttttaataacgctggcgttggaaaccccttcaagatctctctcatcatgcaagtcatcaacacagcatcgaccatacccggattgttcgtagtcgaatcatggggccggcgtcggctcttgatggtgggcgccataggcatggccatctgtcagctgctgatcgctgccttcgcgacggccagcggctccaacaacctatcagcacagaacaaggtcctcattacctttgttgcgatatacatcttcttctttgctgcatcatggggcccagttgtatgggtcgtcacctccgagatttatccgctcaaggttagagccaaatccatgtcgataactacggcttcaaattggttcctcaattttggcatcgcctacggcaccccgtatatgcaaacgaacagtgcagcgagcgacgaaagctcgatagatctcggctctaaagtgtttttcgtatggggcgcgttttgcatagtagcggtcggctttgtatggtgtatggtttacgagactagcaagatcagtctcgaacaaattgatgagatgtacgagagagttgaccatgcgtggcacagcaggcgcttcgaacctagttggagtttccaggagatgcgagaccttggcttctccgatggcggcataccgccaacgcagcagctgcagcagcagccgcagcagccgcagcagcaacaacaacaacaccaccaacaacaacaacaccaactacaagttgacctacagcaatcgcagtcacgcactagcaactccagcacgtctcaaaccgacacgggcgggagcaataacaccggggcgtcacaagacgataaacttgtggcatccttgggcaacatcgatctcagctattga

SEQ ID NO: 97163 - protein, 594 aa, Neurospora crassa
MAIFAMGWQKPDNVAGSSAPAIMVGLFVATGGLLLGYDTGTINGILAMKSFKDHFSTGYIDGNGQPGIYPKESALIVAMLSAGTAIGALLAAPLGDHYGRRRSLIGAIGIFVIGAILQVCAYNIDLLVAGRTVAGVGIGIVSVLVPLYQSEMAPKWIRGTLVCTYQLSITMGLLAAAVVNILTYKLKTAAAYRVPIGLQLTWACVLALGLTVLPETPRYLIKRGDKNAAALSLSRLRRLDITHPALVEELAEIEANHQYEMALGPDSYKDILFGEPHLGRRTFTGCCLQMLQQLTGVNFIMYYGTTFFNNAGVGNPFKISLIMQVINTASTIPGLFVVESWGRRRLLMVGAIGMAICQLLIAAFATASGSNNLSAQNKVLITFVAIYIFFFAASWGPVVWVVTSEIYPLKVRAKSMSITTASNWFLNFGIAYGTPYMQTNSAASDESSIDLGSKVFFVWGAFCIVAVGFVWCMVYETSKISLEQIDEMYERVDHAWHSRRFEPSWSFQEMRDLGFSDGGIPPTQQLQQQPQQPQQQQQQHHQQQQHQLQVDLQQSQSRTSNSSTSQTDTGGSNNTGASQDDKLVASLGNIDLSY

SEQ ID NO: 97164 - DNA, 1545 bp, Arabidopsis thaliana
  CDS (1)..(1545)
atggcaggaggagcttttgtatcagaaggaggaggtggtggaagaagttatgaaggaggagtcaccgcattcgttatcatgacatgtatcgtcgccgccatgggaggtctgctctttggttatgaccttggaatctcaggaggtgttacatcaatggaagagtttcttaccaagttcttccctcaagtagagagccagatgaaaaaggcgaagcacgacacggcttactgtaaatttgataaccaaatgctccaattgttcacttcttctctctacctcgcagctcttgtagcttcctttatggcttcagttatcactaggaagcatggacgtaaagtctctatgtttattggtggacttgctttcctcatcggtgcactttttaacgcatttgccgttaatgtttcaatgctcatcatcggtagactgttgcttggtgttggtgttggatttgctaatcagtctactccggtgtacctatctgaaatggctccagcgaagataagaggagctttaaacatcggttttcagatggctataaccattggaatcctagtggcgaatctgattaactatggaacatcaaagatggctcaacatggatggagggtttctttaggtttagcagctgttccagctgttgttatggtgattggatcatttattttgcccgatacaccaaactcgatgctcgagagaggcaaaaatgaggaagcaaaacaaatgttgaagaagatacgtggagctgacaatgttgatcatgagtttcaagatctcattgatgctgttgaagctgccaaaaaggtggaaaatccatggaagaacatcatggagagtaaatatagaccagctttaatcttctgctcggccattccctttttccaacagatcactggaatcaatgtcattatgttctacgctcctgttctcttcaagactcttggttttggtgatgatgctgctcttatgtctgctgttataaccggtgttgtcaacatgctttcaacctttgtctcaatttacgcggttgatagatatggtagaaggttgcttttcctcgaaggtggcattcaaatgttcatttgtcagcttcttgttggttctttcatcggtgcaagattcggaacctcaggaaccggaacattgacgccagcaacagcagactggattcttgctttcatatgtgtgtacgttgcaggatttgcatggtcatggggtccattgggatggttggtaccgagtgagatatgtccattggaaattagaccagcgggacaagccatcaacgtctcggtcaacatgttcttcacttttctcattggtcaattctttttgacaatgctttgtcacatgaagtttggtctattctacttctttgcaagcatggttgcgatcatgacggttttcatttactttttgttgccggagaccaaaggtgttcctattgaagagatgggaagagtttggaagcaacattggttctggaaaaagtatatcccagaagatgctattattggtggacatgatgacaacaataccaattaa

SEQ ID NO: 97165 - protein, 514 aa, Arabidopsis thaliana
MAGGAFVSEGGGGGRSYEGGVTAFVIMTCIVAAMGGLLFGYDLGISGGVTSMEEFLTKFFPQVESQMKKAKHDTAYCKFDNQMLQLFTSSLYLAALVASFMASVITRKHGRKVSMFIGGLAFLIGALFNAFAVNVSMLIIGRLLLGVGVGFANQSTPVYLSEMAPAKIRGALNIGFQMAITIGILVANLINYGTSKMAQHGWRVSLGLAAVPAVVMVIGSFILPDTPNSMLERGKNEEAKQMLKKIRGADNVDHEFQDLIDAVEAAKKVENPWKNIMESKYRPALIFCSAIPFFQQITGINVIMFYAPVLFKTLGFGDDAALMSAVITGVVNMLSTFVSIYAVDRYGRRLLFLEGGIQMFICQLLVGSFIGARFGTSGTGTLTPATADWILAFICVYVAGFAWSWGPLGWLVPSEICPLEIRPAGQAINVSVNMFFTFLIGQFFLTMLCHMKFGLFYFFASMVAIMTVFIYFLLPETKGVPIEEMGRVWKQHWFWKKYIPEDAIIGGHDDNNTN

SEQ ID NO: 97166 - DNA, 1512 bp, Arabidopsis thaliana
  CDS (1)..(1512)
atggcgcttgatcctgagcagcagcaaccaatctcctctgtttccagagagtttggtaagtcatctggtgagatcagcccagaaagggagcctcttattaaagagaatcatgtcccagaaaactactctgtcgttgccgccattctcccgtttttatttccagctctcggaggactgctttatggttatgaaattggtgcaacttcttgtgcaaccatttcacttcagtcgccttcattaagtggaatttcatggtacaacttgtcctcagtggatgttggtctagttaccagtggctcactttacggtgcattatttggctcaattgtggcttttactatcgctgacgttataggaagaagaaaggagctgattttggctgcattattgtatctcgttggagcccttgtgactgcactagccccaacctattccgttctgataattggacgggttatttatggggtctcagttggactggcaatgcatgcggctccgatgtacattgcagagactgctccaagtccgatacgtggacagctggtatcattaaaggaattcttcatagtccttgggatggttggaggttatggaatcggtagtcttacagtcaatgttcattctggttggcgatacatgtatgcaacaagtgtccctttggcagttattatgggaattgggatgtggtggctcccagcatcccctaggtggcttttgttgcgcgtcatacaggggaaagggaatgtggagaaccaacgagaggctgcaatcaaatctctctgctgccttagaggccctgcttttgttgattcagctgctgaacaagtaaatgagattttggctgaactaacttttgtgggcgaggataaagaagtcacatttggtgaattatttcaagggaagtgcttgaaagctctcatcataggaggaggtctagtcttgtttcagcagataactggacaaccaagtgtgctttattatgcaccatcaatactgcagaccgctggcttttcagccgcaggtgatgcaacaagggtctcaattctacttggtctattgaagttgattatgacaggagtagctgttgtagttatcgacagacttggaaggagacctttacttcttggtggagttggtggcatggttgtttcattattcctgctggggtcatactacctctttttcagcgcctcaccagttgttgctgtagttgcactgctgctttatgtgggctgttaccagctatcttttggtccaattggttggctgatgatttcagagatatttccccttaaactaagaggtcgaggtctcagtctagcagtgcttgtgaattttggtgcaaacgcacttgtgacatttgcgttttcacccctaaaggaactgctgggagctgggatactgttttgtgggtttggtgtgatatgtgtattgtctctggtattcatattcttcattgtgccagagacaaagggtctcactcttgaggaaattgaagccaaatgtctctaa

SEQ ID NO: 97167 - protein, 503 aa, Arabidopsis thaliana
MALDPEQQQPISSVSREFGKSSGEISPEREPLIKENHVPENYSVVAAILPFLFPALGGLLYGYEIGATSCATISLQSPSLSGISWYNLSSVDVGLVTSGSLYGALFGSIVAFTIADVIGRRKELILAALLYLVGALVTALAPTYSVLIIGRVIYGVSVGLAMHAAPMYIAETAPSPIRGQLVSLKEFFIVLGMVGGYGIGSLTVNVHSGWRYMYATSVPLAVIMGIGMWWLPASPRWLLLRVIQGKGNVENQREAAIKSLCCLRGPAFVDSAAEQVNEILAELTFVGEDKEVTFGELFQGKCLKALIIGGGLVLFQQITGQPSVLYYAPSILQTAGFSAAGDATRVSILLGLLKLIMTGVAVVVIDRLGRRPLLLGGVGGMVVSLFLLGSYYLFFSASPVVAVVALLLYVGCYQLSFGPIGWLMISEIFPLKLRGRGLSLAVLVNFGANALVTFAFSPLKELLGAGILFCGFGVICVLSLVFIFFIVPETKGLTLEEIEAKCL

SEQ ID NO: 97168 - DNA, 1563 bp, Oryza sativa
  CDS (1)..(1563)
atgccgggggccgtgatcgtgcaccaccacacgcggtacaagacgtaccccggcgaggtcaccggcttcgtcttcttctgctgcctcatcgcctccgtcggcggctgcatcttcggctacgacatcggcctcaccgccgggttgacgtcgacggagtcgttcttggcgatgttcttcccggtgatcttcgagcagcagcaggagcgggtgatcacgaaccagtactgcaagttcgacagccaggtgctgacgctgttcggctcgtcgctcttcctctccgccatggtcgccggcatcttcgcctccccgatgtcccgcgccttcggccgcaagtggaccctcttcgtcgccgccgtcgcctacctcatcggcgccatcctcggcgccatctccttcaacttcatcgttctcctcaccggccgcctcctcctcggcgtcggcgtcggcgtctgcatccacgcgtcaccgctgtacatatcggagatggcgccggcgcagcagcgggggatgctgaacatactgttccagctgatgatcacggtggggatcctgtcggcgagcctgacaacgtactggacgtcgaagatcgccggcgggtgggggtggcgcgtggggctggcgttcgggacggtgccggcggcggtgatcgcgctggggtcgctggccatcccggacacgccggtgtcgctcatcgcgcgcggcgagggcgaggcggcgcgcgcgacgctggccaagatccgcggcgtcgacgacgtgcgcgccgagttcgaggacctgacgacggcgagcgaggagagcaaggcggtggcgcacccgtggcgggagctcttcttcggcggcaggtacaagccgcagctcgcgttcgcggtgctcatccccttcttccagcagctcaccggcatcaacgtcatcatgttctacgcccccgtcctcttcaagaccgtcggcttccgccaggacgcctccctcgtctcctccgtcatcaccggcctcgtcaacgtcttctccaccttcgtcgccgtcatgaccgccgacaaggtcggccgccgcgccctcttcctccaaggtggcacccaaatgatcatctcccagatcttggtgggaacattcatcggattacagttcggggtgagcgggacgggggcgatgtcggagcagtacgcgatgtgcatcgttctgttcgtgtgcgtgtacgtggccgggttcgcgtggtcgtgggggccgatggggtggctgatcccgagcgaggtgtacccgctggcggtgaggtcggcggcgcagagcgtgacggtggcggtgaacatgttcttcacggcgttcatcagccagatcttcctcaccctcctctgccacctccgcttcggcctcttctacttcttcggcgcctgggtcctcctcatgaccgtcttcatcgccaccctcctcccggagaccaagtgcgtgccgctcgaagaggtggcgcacgtctggaggaagcactggttctggcgcaagttcatcgtcgactcccccgaccgcggcggcgccgagatgaggaagaggatagccctagagatgagctag

SEQ ID NO: 97169 - protein, 520 aa, Oryza sativa
MPGAVIVHHHTRYKTYPGEVTGFVFFCCLIASVGGCIFGYDIGLTAGLTSTESFLAMFFPVIFEQQQERVITNQYCKFDSQVLTLFGSSLFLSAMVAGIFASPMSRAFGRKWTLFVAAVAYLIGAILGAISFNFIVLLTGRLLLGVGVGVCIHASPLYISEMAPAQQRGMLNILFQLMITVGILSASLTTYWTSKIAGGWGWRVGLAFGTVPAAVIALGSLAIPDTPVSLIARGEGEAARATLAKIRGVDDVRAEFEDLTTASEESKAVAHPWRELFFGGRYKPQLAFAVLIPFFQQLTGINVIMFYAPVLFKTVGFRQDASLVSSVITGLVNVFSTFVAVMTADKVGRRALFLQGGTQMIISQILVGTFIGLQFGVSGTGAMSEQYAMCIVLFVCVYVAGFAWSWGPMGWLIPSEVYPLAVRSAAQSVTVAVNMFFTAFISQIFLTLLCHLRFGLFYFFGAWVLLMTVFIATLLPETKCVPLEEVAHVWRKHWFWRKFIVDSPDRGGAEMRKRIALEMS

SEQ ID NO: 97170 - DNA, 1413 bp, Brassica napus
  CDS (1)..(1413)
atgacgatgtcggagaaccaaagaaatctggaagctggtttgttactgaacaagaatcgaaacgacatcaacgagtgtcgtatcactgttgttgtgctcttcagtacctttgtatctgtttgtggctctttctgtttcggttgtgcggcaggttattcatcagttgctcaagctgggatcacaaaagacttaggcctctctgttgcacaatactccatgtttggttcaatcatgacttttggagccatgtttggtgccatcttcagtgggaaagtctcagatctcatcggtcgaaaagggacaatgtggtttgctcaaatcttctgcatcgccggttggcttgcaatagcatttgcaaaggacacggtttggctagatgctggaaggttttctactggatttgcagttggtttattcagctacgtgataccagtttatatcgcagaaataacaccaaaacacgtccgaggagcatttgtatttgctaatcagctgatgcaaagttgtgggttgtcattatactacgtcattggaaattttgttcattggcgtaatttggctttaatcggtctgattccatgtgttttgcaagttgtgactttgttcttcattccagagtcccctagattgctgggaaaatggggacttgaaaaggaatgtacagcttcattgcagcttctccgtggagaggatgctgatgtctctgaagaagccaacactatcaaagaaaccatgatcttgtttgaagaaggaccaaagtctagggttatggatttgttccagaggagatatgctccatctcttgttattggtgtggggctaatgcttctacaacaactctctggaagctcagggattatgttttatgtcggtagcgtatttgataaaggaggattcccaagcagcattggctcaatgattcttgcagtgatcatgataccaaaagctattttgggtctgattttggttgagaaaatgggacgtaggccgcttctactggcttctactagtggaatgtgtctttgcagcttgttcctcgcattttccttcagctttcggtcatatggcatgctcgatgagctcactccaatttttacatgcattggtgtagtgggtttcatctcttcatttgccgtaggcatgggaggcttaccatggatcatcatgtctgagattttcccaatgaatgttaaagtatcagctgggactctagttaccttggccaactggtcctttagttggattgtagctttcgcttacaacttcatgattgaatggaacgcatcaggaacattcttgatcttctttagtatctgcgctgggggtatagtcttcatttatgcgatggtacccgaaactaaaggaagaacactagaagatatacaagcttctcttacagattttctacaatga

SEQ ID NO: 97171 - protein, 470 aa, Brassica napus
MTMSENQRNLEAGLLLNKNRNDINECRITVVVLFSTFVSVCGSFCFGCAAGYSSVAQAGITKDLGLSVAQYSMFGSIMTFGAMFGAIFSGKVSDLIGRKGTMWFAQIFCIAGWLAIAFAKDTVWLDAGRFSTGFAVGLFSYVIPVYIAEITPKHVRGAFVFANQLMQSCGLSLYYVIGNFVHWRNLALIGLIPCVLQVVTLFFIPESPRLLGKWGLEKECTASLQLLRGEDADVSEEANTIKETMILFEEGPKSRVMDLFQRRYAPSLVIGVGLMLLQQLSGSSGIMFYVGSVFDKGGFPSSIGSMILAVIMIPKAILGLILVEKMGRRPLLLASTSGMCLCSLFLAFSFSFRSYGMLDELTPIFTCIGVVGFISSFAVGMGGLPWIIMSEIFPMNVKVSAGTLVTLANWSFSWIVAFAYNFMIEWNASGTFLIFFSICAGGIVFIYAMVPETKGRTLEDIQASLTDFLQ

SEQ ID NO: 97172 - DNA, 1599 bp, Brassica napus
  CDS (1)..(1599)
atggccggaggaggattcgcgacggcgacggcaaacggagtggagtttgaggcaaagataactccaatagttatcatctcttgcatcatggctgctaccggcggtctcatgttcggctacgacgttggtgtctccggcggagtgacatcgatgccggactttctgaagaagttttttccggtggttcaccggaaagtagaagccggagccgacaaaaacagcaactactgcaagtacgacaaccaaggactacaactcttcacatcatctctatacttagccggtctaaccgcaacgttcttcgcttcatacacgacgagaacgttaggacgaagaccaaccatgcttatagccggcgtgttcttcatcatcggtgtggttctcaacgccgcggctcaagacctagctatgctcattgcaggaaggatattacttggttgtggagttgggttcgctaatcaagctgtgcctttgttcttgtcggagattgcacctactaagatccgtggtggtcttaatattctgtttcaacttaacgtcactattggaatcctcttcgctaatcttgtcaactatggtaccgccaagatcaagggaggatggggatggagactatccttaggtttggccggagtcccggcgcttctactgacggtgggagctttgttggtgacggaaacaccgaacagtctcgtcgaaagaggtcgtcttgatgaaggaaaagccgttcttcgtcgcattcggggtactgataatgtcgagccagagtttgctgaccttcttgaagctagccgccttgctaaagaagtcaaacacccttttagaaaccttcttcaacgtaggaataggcctcagcttgtcattgccgtggctttgcagatctttcaacaatgcactggaatcaacgccatcatgttctacgctcctgttctcttcagcactttaggttttggcaatgacgctgctctctactctgcggtggtcactggtgcagtcaacgtgctctccacggtagtctcaatctactctgttgacaaagtcggtcgtcgtgttcttctccttgaagctggtgtccaaatgttcttctctcaagtcgttatcgccattatactcggcatcaaagtcacagaccactcacaaaacctctccaaagggtttgcgattctagtcgtggtgatgatctgcacctacgtagctgctttcgcctggtcttggggaccgctcgggtggctaatccctagtgagactttccctctagagacacgttctgctggacagagtgtgacggtctgcgtcaacctcctcttcactttcatcatcgcgcaggctttcctctcgatgttgtgtcatttcaagttcgggatattcatcttcttttcttcttgggtcttggtgatgtctttctttgtgatgttcctccttcctgagaccaagaacattcctatcgaggagatgactgagagagtgtggaagaagcactggttctgggctaggttcatggatgatcatcacgatgatcaagtgttcgcgagtggtcatgtaaatggtaagaagagtaacggtaaatctaacggatttgacccttcaacacggctctaa

SEQ ID NO: 97173 - protein, 532 aa, Brassica napus
MAGGGFATATANGVEFEAKITPIVIISCIMAATGGLMFGYDVGVSGGVTSMPDFLKKFFPVVHRKVEAGADKNSNYCKYDNQGLQLFTSSLYLAGLTATFFASYTTRTLGRRPTMLIAGVFFIIGVVLNAAAQDLAMLIAGRILLGCGVGFANQAVPLFLSEIAPTKIRGGLNILFQLNVTIGILFANLVNYGTAKIKGGWGWRLSLGLAGVPALLLTVGALLVTETPNSLVERGRLDEGKAVLRRIRGTDNVEPEFADLLEASRLAKEVKHPFRNLLQRRNRPQLVIAVALQIFQQCTGINAIMFYAPVLFSTLGFGNDAALYSAVVTGAVNVLSTVVSIYSVDKVGRRVLLLEAGVQMFFSQVVIAIILGIKVTDHSQNLSKGFAILVVVMICTYVAAFAWSWGPLGWLIPSETFPLETRSAGQSVTVCVNLLFTFIIAQAFLSMLCHFKFGIFIFFSSWVLVMSFFVMFLLPETKNIPIEEMTERVWKKHWFWARFMDDHHDDQVFASGHVNGKKSNGKSNGFDPSTRL

SEQ ID NO: 97174 - DNA, 1551 bp, Brassica napus
  CDS (1)..(1551)
atggctggaggagcatttgtatcagagggtagtggaggaggaagctatgaaggtggagtcactggttttgtcatcatgacatgtatcgtggccgctatgggaggtctcctcttcggttacgaccttggaatctcaggaggagtaacatcaatggaggagtttctaagcaagtttttcccggaggttgacaggcaaatgcacaatgctagacgcgagacggcttactgcaaattcgacaaccagttactccagttgttcacttcctcactctacctcgcggctctcgtctcttcctttgcagcttcagctgtcacaaggaaatacggacgcaaaatctccatgtttgttggtggtgttgctttcctcattggttctctattcaacgcatttgcaaccaacgttgcaatgctcatcatcggtagattgttgcttggagtcggtgttgggttcgctaatcagtctacaccggtttacctctcagagatggctcctgccaagatcagaggagcactcaacataggatttcaaatggctattactattggaatcttgatagcaaacctaatcaactacggaacatctcaaatggctaggaacggatggagggtgtcattaggtctagctgctgttccagcagttgtaatggtcattggatcttttgtcttgcccgacacgccaaactcaatgctcgagagaggcaagtacgaacaagcgagagagatgttgcagaagattcgtggagctgataacgtagacgaggagtttcaagatctttgcgatgcttgtgagtctgctaagaaagtggagcatccgtggaagaacatcttccaagaagctaaatacagaccagcgcttgtgttctgttctatgattcctttcttccagcagttcactggtatcaatgtgatcatgttctacgctcctgttctgttcaaaactcttggtttcgcagatgatgcctcgctcatctccgcggttattaccggtgtggtcaatgttgtctctactcttgtctccatctatgcggttgacaggtatggaagaaggctcctcttccttgaaggtggcattcaaatgatcatttgccagatcattgtcggaagcttgatcggtgcgaagtttggaaccacaggatcagggaccttgacacctgcaacagcagattgggttctagctttcatatgcatttacgttgcagggtttgcatggtcatggggtccattaggatggttagtgccaagtgagatctgtccattggaagtaagaccagcgggacaagccatcaatgtgtctgtcaacatgttcttcactttcctcattggacagttcttcctgacgatgctttgccacatgaagtttggtctcttctacttctttggaggaatggttctgatcatgaccatcttcatctacttcttgtttccggagacaaagggggttcctattgaagagatgggaagggtgtggaaggcgcatccgttctggaaacgttacgtcccagatgatgctgttattggaggaagtggagagacctatgtcaaggaggtttaa

SEQ ID NO: 97175 - protein, 516 aa, Brassica napus
MAGGAFVSEGSGGGSYEGGVTGFVIMTCIVAAMGGLLFGYDLGISGGVTSMEEFLSKFFPEVDRQMHNARRETAYCKFDNQLLQLFTSSLYLAALVSSFAASAVTRKYGRKISMFVGGVAFLIGSLFNAFATNVAMLIIGRLLLGVGVGFANQSTPVYLSEMAPAKIRGALNIGFQMAITIGILIANLINYGTSQMARNGWRVSLGLAAVPAVVMVIGSFVLPDTPNSMLERGKYEQAREMLQKIRGADNVDEEFQDLCDACESAKKVEHPWKNIFQEAKYRPALVFCSMIPFFQQFTGINVIMFYAPVLFKTLGFADDASLISAVITGVVNVVSTLVSIYAVDRYGRRLLFLEGGIQMIICQIIVGSLIGAKFGTTGSGTLTPATADWVLAFICIYVAGFAWSWGPLGWLVPSEICPLEVRPAGQAINVSVNMFFTFLIGQFFLTMLCHMKFGLFYFFGGMVLIMTIFIYFLFPETKGVPIEEMGRVWKAHPFWKRYVPDDAVIGGSGETYVKEV

SEQ ID NO: 97176 - DNA, 1527 bp, Brassica napus
  CDS (1)..(1527)
atggccgttgttgtatctgctaacgggaatggtccggcttttgaagccaagatgactgtatatgtctttgtctgcgttctgattgcagctgtcggcggtttgatcttcggttacgacatcggaatttccggtggagtgacggcgatggatgatttcttgaagaagtttttccctacggtgtgggagaggaagcagcacgctcatgagaacaattactgcaagtatgataaccagcacttgcagctattcacatcgtctctttacctagccgcactcgtggccagcttcttggcttcggccgtctgttccaaacttggaaggaagcccactatgcagtttgcttctgtctttttcttgatcggtgtcgggctagccgcaggagctgataacatcgtcatgttgatcattggaagaatcttacttggcttcggtgtaggctttggcaatcaggcagtgccgcttttcttatccgagattgctcctgcacagctcaggggaggtctcaatattgtattccaactcatggtcacaattggaatactaatagccaaccttgtcaactacttcactgccaccgttcaccctaacggatggcgaatcgccctcggtggagccgcaatccccgcggttatcctcctcttgggttcactgatcatctgtgagacccccacgagcctcatagagcgcaacaaaaacgaagaaggcagagaaactctaaggaaaatcagaggagttgaagatataaatgatgagtatgaatctatcgtccatgcgtgcgagattgcgagtcaagttaaagacccttacaggaaactgttgaaaccagcgagtcgtccacctttaatcattggaatgcttctacagcttttccagcagtttagtggaatcaatgctattatgttctatgcaccagttttgttccagactgttggatttggaaataacgcagctcttctctctgcggttatcacgggaagcatcaacgttcttagtacgttcgtagggatctacctcgtggacagaaccggtcggaggttccttcttttacaatcttccgttcacatgctcatttcccagttgatcattggaatcatcctagcgaaagacttgggcatcacgggaacactcgggaaggcacaagccatggtggttgtggtctttgtgtgcgcttacgtgatgggattcgcgtggtcatggggaccattaggatggctaattcctagcgagacgtttcctctagagactcgaagtgcagggttcgctgttgcagtctcgtgcaacatgttattcaccttcgtgatcgcgcaggctttcttgtcgatgctttgtgggatgagatcaggaatattcttcttcttcagcgcttggatcattgtgatgggactgtttgctttgttctttataccggagactaaaggtgtggccattgatgatgtgagggagagagtgtggaagccacactggttctggaaaaggtatatgcttgctgaggatgatcatcaagatgtggagaagagaactgaatga

SEQ ID NO: 97177 - protein, 508 aa, Brassica napus
MAVVVSANGNGPAFEAKMTVYVFVCVLIAAVGGLIFGYDIGISGGVTAMDDFLKKFFPTVWERKQHAHENNYCKYDNQHLQLFTSSLYLAALVASFLASAVCSKLGRKPTMQFASVFFLIGVGLAAGADNIVMLIIGRILLGFGVGFGNQAVPLFLSEIAPAQLRGGLNIVFQLMVTIGILIANLVNYFTATVHPNGWRIALGGAAIPAVILLLGSLIICETPTSLIERNKNEEGRETLRKIRGVEDINDEYESIVHACEIASQVKDPYRKLLKPASRPPLIIGMLLQLFQQFSGINAIMFYAPVLFQTVGFGNNAALLSAVITGSINVLSTFVGIYLVDRTGRRFLLLQSSVHMLISQLIIGIILAKDLGITGTLGKAQAMVVVVFVCAYVMGFAWSWGPLGWLIPSETFPLETRSAGFAVAVSCNMLFTFVIAQAFLSMLCGMRSGIFFFFSAWIIVMGLFALFFIPETKGVAIDDVRERVWKPHWFWKRYMLAEDDHQDVEKRTE

SEQ ID NO: 97178 - DNA, 1524 bp, Brassica napus
  CDS (1)..(1524)
atggaagatcaggtcatctccagcaagaatccggatcccgtcgatcagaagccgaccaatgaaaagccacccggagttaatagatacgctcttcagtgttctattgtcgcctccatcgtctccatcatctttggttacgatactggtgttatgagtggagcaatggtgtttattgaagaagatctaaagactaacgaagttcagatcgaagttctcaccggaatcctcaacctttgtgcccttttcggatcattactcgctggaagaacatcggacataatcggacgtcgttacacaatcgtcttagcttcaatactgttcatgttaggttcagtattaatgggctggggtccaaattatcccgttctcctaaccggtagatgcacagccggtctaggcgtcggttttgctctaatggttgctccggtttactcagccgagatagcaaccgcttcacatagaggactcttagcttctcttcctcatctttgcatcagtatagggattttactaggttacctagtcaattacttcttctccaagttaccaatgcatatcggttggagactgatgctcggcatagctgcgatcccctcgctagtgctagcgttagggatcttgaaaatgccggagtctccacgctggttggtcttacaaggccgtctcggagaagccaagaagatactgaagttagtatcgaactcgcctgaagaagctgagatacggtttaaagacatcaaaaccgctgctggaatcgacgcaaattgtgaagatgaagttgtgaagatggagaacaagaagactcacggtgaaggagtgtggaaagagctaatcttaagaccaacacctgccgtacgacgagttcttttgactgcgttagggattcatttcttccagcacgccacgggtatcgaagccgtgcttttatacggtccgaagatctttaagagggcagggatcacggctaaagacaagcttttcttggtcacaatcggtgtcggaatcatgaagacgacgtttatcttcatagcgactttcttgcttgacaaggtaggtcgaaggaagcttttgttgaccagcgttggaggaatggtttgtgcgttgacgatgttagggtttgggctcacgatggctcagaactctggcgggaaactagcttgggctttggtattaagcatagtttctgcttatagttttgttgcggttttctctattgggcttgggccgataacttgggtgtacagctctgaggtgttcccgttgaagcttagggcgcaaggagcgagtctcggcgttgcggtgaatagagtgatgaatgctacggtgtccatgtcgtttttgtcgctgactagggcgataacaaccggaggagctttctttatgtttgctggagttgcggcggtggcgtggaacttcttcttcttcctaatgccggagacgaaaggtaagtcgcttgaagagatcgaagcgctttttcaaagagatggtgacaataaaacaaaaggagagaacgtcaccgtttaa

SEQ ID NO: 97179 - protein, 507 aa, Brassica napus
MEDQVISSKNPDPVDQKPTNEKPPGVNRYALQCSIVASIVSIIFGYDTGVMSGAMVFIEEDLKTNEVQIEVLTGILNLCALFGSLLAGRTSDIIGRRYTIVLASILFMLGSVLMGWGPNYPVLLTGRCTAGLGVGFALMVAPVYSAEIATASHRGLLASLPHLCISIGILLGYLVNYFFSKLPMHIGWRLMLGIAAIPSLVLALGILKMPESPRWLVLQGRLGEAKKILKLVSNSPEEAEIRFKDIKTAAGIDANCEDEVVKMENKKTHGEGVWKELILRPTPAVRRVLLTALGIHFFQHATGIEAVLLYGPKIFKRAGITAKDKLFLVTIGVGIMKTTFIFIATFLLDKVGRRKLLLTSVGGMVCALTMLGFGLTMAQNSGGKLAWALVLSIVSAYSFVAVFSIGLGPITWVYSSEVFPLKLRAQGASLGVAVNRVMNATVSMSFLSLTRAITTGGAFFMFAGVAAVAWNFFFFLMPETKGKSLEEIEALFQRDGDNKTKGENVTV

SEQ ID NO: 97180 - DNA, 1569 bp, Brassica napus
  CDS (1)..(1569)
atggctggcggtggattcgtagtcggagatggccaaaagacttatcccggcaaactcactccctttgttctcttcacttgtgtcgttgctgccatgggtggtctcatcttcggatacgatatcggaatctctggtggagtgacgtcgatgccatctttcctccggcgtttcttcccgtcggtttaccgtaaacagcaagaagacgtgactacaaaccagtactgtcaatacgatagtcccacgcttacgctgttcacttcgtccctatatttagcggcgctaatttcgtcgctggtggcttccaccgtgacgaggaagttcgggcggaggctctctatgctttttggtggcatactcttttgcgccggagctctcatcaatggttttgctaagcacgtttggatgctcatcgttggtcgtatcttgctcggttttggtatcggtttcgctaatcagtctgtgccactttacctatctgaaatggctccatacaaatacagaggagcgctaaacatcggcttccagctttcaatcacaatcggaatcctcgtagccgaagtgctcaactacttctttgccaagatcaaaggaggctggggatggcgtctcagtctcggcggtgctgtggtccctgccctgatcatcacactcggctccctagtccttcctgacactcccaactcaatgatcgagcgaggcaagcacgagaaggccaaaaccaagctcagacgtatccgtggcgtcgatgacgttagccaagagttcgacgatttagtcgcagctagtaaagagtctcagtcgatagagcacccgtggacgaacctcctccgccgtaaataccggccgcatctcaccatggccattatgattccattctttcagcagctcactgggatcaatgtgattatgttttacgctcctgttttgttcaacaccattggtttcacgaccgacgcttctctcatgtccgccgtggtcactggatcggtcaacgtcgctgccacgcttgtgtcgatctacggtgttgacaagtggggacgtaggtttctctttcttgaaggcggtacacaaatgcttatatgccaggctgtggttgctgcatgcattggggccaagttcggggtagacgggacccctggtgagttaccaaagtggtatgctatagtggttgtaacgtttatatgcatctatgtggcgggtttcgcatggtcatggggtcctctagggtggttagtacctagtgagatcttccccttggagataaggtcggccgcacagagtatcacggtgtccgtgaacatgatcttcacgttcataatcgctcagatcttcttgacaatgctttgccatttgaagtttgggctgttccttgtattcgccttcttcgtgatagtgatgtcgattttcgtctacatattcttgccggagacgaaagggattccgatagaggaaatgggacaagtgtggaggtcacattggtattggtcaaggtttgtggaggatggtgagtatgggaatggacttgagatgggcaagagcagcagcaaccaagtaactaaacatgtttag

SEQ ID NO: 97181 - protein, 522 aa, Brassica napus
MAGGGFVVGDGQKTYPGKLTPFVLFTCVVAAMGGLIFGYDIGISGGVTSMPSFLRRFFPSVYRKQQEDVTTNQYCQYDSPTLTLFTSSLYLAALISSLVASTVTRKFGRRLSMLFGGILFCAGALINGFAKHVWMLIVGRILLGFGIGFANQSVPLYLSEMAPYKYRGALNIGFQLSITIGILVAEVLNYFFAKIKGGWGWRLSLGGAVVPALIITLGSLVLPDTPNSMIERGKHEKAKTKLRRIRGVDDVSQEFDDLVAASKESQSIEHPWTNLLRRKYRPHLTMAIMIPFFQQLTGINVIMFYAPVLFNTIGFTTDASLMSAVVTGSVNVAATLVSIYGVDKWGRRFLFLEGGTQMLICQAVVAACIGAKFGVDGTPGELPKWYAIVVVTFICIYVAGFAWSWGPLGWLVPSEIFPLEIRSAAQSITVSVNMIFTFIIAQIFLTMLCHLKFGLFLVFAFFVIVMSIFVYIFLPETKGIPIEEMGQVWRSHWYWSRFVEDGEYGNGLEMGKSSSNQVTKHV

SEQ ID NO: 97182 - DNA, 1596 bp, Brassica napus
  CDS (1)..(1596)
atgacaggtttgacgccggaaactcaaacagtcccgacgacggcaccggcaacaaaacatgtaccggagttaggtccaccgttgaaaccaaagaggaacaagtatgcattcgcgtgtgcaatcttagcttccatgacttccatcctccttggttatgatataggagtgatgagtggagcactgatctatatcaagagagatttcaaaatcactgatcttcaagtcagtattctcgccggaatacttaacattttttcactcatcggttcttgtgccgccggtaaaacgtccgactggattggtcggcgtaacacaatcgtgtttgccggagctatattcttcgccggagcaatcctcatgggattggctcctaactacgatttcctcatgttcgggaggtttgtcgccggagtaggagtcggttatgctctcatgattgcacctgtctataccgccgaagtcgctccggcatcttctcgtggctttctcacctccttccctgaggtgttcatcaacgcaggaataatgctcgggtatgtatcaaacctcgccttctccaagtttcctctgaagcttggatggagattcatgctcggcgtcggttctgttccttccgtcttactagcgatcggcgttctcgccatgccggaatctccacggtggctcgttatacaaggccgtctaggagaagccaaacgcgtcctcgacaaaacctctgattctccctctgaagccgctcttcgcctcgaagaaatcaaagaagccgccggaatccccgccgattgccatgacgacgtcgttcaggtttcgaggaagaccagccacggcagcggagtatggaaagagcttctaatccgtccgactccagccgtccgccgcgtcatgatcgccgcgatgggaatccatttcttccagcaagccaccgggatcgacgcggtggtcctcttctcaccacgaatcttcaaaaccgccggactcaaaacagatcaccagcagcttctagcgaccgtagcagtaggagtagtgaaaacatcattcatactagtggccactttcctcatcgaccgagtcggaagacggccactgcttctcaccagcgtgggaggcatgatcctgtctctcgcggcgttgggaacatctctaacgataatagaccacacagagaagaaagtgacgtgggctttggtgctaagcatcactacggtgatgacttacgtagctacgttctcgataggagctggacctatcacatgggtttacacctctgagatattcccgttgaggttgaggtcacaggggtcgagtatggccgtggtggtgaacagagtgacgagcggtgtgatctccatgacgtttcttttgctgtcgaaggcgatgacgacgggaggagcgttttacttgtttggagggattgcgacggtggcttgggtgtttttctacactttcttgccggagacgcaagggaggtcgcttgaggatatggatgagctttttagtggcttcaggtggagagactccaagagtaagcctaagaacaacaagaactccagttcgaacccgcaggttgagattggaccaaacaaactgagagcataa

SEQ ID NO: 97183 - protein, 531 aa, Brassica napus
MTGLTPETQTVPTTAPATKHVPELGPPLKPKRNKYAFACAILASMTSILLGYDIGVMSGALIYIKRDFKITDLQVSILAGILNIFSLIGSCAAGKTSDWIGRRNTIVFAGAIFFAGAILMGLAPNYDFLMFGRFVAGVGVGYALMIAPVYTAEVAPASSRGFLTSFPEVFINAGIMLGYVSNLAFSKFPLKLGWRFMLGVGSVPSVLLAIGVLAMPESPRWLVIQGRLGEAKRVLDKTSDSPSEAALRLEEIKEAAGIPADCHDDVVQVSRKTSHGSGVWKELLIRPTPAVRRVMIAAMGIHFFQQATGIDAVVLFSPRIFKTAGLKTDHQQLLATVAVGVVKTSFILVATFLIDRVGRRPLLLTSVGGMILSLAALGTSLTIIDHTEKKVTWALVLSITTVMTYVATFSIGAGPITWVYTSEIFPLRLRSQGSSMAVVVNRVTSGVISMTFLLLSKAMTTGGAFYLFGGIATVAWVFFYTFLPETQGRSLEDMDELFSGFRWRDSKSKPKNNKNSSSNPQVEIGPNKLRA

SEQ ID NO: 97184 - DNA, 1635 bp, Brassica napus
  CDS (1)..(1635)
atgcaatcgtcaacgtacgcagctgttaaaggaaacgctgcgtttgcgtttcagagacgtagcttctctaacctcgtcagcagatcggcgactactaccggaattcgcttctccaccggctcttacttcgcacaactccactcttccgcctcgaaagccatgggagcgaagcttgctcgcgctgagaacgggattcacagtctctcctcggtcaaagctcgatcggttagagcacaagcctcctctggtggtggtgacgaagaagaagcaatacctctgagatctgaaggaaaaatctcagggacggttttacccttcgttggtgttgcttgtcttggtgctatcttgtttggttatcatctcggggttgttaacggtgctcttgagtaccttgctaaggatcttggtatcgctgataatgctgttttgcaagggtggattgttagcgcgttgcttgctggtgcaacggtcggttctttcaccggaggtgcattagctgacaaatttggaagaactagaacttttcaattggatgctatcccgcttgctattggagctttcttatgtgcaacagctcagagtgtgcagactatgattgtgggacgtctgctcgcaggggttggaatcggaatctcatcagccattgtaccactttacatctccgagatatcaccaactgaaattcgcggtgcactcggatctgtgaaccagttgttcatatgtattggaatactcgcagccttgatagctggattaccccttgcagcaaaccctctatggtggaggacgatgtttggtgttgcagttatcccttccgttctattagccataggaatggggttttctccagaaagcccaaggtggctcgttcagcaaggaaaacttactcaagcggaaaaggctatcaaaactctgtatggtaaagaaaaagtggttgaactagtgcgtgacttatcaaactctggccaaggtacttctgagccagaggcaggatggtttgatctattcagcagccgctactggaaagttgtaagcgttggtgcggcgctcttcttgtttcagcagttagctgggataaatgcagttgtgtactactctacatctgtgttccgcagcgccggaatccaatctgatgttgcagccagtgctcttgttggagcatcaaacgtgtttggaactgctgttgcttcgtctttgatggacaaaatgggaaggaaaagtcttctacttactagctttggtggaatggcgttgtctatgctgttgctctcgttgtccttcacatggaaggctcttgctgcatattctggcactcttgctgttgttggaactgttctatatgtcctgtcattttcgcttggtgctggcccagtaccggctcttttgcttccagagatattcgcatccaggatcagagcaaaagccgtcgctctttctctcggcatgcactggatctcaaactttgtgattggactctacttcttgagcgttgtgactaaattcggaatcagcagtgtctacttgggattcgcaggagtgtgtgtccttgcagtcatgtacattgcaggaaacgtggtggagactaaaggacggtcactcgaggaaatagagcttgctcttacatccggagcttaa

SEQ ID NO: 97185 - protein, 544 aa, Brassica napus
MQSSTYAAVKGNAAFAFQRRSFSNLVSRSATTTGIRFSTGSYFAQLHSSASKAMGAKLARAENGIHSLSSVKARSVRAQASSGGGDEEEAIPLRSEGKISGTVLPFVGVACLGAILFGYHLGVVNGALEYLAKDLGIADNAVLQGWIVSALLAGATVGSFTGGALADKFGRTRTFQLDAIPLAIGAFLCATAQSVQTMIVGRLLAGVGIGISSAIVPLYISEISPTEIRGALGSVNQLFICIGILAALIAGLPLAANPLWWRTMFGVAVIPSVLLAIGMGFSPESPRWLVQQGKLTQAEKAIKTLYGKEKVVELVRDLSNSGQGTSEPEAGWFDLFSSRYWKVVSVGAALFLFQQLAGINAVVYYSTSVFRSAGIQSDVAASALVGASNVFGTAVASSLMDKMGRKSLLLTSFGGMALSMLLLSLSFTWKALAAYSGTLAVVGTVLYVLSFSLGAGPVPALLLPEIFASRIRAKAVALSLGMHWISNFVIGLYFLSVVTKFGISSVYLGFAGVCVLAVMYIAGNVVETKGRSLEEIELALTSGA

SEQ ID NO: 97186 - DNA, 1494 bp, Brassica napus
  CDS (1)..(1494)
atggagagacaaaaaagcatggagaaagggttactgaggaagagcttaagcatacgagagaggaagttcccaaacgaagaagcttttcttgaaacaggattagcaagaaaatcccccagagaaattactaagaaagctcaaaacgacgatggtgaatgtcgtgttactgccactgttttctttagcacctttgttgccgtctctggctccttctgcaccggttgtggcgctggtttctcgtcgggtgcgcaatcagggattaccaaagatttatctctctctgttgcagagtactcaatcttcggttcgattttgacactaggcgaattgattggtgcaatattcagcggtaaagtcgccgatgtcttgggaagaaagcggacgatgttgttttgtgaagccttctgcgtcacaggctggcttgctgccgcattggctcaggatgcattgtggctggactgtggaagattgttgcttggaatcggcgttggtctatttagctacgtgatcccagtctatatagctgaaattgcaccaaaacatgtccgtggatcatttgtgttcgccaaccaactgatgcaaaattgtggcattgcacttttcttcattattggcaatttcctgccatggcgattattagcaatagtcggttttgtgccttgtgtgctccacgttttttgtttatttttcattcccgagtctccaaggtggctggcgaagaaaggtcgtgataaagaatgccgatctgctttgcaacgtcttagaggatctgacgtagacatttctcgtgaagcaaacacaattagagataccatagaaatgtccgaagttgacggtgaatctcgaatgtctgaattgtttcagagacgatatgcatatcccttacttatcggagtgggccttatgtttttgcaacaattaagcgggagctcaagtgtaacatattataccagtagcctcttcaacaaaggaggatttccaagtgctattggcacatctgtgatagcgacgatcatggttccgaaagcaatgttgggaacaattatagtcgataaaatggggaggagaacacttctaatggcttcttgtgctgcaatgggtttaagtgcactgctcttaagtgtttcctatgggttcgagtcatttggaattctcccagatctcactcccatctttacttgcatcggtgtattgggtcacattgtggcatttgcaatgggaatgggagggctaccgtggattataatggctgagatatttcccatgaatgtgaaagtgtcagctggaaccttagttaccgtgactaattggttatttggatggattatcacatatactttcaatttcatgctagagtggaatgcatcaggaatgttcttcatcttctcaatggtctccgccttttcgattgtgtttatatactttctggtaccggagactaaaggtcgatcacttgaagaaatacaagcattgttctcgaactctgtacaataa

SEQ ID NO: 97187 - protein, 497 aa, Brassica napus
MERQKSMEKGLLRKSLSIRERKFPNEEAFLETGLARKSPREITKKAQNDDGECRVTATVFFSTFVAVSGSFCTGCGAGFSSGAQSGITKDLSLSVAEYSIFGSILTLGELIGAIFSGKVADVLGRKRTMLFCEAFCVTGWLAAALAQDALWLDCGRLLLGIGVGLFSYVIPVYIAEIAPKHVRGSFVFANQLMQNCGIALFFIIGNFLPWRLLAIVGFVPCVLHVFCLFFIPESPRWLAKKGRDKECRSALQRLRGSDVDISREANTIRDTIEMSEVDGESRMSELFQRRYAYPLLIGVGLMFLQQLSGSSSVTYYTSSLFNKGGFPSAIGTSVIATIMVPKAMLGTIIVDKMGRRTLLMASCAAMGLSALLLSVSYGFESFGILPDLTPIFTCIGVLGHIVAFAMGMGGLPWIIMAEIFPMNVKVSAGTLVTVTNWLFGWIITYTFNFMLEWNASGMFFIFSMVSAFSIVFIYFLVPETKGRSLEEIQALFSNSVQ

SEQ ID NO: 97188 - DNA, 1428 bp, Brassica napus
  CDS (1)..(1428)
atgatggtggtcgaagaagaaagaagtatggaggaagggcttctcaagctgaagaaccaaaacgacacttcagactgtcgtattactgcctgtgttatcctcagcacttttgtcgccgtatgcggctccttttcctttggtgttgctgttggttatacttcaggtgctgagataggaattatgcaagacatgggcctttctattgcagaattttcagcatttggctcattctgcacgttgggagctgcagtcggtgcgctgttcagcggtaaaatggcgatcatgctaggaagaagaggaacaatgtgggtgtccaatatcctctgcatcactggttggctatccatagctttcgctaaggatgtgttgtggctggactttggaagaatatcatcagggataggaatcggcttgattagctatgtggtacctgtctacatagccgaaattacgccaaaacatgttcgcggtacatttaccttttcaaatcagcttcttcaaaacgctggagtctccatggtttatttttgcgggaatttcttggagtggaggatgatggctttactaagtgctttaccatgcgtcattcaagcaatcggtttattctttgtaccagaatccccaagatggctggcaaaagttggtacggaaaaagaactagaaaattcactgcttcggcttagagggagagatgctgatatttcacatgaagcttcagagattcaacttatgaccagaatggtagaaagtgattcaaagtcaagcttttctgatttgttccagagaaagtatagacatactctcgtggtaggaatcgggctaatgttaatacaacagttctcaggaagtgctgctgtaatctcttatgcaagtaccatttttagaaaagctggtttttcggttgccattggatctacgatgttaggcctattcatgataccaaaagccatgattggtctaattcttgtagataaatggggcagacggcccctcttgttgacttctgcctgtgggatgaccataactagcatgcttcttggactcgctttcgcattacagaaaatgcaattacttccagaactaactccagtattcacgtttatctgcgttacgctgtatattgcaacttatgcaataggcgtgggaggcctcccttgggtaataatgtcagagatatttccaataaatataaaagtaacagcagggagtttagttacgttagcctcatggtcaagtagttccatcgtcacttacgctttcaactttctattcgaatggagcactcaaggaacattttacatattcggggctatcggaggaggagcgttgctttttatttggctgctcgttccggaaacgaaaggattatcacttgaagaaatacaaatttcgcttacaggtcagcccgatgagataagccatatgtag

SEQ ID NO: 97189 - protein, 475 aa, Brassica napus
MMVVEEERSMEEGLLKLKNQNDTSDCRITACVILSTFVAVCGSFSFGVAVGYTSGAEIGIMQDMGLSIAEFSAFGSFCTLGAAVGALFSGKMAIMLGRRGTMWVSNILCITGWLSIAFAKDVLWLDFGRISSGIGIGLISYVVPVYIAEITPKHVRGTFTFSNQLLQNAGVSMVYFCGNFLEWRMMALLSALPCVIQAIGLFFVPESPRWLAKVGTEKELENSLLRLRGRDADISHEASEIQLMTRMVESDSKSSFSDLFQRKYRHTLVVGIGLMLIQQFSGSAAVISYASTIFRKAGFSVAIGSTMLGLFMIPKAMIGLILVDKWGRRPLLLTSACGMTITSMLLGLAFALQKMQLLPELTPVFTFICVTLYIATYAIGVGGLPWVIMSEIFPINIKVTAGSLVTLASWSSSSIVTYAFNFLFEWSTQGTFYIFGAIGGGALLFIWLLVPETKGLSLEEIQISLTGQPDEISHM

SEQ ID NO: 97190 - DNA, 1428 bp, Brassica napus
  CDS (1)..(1428)
atggtggcggtgaaagaagaaaaaagcttagaagaagggcttttaaagctcaagaaccaaaacgaggcttcaggatgtcgtattactgcctgtgttatcctcagcactttcgtagccatctgtggctccttctcctttggagtttctgttggttatacttcaggtgctgaggttggaatgataaaagatatgggtctctctatcgcagaattttcagcgtttggttcgttctcgacgttgggagcaacattcggtgcgctgttcagcggtaaaatggcgatcatgctaggaagaaaagggacgatgtgggtctccgatatactctgcatcaccgggtggctgtgcatcgctttcgctaaggatgtgttgtggctgaacatcggaagattctcatcagggataggactcggtttgattagctacgtggtacccgtctacgtagcagaaattacgccgaaacatgttcgcggcacatttaccttttcaaatcagcttcttcaaaactgtggactcgccatggtttatttttgtgggaatttcatcaactggaggatgatggctttactaggtgctttaccctgcttcattcaaggaatcggtttattcttcgtaccagagtccccaagatggctggcaaaagctggtacggataaagaactagaaaattcactgctccggcttagagggagagatgctgatatctcaagcgaagcctcggagattcaagttatgaccaaaatgctggaaagtgattcgaagtcgagtttcagtgatttgttgcagagaaagtatagacacactctcgtggtaggaatcgggctaatgttaatacaacaattctcaggaagtactgctgtattatgttatgcaaacaccatttttagaaaagctggtttttcggtggccattggatcgacactgttaggcatcttcgtggtaccaaaagccatgattggtctaattcttgttgataaatgggggagacggcccctgttgttgacttcagcgtctgggatgtgcttgttttgcatgtttattgggctcgccttcacattacagaaaatgcaattgcttttggaactaactccagtattcacgtttatatgcgttacgctgtatattgcatcctatgcaataggcgtgggaggcctcccttgggtaattatgtctgaggtatttccaatgaatataaaagtaacagcggggagtatagttacattggcctcatggtcaagtagttctatcgtcacttacgctttcaactttctgtttgaatggagcactcaaggaacattttacatattcggggccgtcggaggagcagcactagtttttatctggtttctcgttccggaaacgaaaggattatcacttgaagaaatacaactttcgcttattcgcgagcccaacgaaataaatcatacgtag

SEQ ID NO: 97191 - protein, 475 aa, Brassica napus
MVAVKEEKSLEEGLLKLKNQNEASGCRITACVILSTFVAICGSFSFGVSVGYTSGAEVGMIKDMGLSIAEFSAFGSFSTLGATFGALFSGKMAIMLGRKGTMWVSDILCITGWLCIAFAKDVLWLNIGRFSSGIGLGLISYVVPVYVAEITPKHVRGTFTFSNQLLQNCGLAMVYFCGNFINWRMMALLGALPCFIQGIGLFFVPESPRWLAKAGTDKELENSLLRLRGRDADISSEASEIQVMTKMLESDSKSSFSDLLQRKYRHTLVVGIGLMLIQQFSGSTAVLCYANTIFRKAGFSVAIGSTLLGIFVVPKAMIGLILVDKWGRRPLLLTSASGMCLFCMFIGLAFTLQKMQLLLELTPVFTFICVTLYIASYAIGVGGLPWVIMSEVFPMNIKVTAGSIVTLASWSSSSIVTYAFNFLFEWSTQGTFYIFGAVGGAALVFIWFLVPETKGLSLEEIQLSLIREPNEINHT

SEQ ID NO: 97192 - DNA, 1488 bp, Triticum aestivum
  CDS (1)..(1488)
atggcgtccaagggcgagagggatgtggagatccacgtctcctccccgccgcccgacgaccgcgacgccgctaggcccttgctgcccgccgcctgcgagccctactccgtctccgccgcaatcctccccttctttttcccagctctgggtgggcttctctatggctatgacatcggggcaacatctggtgccaccatatcgctcaagtcccccacatccagtggtacagcatggtacgacctgtcatcagtgcaaaccggcctcgtggtcagcggctcactctatggtgctttgatcggatccgccacggcattcaccattgcggattttctaggaaggcgcagagagcttgttgtttcttctatcatgtatttgattggagctcttctcaccgcagtggctcctaacttccttatcatggtggttggtcgctttttatatggcataggaattggattggctatgcacgctgctccaatgtatattgctgagactgctccaagtcagattagaggcatgctcatctctctcaaggagttctttattgttcttgggatgcttcttggttatatagtaggcaatctatttgttgaagtgatttctggttggcgctacatgtatgccaccagtgctccgatatgtgtcattatgggcatcggaatgtgctggttaccttgttcacctaggtggcttctgttatgtgccacacaaggaaaaggagatctgcgggagacaaaagaaaatgctacacgttgcttatgtcgattgaggggtcaagcgtcacctgatttggtttcggagcaggtcaatttgattctggaagaactctcatacgttggtgaagagaaaaaagcaggcttcagtgagatctttcaaggaaagtgtctcaaagcaatgataattggatgtggtttggtgttctttcagcaggtcactggtcaaccaagtgtgctatattatgctgcgacaatttttcagagtgctggattctctggagcatctgatgccactcgtgtatcaattcttcttggcttgctgaagctgattatgactggagttgccgttcttgtggttgacaaacttggcagaagaccattactaattggtggtgttagtggaattgctgtctccctattcttattgtcttcatactataccttgtttacgggtgctccttatgtggctgtaatagcacttctactgtatgttggctgctaccagttatcatttggcccgattggctggcttatgatttcggaggttttcccgctgaaactgcgtggccgtggattgagtgttgctgttcttgtgaacttcgcctccaacgcgcttgtcacttttgctttctccccactagaggacttgattggcaccggggttctctttgcttcgttcggggtgattgcggtggcgtctctcgcattcatattctgcattgtgcctgaaacaaaagggctcaccctggaagaaatcgaagccaaactgtag

SEQ ID NO: 97193 - protein, 495 aa, Triticum aestivum
MASKGERDVEIHVSSPPPDDRDAARPLLPAACEPYSVSAAILPFFFPALGGLLYGYDIGATSGATISLKSPTSSGTAWYDLSSVQTGLVVSGSLYGALIGSATAFTIADFLGRRRELVVSSIMYLIGALLTAVAPNFLIMVVGRFLYGIGIGLAMHAAPMYIAETAPSQIRGMLISLKEFFIVLGMLLGYIVGNLFVEVISGWRYMYATSAPICVIMGIGMCWLPCSPRWLLLCATQGKGDLRETKENATRCLCRLRGQASPDLVSEQVNLILEELSYVGEEKKAGFSEIFQGKCLKAMIIGCGLVFFQQVTGQPSVLYYAATIFQSAGFSGASDATRVSILLGLLKLIMTGVAVLVVDKLGRRPLLIGGVSGIAVSLFLLSSYYTLFTGAPYVAVIALLLYVGCYQLSFGPIGWLMISEVFPLKLRGRGLSVAVLVNFASNALVTFAFSPLEDLIGTGVLFASFGVIAVASLAFIFCIVPETKGLTLEEIEAKL

SEQ ID NO: 97194 - DNA, 1530 bp, Triticum aestivum
  CDS (1)..(1530)
atgacgatcgatttgtccaccatgcccgggagctcctcctcccgtctcctggacgccgccgcggcgaggaaggacatgaacttcttcaaaaaccgctacgtgcttgggctcaccggcgtcgccggaatcggcgggttcctctttggatacgacacaggtgttatatctggagcgcttctgtatattcgggacgaatttccagctgtcaaagacaatctattcttgcaggagacaattgttagcatggcattacttggagccatgcttggagcagctgggggcggttggataaatgatgcctacggtcgtaaaaagtccactcttcttgctgacctgatgttcgcacttggttcactggttatgtgtgctgctggcggtccttacattctgatacttggaaggctctttgttggattgggtgtgggaatagcatcagtcactgccccagtttacatcgctgaagctgctccttcagaaatcaggggaggtttggtgtcaactaatgtcctcatgattactggcggccaattcttctcctacttggtcaatcttggctttaccgaggttcctgggacatggcgctggatgctcggagtagctgctgtgccagcaatcatacagtttgtgctgatgctttttctgccagaatctccccgctggctttaccggaaggatgagaaagcaaaagctattgctgtcctggagcagatatatgactctggtcgtctggaggaagaggttgagctgcttgcgtcggcttccatgcatgaattccagtctaactgtactgggagctatttggacatattcaggttgaaggaattaaggctagctttttttgctggagctggtcttcaggcctttcagcaatttactggcatcaacaccgtcatgtactacagccccacgatcgtccagatggctgggttcacttccaacaggctggccctgctactttccctcatcgttgccgccatgaatgcgagtggaaccatcgtcggaatctacctcatcgaccgttgtggccgccgccgcctggcccttacaagcctagccggggtcgtgctctcccttgtcatcctcgccacggccttcatactgcagtcatcctccagcctctgcgggagcctgttcagcggctcctgccaaggcgtgctggggtggttcgcggtcggagggctcgctctgtacatcgccttcttctctccgggcatggggccggtgccatgggccgtgaactcggagatctaccccgaggcctaccgcggcatgtgcggcggcatgtcggccaccgtcaactggatctccaacctgatcgtggcgcagacgttcctctcgatcgtggggtgggtcggcaccggcccaacattcataatcatcgccgggatagccgtgatggccttgatcttcgtcgccctctacgtgccggagaccaagggcctgagcttcgaggaggtggacctcctgtggaaagagcgggcctggggaagccagggcagccacgagagcctcctgggtgctgcgccgtaa

SEQ ID NO: 97195 - protein, 509 aa, Triticum aestivum
MTIDLSTMPGSSSSRLLDAAAARKDMNFFKNRYVLGLTGVAGIGGFLFGYDTGVISGALLYIRDEFPAVKDNLFLQETIVSMALLGAMLGAAGGGWINDAYGRKKSTLLADLMFALGSLVMCAAGGPYILILGRLFVGLGVGIASVTAPVYIAEAAPSEIRGGLVSTNVLMITGGQFFSYLVNLGFTEVPGTWRWMLGVAAVPAIIQFVLMLFLPESPRWLYRKDEKAKAIAVLEQIYDSGRLEEEVELLASASMHEFQSNCTGSYLDIFRLKELRLAFFAGAGLQAFQQFTGINTVMYYSPTIVQMAGFTSNRLALLLSLIVAAMNASGTIVGIYLIDRCGRRRLALTSLAGVVLSLVILATAFILQSSSSLCGSLFSGSCQGVLGWFAVGGLALYIAFFSPGMGPVPWAVNSEIYPEAYRGMCGGMSATVNWISNLIVAQTFLSIVGWVGTGPTFIIIAGIAVMALIFVALYVPETKGLSFEEVDLLWKERAWGSQGSHESLLGAAP

SEQ ID NO: 97196 - DNA, 1524 bp, Glycine max
  CDS (1)..(1524)
atggccggagggggattagccgtcgttgatgcaccgccctgtggcttcgacggcaagataacactctcagttgtcatcacttgcatcgttgctgcatccagtggactcattttcggatatgacatcggtgtttcaggaggtgtcacaacgatggtaccgtttcttgaaaaattcttcccatcaatactgagaaatggagctggtgcgaagaacatgtactgtgtgtatgacagccaattgttgacgttattcacgtcttctttgtaccttgctgggttagtgtcatctcttgcggctagccgagtcacggcggcgttgggtcggagaaacaccatcatgttgggtggtgtcattttttttgctggtggcgctcttaatggaggtgcggaaaatattgctatgctcattttgggtcgtatccttctgggccttggggtcggtttcactaatcaagctgcgccactatacctctctgaaatcgcaccaccaaaatggcgaggggctttcaacacaggcttccaatttttcctaggagttggagtgcttgccgccggctgcataaactacgccaccgcgaagcacccgtgggggtggcgaatctcccttggcctcgccgtggtgcccgcaaccgttatgacagttggcgcattcctcataaccgacacccccagcagcttggttgagcgcgggaaaatagaccaagccagaaacgccttgagcaaagtcagagggtccaacatcgacgttgaacccgagttggaagagctaattaattggtcgcataatgcgaaatctatggtgcaggagtccttcatgaccatatttgagagacgctatcgaccccacttggtcatggcaattgctatcccactttttcagcagcttacgggcatcaacatcgtcgcattctattcacctaacctctttcagcctgtgggtatgggacacgatgctgctttactttcaactgtaatacttggaattgtcaaccttgcttctctcatcttatccactgctgttgttgatcgctttggtcgaaggttcttgttcattactggtggcattctcatgcttttctgtcagattgcggtgtctgctttgctagctatggtgactggtgttcatggtacaaaggacatatcaaagggtaacgcaatgttggtattggtcctactgtgcttttatgatgcaggttttggttggtcatggggccctctcacctggctaattccaagtgaaattttccccttgaaaatcagaaccaccgggcaaagcatagcagttggggtgcagtttatagcactatttgcgttatcccagacatttttgacaatgctgtgccacttcaagttcggcgccttcttgttctatactgtttggattgcagtgatgactctctttattatgtttttcttgcccgagacgaaaggaattccattggagtcaatgtacaccatatggggcaaacactggttttgggggaggtttgttggaggagcagttaagcaagataatcttccatga

SEQ ID NO: 97197 - protein, 507 aa, Glycine max
MAGGGLAVVDAPPCGFDGKITLSVVITCIVAASSGLIFGYDIGVSGGVTTMVPFLEKFFPSILRNGAGAKNMYCVYDSQLLTLFTSSLYLAGLVSSLAASRVTAALGRRNTIMLGGVIFFAGGALNGGAENIAMLILGRILLGLGVGFTNQAAPLYLSEIAPPKWRGAFNTGFQFFLGVGVLAAGCINYATAKHPWGWRISLGLAVVPATVMTVGAFLITDTPSSLVERGKIDQARNALSKVRGSNIDVEPELEELINWSHNAKSMVQESFMTIFERRYRPHLVMAIAIPLFQQLTGINIVAFYSPNLFQPVGMGHDAALLSTVILGIVNLASLILSTAVVDRFGRRFLFITGGILMLFCQIAVSALLAMVTGVHGTKDISKGNAMLVLVLLCFYDAGFGWSWGPLTWLIPSEIFPLKIRTTGQSIAVGVQFIALFALSQTFLTMLCHFKFGAFLFYTVWIAVMTLFIMFFLPETKGIPLESMYTIWGKHWFWGRFVGGAVKQDNLP

SEQ ID NO: 97198 - DNA, 1524 bp, Glycine max
  CDS (1)..(1524)
atggaagttccaatcaagtatccggcaaaactcacccttagggtggttcttacttgtatcatggcggccaccggtgggttgatttttggctatgaccatggtgtttcaggtggagtgacctccatggattccttcctgaagaagttcttcccatctgtatatgaaaaggagtctaacgtgaagccttcttcaaaccagtactgcaaattcaacagtcagatactgacactgtttacatcttccctttatctaagtgctcttgctgcgggtcttggggcatccagcataacccgaatgttgggaagacgtgcaactatgattatgggtggaatattctttgtggcaggtgcattactcaatggattagctgtaagcatctggatgcttattgttggcaggttgttgcttggttttggcattggttgtgccaatcagtcagttccaatctatgtgtcagagatggccccttataaataccgtggagctctaaacatgtgcttccaattgtcaatcacaataggcatctttgtggccaatctcttcaactactacttttccaagatactgaatggtcagggatggcgcttaagcctggggctaggtgcagtccctgctttcatttttgttataggctcattttgccttcctgactcaccaagctcccttgttgaacgtggtcttcatgaagatgccaaaagggagcttgtaaaaattcgtggtacaactgaagttgatgcagaattcagggacatacttgctgctagtgaagcctcacagaatgtgaaacacccttggagaaccttgatggatagaaagtataggccacagcttgtttttgccatttgcattcccttcttccaacagttcactggcttgaatgtgatcacattctatgctcctattttgttcagaacaattggttttggaagcggggcatctctcatgtctgcagtgatcattggcagctttaaacctgtttcaaccctggtttcaattcttcttgtcgataaatttggaagacgcacccttttcctggagggtggtgctcaaatgttgatttgccagatcatcatgacaattgctattgcggttacatttggcacaaatgggaacccaggtacactgcctaagtggtatgcaatcgtggttgtggggatcatctgtgtgtatgtttcaggttttgcttggtcatggggtcctctaggctggttgatacctagtgaaatctttccccttgagattagacctgctgctcagagtatcacagttggtgtcaacatgatcagcactttcttcatagctcaattcttcacatcaatgctctgtcacatgaagtttggtttgttcatcttctttgggtgctttgtggtgatcatgaccttattcatctacaagttattgcctgagacaaagggcatcccacttgaggaaatgagtatggtttggcagaaacaccccatctggggcaaatttttggagtcggacaaccccatccaaaacgacaaaatgaactccaaatgttga

SEQ ID NO: 97199 - protein, 507 aa, Glycine max
MEVPIKYPAKLTLRVVLTCIMAATGGLIFGYDHGVSGGVTSMDSFLKKFFPSVYEKESNVKPSSNQYCKFNSQILTLFTSSLYLSALAAGLGASSITRMLGRRATMIMGGIFFVAGALLNGLAVSIWMLIVGRLLLGFGIGCANQSVPIYVSEMAPYKYRGALNMCFQLSITIGIFVANLFNYYFSKILNGQGWRLSLGLGAVPAFIFVIGSFCLPDSPSSLVERGLHEDAKRELVKIRGTTEVDAEFRDILAASEASQNVKHPWRTLMDRKYRPQLVFAICIPFFQQFTGLNVITFYAPILFRTIGFGSGASLMSAVIIGSFKPVSTLVSILLVDKFGRRTLFLEGGAQMLICQIIMTIAIAVTFGTNGNPGTLPKWYAIVVVGIICVYVSGFAWSWGPLGWLIPSEIFPLEIRPAAQSITVGVNMISTFFIAQFFTSMLCHMKFGLFIFFGCFVVIMTLFIYKLLPETKGIPLEEMSMVWQKHPIWGKFLESDNPIQNDKMNSKC

SEQ ID NO: 97200 - DNA, 1659 bp, Glycine max
  CDS (1)..(1659)
atggcatcaactactctcttcagcttcagactctctttgaacccactgcaccatcaacagacaacgaggccaaaatctctgctctcctctcctcgcaccaatccacgcctcgtttcttccattaacaatcatttggccctcacacgtgtcacatacccgcttctccaatctcactctgctcctaagcgcagattccatgtgtattctgatggggaaagctccgagtcgcttgtttctgacgctacataccaagaggaattttcttggtcttctgtaattcttccgtttctgttccctgcgttgggtggcttattatttggctatgatattggagccacctctggcgctacaatttcactgcagtcacctgagcttagcggtatatcatggtttaaactttctgctattcagcttggactagtggttagtggttccctatatggggctcttcttggctcgcttgttgcatttgccatagctgatttccttgggaggaagaaacaactcattactgcagcactgttgtatttgtttggtggtgtgattactgcctatgcaccagaacttggtgttctcttagcaggaaggctgctttatggacttggtataggtttggccatgcatggggctcctttatatattgcggagacttgtccatcacaaatccgtgggactttagtatcattaaaagaactcttcattgtcctggggattctgctgggttattttgtgggaagctttctgattgagaccgttgggggatggcggttcatgtatggatttagtgctccagttgctgtattaatggggcttggaatgttgactctccccaattctccacggtggttgcttctcagagcagtgcaaggaaaaggttcttttcaagatttgaaggaaaaggccattttttccctgagcaaattaaggggccgaccacctggtgacaaagaatccgagagacaagtagaagaaacccttgtctcattgaagtctgcctatgcagataaggaatcggaggggaatttcttagaggtgtttcagggtccgaatctgaaagctttcataattggtgggggactagtcttatttcaacagataacaggtcaaccaagtgttctgtactatgcaggtccaattcttcagagtgctggattttctgctgcatccgatgctacaaaagtttcggttgttattggcctattcaagttgctaatgacttggattgctgtcctaaaagttgatgatttggggagaagacctctgctgattggaggtgtcagtggcattgccctttctctagttctcctttctgcttattataaatttcttggaggtttcccacttgttgctgttggagctttacttctttatgttggttgctaccagatatcatttgggccgataagttggctaatggtatcagaggtcttcccacttcgcactagaggaaaggggattagtctggctgttcttaccaacttcgcttcaaatgctgttgtcacctttgcattctccccgctaaaggagtttctaggagcagaaaatctttttctcctttttggggctattgctattctatcacttttgttcattatcttttctgtcccagagacaaaaggcttgagtttagaagatatagaatccaaaatcttgaagtga

SEQ ID NO: 97201 - protein, 552 aa, Glycine max
MASTTLFSFRLSLNPLHHQQTTRPKSLLSSPRTNPRLVSSINNHLALTRVTYPLLQSHSAPKRRFHVYSDGESSESLVSDATYQEEFSWSSVILPFLFPALGGLLFGYDIGATSGATISLQSPELSGISWFKLSAIQLGLVVSGSLYGALLGSLVAFAIADFLGRKKQLITAALLYLFGGVITAYAPELGVLLAGRLLYGLGIGLAMHGAPLYIAETCPSQIRGTLVSLKELFIVLGILLGYFVGSFLIETVGGWRFMYGFSAPVAVLMGLGMLTLPNSPRWLLLRAVQGKGSFQDLKEKAIFSLSKLRGRPPGDKESERQVEETLVSLKSAYADKESEGNFLEVFQGPNLKAFIIGGGLVLFQQITGQPSVLYYAGPILQSAGFSAASDATKVSVVIGLFKLLMTWIAVLKVDDLGRRPLLIGGVSGIALSLVLLSAYYKFLGGFPLVAVGALLLYVGCYQISFGPISWLMVSEVFPLRTRGKGISLAVLTNFASNAVVTFAFSPLKEFLGAENLFLLFGAIAILSLLFIIFSVPETKGLSLEDIESKILK

SEQ ID NO: 97202 - DNA, 1452 bp, Glycine max
  CDS (1)..(1452)
atgtgggtgggacattcatctatgtacaagcgcactccttcgagagataattcaaacatggaggacatggaagaaaactcagacatcggcctggacaagggaacatcaaatccttcattgatgctttctttaccgcatgtacttgtggcgaccatttcttcattcctttttggataccatctgggggttgttaatgaaccacttgagagcatttctgtggatcttggcttccgtggaaatacattggcagaaggtctggtggtgagcatatgccttggtggtgccttgattggatgtctactaagtggttggattgctgatggggtggggcgtcgtagggctttccagttgtgtgctctgccaatgataattggtgcttctatgagtgcagcaacaaacaacttgtttggcatgcttgtaggaaggttgtttgttgggactggcttgggcctgggccctcctgttgcctctctgtatgtgacagaggtttctcctgcttttgtgcggggcacctttggagctttcatccagattgcaacatgccttggtctaatgggagctttatttattggaatccctgtcaaagaaatttctggatggtggcgggtttgtttttgggtatctaccattccagctgctatacttgccgcagctatggtcttctgcgcagagagtccgcattggttatacaagcaaggaagaactgctgaagcagaagctgagtttgagagacttctgggtgtatcagaagcaaaatttgcaatgtcggagttatccaaggtagatagaagtgatgatactgatactgtaaagctgtcggaattgcttcatggtcgtcattctaaagttgtttttattggatcaaccctatttgctttacaacagctatctggtataaatgctgggttttatttctcttcaactgtttttaaaagtgctggagtcccatcagacattgcaaatgtctgcataggaatcgctaatttggcaggatctatcgtttcaatgggtttgatggataagcttggaaggaaggttctacttttctggagtttctttggcatggcaatagcaatgatccttcaagccacaggagcaacttcacttgtatcaaacgtgggagctcagtacttttctgttggtggcatgttactgtttgtcttaacatttgctctgggggctggtccagttccaggtctccttctaccagaaatctttcctagtcgaataagagccaaagccatggcagtctgtatgtcagtgcattgggtgataaatttctttgttggactactgttcttgcgtttgctggagaaacttggtccacagctgctttactccatgtttgctaccttttgcatcatggcagtaacttttgtaaaaagaaatgtggtggaaaccaaagggaagtcacttcatgaaattgagatcgcacttcttcctcaagactag

SEQ ID NO: 97203 - protein, 483 aa, Glycine max
MWVGHSSMYKRTPSRDNSNMEDMEENSDIGLDKGTSNPSLMLSLPHVLVATISSFLFGYHLGVVNEPLESISVDLGFRGNTLAEGLVVSICLGGALIGCLLSGWIADGVGRRRAFQLCALPMIIGASMSAATNNLFGMLVGRLFVGTGLGLGPPVASLYVTEVSPAFVRGTFGAFIQIATCLGLMGALFIGIPVKEISGWWRVCFWVSTIPAAILAAAMVFCAESPHWLYKQGRTAEAEAEFERLLGVSEAKFAMSELSKVDRSDDTDTVKLSELLHGRHSKVVFIGSTLFALQQLSGINAGFYFSSTVFKSAGVPSDIANVCIGIANLAGSIVSMGLMDKLGRKVLLFWSFFGMAIAMILQATGATSLVSNVGAQYFSVGGMLLFVLTFALGAGPVPGLLLPEIFPSRIRAKAMAVCMSVHWVINFFVGLLFLRLLEKLGPQLLYSMFATFCIMAVTFVKRNVVETKGKSLHEIEIALLPQD

SEQ ID NO: 97204 - DNA, 1524 bp, Triticum aestivum
  CDS (1)..(1524)
atggccggcggcgttttcctcctcaacggcgccggcgcgccggactacggcggcgcgctgaccgttcccgtcgtggtgacctgtctcatggcggcctccggcggccttatcttcggctacgacattggcatctcagggggcgtctcggagatggagtctttcctgaagaagttcttcccgggcttactcaagacgacgaggcacgcgagcaaggacgtctactgcatgtacaacgaccaggcgctcacggccttcacctcctcgctctacgccttcggcatggtgggcacgctggtggcgagccgggtcacccggcgggtcggccgcaaggccatcatggtcatcggggggagcatgttcctcgtcggctcgctcgtcaacgccgccgcggccaacctcgccatgctcatcgtcgggcggatgctgctcggcctgggcctcgggttctccggccaggccacgccggtctaccttgccgagatgtcgccaccgcggtggcgcggcgggttcatctccgcgttccctctgttcatcagcgtggggtacctcgtcgccaacctgatcaactacggcacgtcgcggattcccgaatggggctggcgcctgtccctcggcctcgcggccgtccccgccgccgtcatggtgctgggcgccgtgctcatcacggacacaccgagcagcctcgtcctgcgcgggaagcacgaccatgcccgcgccgcgctccagcgcgtccgcggcaagggcgtggacgttgacgcggagttcggcgacatactggccgccgtggagcacgaccggcggaaccaggagggcgcgttccggcggatcctgcggcgggagtaccggccgtacctggtgatggccgtggcgttccccgtgttcctgaacctcaccggcgtgaccgtgtcggccttcttctcgccgatactcttccggaccatagggttcggtagcgacgcggcgctgatgggcgccatcatcctcggcctgatgaacatcggcggcatcatcgcctcggacgtcgccatggaccgctacggccggaagctgctcttcgcgatcggcggcgcgctcatgttcacctgccaggtggcaatggcgagcatcgcggggacgcacctggggcacggcagcaagatgcccaaggggtacgcggtggcggtgctggtgctgacgtgcgtcttctcggccagcttcagctggtcgtggggtgcgctgtactggaccatccccggcgagatatacccggtggaggtgcggtcggcggggcagggcacggcggtggcgctcaacctgggcctcaacttcgtgcaggcgcagtgcttcctggcgatgctgtgcagcctcaagtacggcgtcttcgtcttctacgcgtgctggctcgtcgtcatgaccgccttcgccatggcgttggtgccggagaccaagggcgtgccgcttgactccatgggccacgtcttcgcgcgccactggtactggggcaggttcgtcaaggaccacaagttcggaaatgagtccacctga

SEQ ID NO: 97205 - protein, 507 aa, Triticum aestivum
MAGGVFLLNGAGAPDYGGALTVPVVVTCLMAASGGLIFGYDIGISGGVSEMESFLKKFFPGLLKTTRHASKDVYCMYNDQALTAFTSSLYAFGMVGTLVASRVTRRVGRKAIMVIGGSMFLVGSLVNAAAANLAMLIVGRMLLGLGLGFSGQATPVYLAEMSPPRWRGGFISAFPLFISVGYLVANLINYGTSRIPEWGWRLSLGLAAVPAAVMVLGAVLITDTPSSLVLRGKHDHARAALQRVRGKGVDVDAEFGDILAAVEHDRRNQEGAFRRILRREYRPYLVMAVAFPVFLNLTGVTVSAFFSPILFRTIGFGSDAALMGAIILGLMNIGGIIASDVAMDRYGRKLLFAIGGALMFTCQVAMASIAGTHLGHGSKMPKGYAVAVLVLTCVFSASFSWSWGALYWTIPGEIYPVEVRSAGQGTAVALNLGLNFVQAQCFLAMLCSLKYGVFVFYACWLVVMTAFAMALVPETKGVPLDSMGHVFARHWYWGRFVKDHKFGNEST

SEQ ID NO: 97206 - DNA, 1488 bp, Hordeum vulgare
  CDS (1)..(1488)
atggcgtccaagggcgagagggatgtggagatccacgtctcctccccggcgcccgacgaccgcgacgccgccaggcccttgctgcccgccgcctgcgaggcctactccgtctccgccgcaatcctacccttcttcttcccagctctgggtgggcttctctatggctatgacatcggggcaacatctggtgccaccatatcgctcaagtcctccacatccagtggtacaacatggtacgacctgtcatcagtgcaaactggcctcgtggtcagcggctcactctacggtgctttgatcggatccgccacggcattcaccgttgcggattttctaggaaggcgcagagagcttgttgtttcttctatcatgtatttggttggggctcttctcacagcagtggcccctaacttccttatcatggtggttggtcgctttttatatggcataggaattggattggcaatgcatgctgctccaatgtatattgctgagactgctccaagtcagattagaggcatgctcatttctctcaaggagttctttattgttcttgggatgcttcttggttatatagtgggcaatctctttgttgaagtgatttctggttggcgctacatgtatgccgccagtgctccgatatgcgtcattatgggcatcggaatgtgctggttaccttgttcacctaggtggcttctgttatgtgccacacaaggaaaaggagatctgcgggagacaaaagaaaatgctacacgttgcttatgtcgattgaggggtcaagcgtcacctgatttggtttcggagcaggttaatttgattctggaagaactctcatacgttggtgaagagaaaaaagcaggcttcagtgagatctttcaaggaaagtgtctcaaagcaatgataattggatgtggcttggtgttctttcagcaggtcactggccaaccaagtgtgctatattatgctgcgacaatttttcagagtgctggattctctggagcatctgatgccactcgtgtatcaattcttcttggcttgctgaagctgattatgactggagttgcggttcttgtggttgacaaacttggtagaagaccattactaattggtggtgttagtggaattgctgtctccctattcttattgtcttcatactataccttgtttacgggtgctccttatgtggctgtaatagcacttctactgtatgttggctgctaccagttatcatttggtcctattggctggcttatgatttcggaggttttcccgctgaaactgcgtggccgtggattgagtgttgctgtccttgtgaacttcgcctccaatgcgcttgtcacttttgctttctcccctctagaggacttgattggcactggggttctctttgcttcgttcggggtgattgcggtggcgtctctcgcattcatattttgcattgtgcccgaaacaaaagggctcaccctggaagaaatcgaagccaaactgtag

SEQ ID NO: 97207 - protein, 495 aa, Hordeum vulgare
MASKGERDVEIHVSSPAPDDRDAARPLLPAACEAYSVSAAILPFFFPALGGLLYGYDIGATSGATISLKSSTSSGTTWYDLSSVQTGLVVSGSLYGALIGSATAFTVADFLGRRRELVVSSIMYLVGALLTAVAPNFLIMVVGRFLYGIGIGLAMHAAPMYIAETAPSQIRGMLISLKEFFIVLGMLLGYIVGNLFVEVISGWRYMYAASAPICVIMGIGMCWLPCSPRWLLLCATQGKGDLRETKENATRCLCRLRGQASPDLVSEQVNLILEELSYVGEEKKAGFSEIFQGKCLKAMIIGCGLVFFQQVTGQPSVLYYAATIFQSAGFSGASDATRVSILLGLLKLIMTGVAVLVVDKLGRRPLLIGGVSGIAVSLFLLSSYYTLFTGAPYVAVIALLLYVGCYQLSFGPIGWLMISEVFPLKLRGRGLSVAVLVNFASNALVTFAFSPLEDLIGTGVLFASFGVIAVASLAFIFCIVPETKGLTLEEIEAKL

SEQ ID NO: 97208 - DNA, 1512 bp, Brassica napus
  CDS (1)..(1512)
atggggtttgatgccgagaaacaatcgatcgcttctcttggacagattggtgattcatcttcaggtgagattagctcagacaaacaacctctgatcaaagagaaccaccacagcccagaaaactactctgttcttgcagccatccccccgtttctctttccagctcttggagcgttgctttttggttacgagattggtgccacttcttgtgcaaccatctctattaagtcgcctaagctaagtggaatctcatggtacaacttgtctccagtggatgttggtatcattactagtggctcactgtacggtgccttaattggatccattgtggcatttagtattgctgacactataggaagaagaaaggagctgatcttggctgcactcttatatcttgttggagccattgtgactgcactagcacctgtcttctatgccctgataattggacgccttatgtatggcatcgggattggactgacaatgcacgcagctccaatgtacattgcagagactgcaccaagtcagatacgtggaaggatgatatcactaaaagagttctcaaccgtcattgggatggttggaggttatggaataggtagcctctgggttacggttacatctgggtggcgttacatgtacgcaacgatcatccctgtgccagttatcatgggaattggaatgtgttggctaccagcatcccctaggtggcttttactgcgctctctccaaggtaaagggaacgtggagagacttcaacaggcggcaatcaagtctcttcgccgccttagagggtctgtggtagttgactcagccgctgaacaagtgaacgagatcttggctgaactttcctctgtgggcgaggataaagaagctacacttggtgaaatgtttcaagggaaatgcttgaaggctctcactatagcaggaggtttagtcttgttgcaacagataactgggcaaccaagtgtactttattatgcaccatcaatactgcagactgctggcttctctgctgcagctgatgcaacacggatctcaattctactcggtctattgaagttgattatgacaggagtagctgttgcagttatcgacagacttggaaggagacctttgcttcttggtggtgttggtggcatggttgtctcattattcctactggggtcatactacatctttttcagcgccgcaccagttgtcgctgtggttgcgctgctgctctatgtgggctgttaccagctatcctttggtccgattggttggctgatgatttcagagatatttcccctaaaattaagaggtagaggaatcagcatagcagtgcttgtgaatttcggcacaaacgccctcgtgacattcgctttctcacccctaaaggagctgtttggagctggagtattgttctgtggatttggagtgatatgtgtactgtctctcttcttcatatacttcattgtgcctgagacaaagggtctcactcttgaagagattgaagccaaatgtctctaa

SEQ ID NO: 97209 - protein, 503 aa, Brassica napus
MGFDAEKQSIASLGQIGDSSSGEISSDKQPLIKENHHSPENYSVLAAIPPFLFPALGALLFGYEIGATSCATISIKSPKLSGISWYNLSPVDVGIITSGSLYGALIGSIVAFSIADTIGRRKELILAALLYLVGAIVTALAPVFYALIIGRLMYGIGIGLTMHAAPMYIAETAPSQIRGRMISLKEFSTVIGMVGGYGIGSLWVTVTSGWRYMYATIIPVPVIMGIGMCWLPASPRWLLLRSLQGKGNVERLQQAAIKSLRRLRGSVVVDSAAEQVNEILAELSSVGEDKEATLGEMFQGKCLKALTIAGGLVLLQQITGQPSVLYYAPSILQTAGFSAAADATRISILLGLLKLIMTGVAVAVIDRLGRRPLLLGGVGGMVVSLFLLGSYYIFFSAAPVVAVVALLLYVGCYQLSFGPIGWLMISEIFPLKLRGRGISIAVLVNFGTNALVTFAFSPLKELFGAGVLFCGFGVICVLSLFFIYFIVPETKGLTLEEIEAKCL

SEQ ID NO: 97210 - DNA, 1389 bp, Brassica napus
  CDS (1)..(1389)
atggcgggagataataatatggagaaaggattactactggcaaataaggaagagacggcaagaacaactctgcttcttgtcttctccaccttcatcattgtctgcgcctctttcacctttggcgtttccgcgggatatactgcagatacaatgtcctccattatgacagacttggacctttctctagcacaattttcactgtttggttcactcatgacatttggaggaatgatcggtgccatattcagcgccaaagctgcatctgccttgggtaataaaatgacgttgtggcttgccgatttattctgcataactggttggcttgcaattgcactagccaaggaaatcgttttgctcgatttaggaagattttttgttggaattggagttggtctcattagctatgtggttcctgtatatgttgcagagataacacccaagcatattagagacgcttttacatttagcaatcagttgttgcaaaactgtggagtagcaatcgcatattactttggaaatttcttgtcatggagaagtctagccttaatcggtattattccatgtgggatacaagttattggtttgttcttcatacctgagtctccaagatggctggcgaaaaaaggtcgcgatgaagaagttgaagttgttcttcaaaaattaagagggaaaggacacgatattatgttagaagctcgcgcaatcaagatttccgtagaagtttcaaaacaaaattcgaataccagcattcgtagtcttttcagaaagagatatgctcatcaacttacaatcggcataggtttgatgcttctgcaacaattatgtggaatgtcaggaataggctcttatggaagcactctttttgaacttggcggatttcctgctcggattgggatgacggtgttgtctcttatcgtcgtaccaaaatctttactgggtttaatcctcgtggatcgctgggggagacgaccacttcttatggcttcagcatttggattatgcttaagctggattacattggcggtagcttttggagttaaagatgttcccgagattcaaaacattactccagttttcactttcatcggaatattgtcattcacgatgatgtttgcatttggaatgggagcgttgccatgggttataatgtctgagatatttccaatggatataaaggtgttagcagggagtttagtgaccatagccaattggttcactggttggattgccaactattgtttcaattttatgttggtttggagcccagccggaacttttattatatcagcaatagtttgtggagtaacaattgtattcacgtggtgtttggtgccagagactcaaggattaactttagaagaaatccaactatcatttgctagtacttaa

SEQ ID NO: 97211 - protein, 462 aa, Brassica napus
MAGDNNMEKGLLLANKEETARTTLLLVFSTFIIVCASFTFGVSAGYTADTMSSIMTDLDLSLAQFSLFGSLMTFGGMIGAIFSAKAASALGNKMTLWLADLFCITGWLAIALAKEIVLLDLGRFFVGIGVGLISYVVPVYVAEITPKHIRDAFTFSNQLLQNCGVAIAYYFGNFLSWRSLALIGIIPCGIQVIGLFFIPESPRWLAKKGRDEEVEVVLQKLRGKGHDIMLEARAIKISVEVSKQNSNTSIRSLFRKRYAHQLTIGIGLMLLQQLCGMSGIGSYGSTLFELGGFPARIGMTVLSLIVVPKSLLGLILVDRWGRRPLLMASAFGLCLSWITLAVAFGVKDVPEIQNITPVFTFIGILSFTMMFAFGMGALPWVIMSEIFPMDIKVLAGSLVTIANWFTGWIANYCFNFMLVWSPAGTFIISAIVCGVTIVFTWCLVPETQGLTLEEIQLSFAST

SEQ ID NO: 97212 - DNA, 1644 bp, Brassica napus
  CDS (1)..(1644)
atgcagtcgtcaacgtatacggttaaagcaaacgccgcgtttgcgtttcagcgacggaccttctctaacctcctcaacagatccgccactaccactaccggaagccgcttctcgccgctcaacctccacctccactgctctgcttcgaaagccatgggagcgaagctcgctcgcgccgagaacgggatccaaaccgttatgaatctctcttccgtcaaagctcgatccgtcagagcacaggcctcctctgttggtggtggtggtgatgaggaagaagctgtacctctgagatccgaatcaaatagctccggcaccgttttgccgttcgttgctgttgcttgccttggtgctatattgtttggctatcaccttggggttgttaacggtgctcttgagtatcttgctaaggatcttggtattgctgataatactgttcttcaaggatggatcgttagcgcgctgcttgctggtgcaacggttggttcattcaccggaggtacattagctgacaagtttggacgaacaagaacgtttcaattggatgctatcccgcttgccattggagctttcttatgtgcaacagctcagagtgtgcaaaccatgattgtgggacgtctgcttgcaggaattggaattgggatctcatcagcgattgtgccactttacatatccgagatatccccaactgaaatccgtggagcacttggatctgtgaaccagttgttcatatgtataggaatactcgcagccttgatagctggattaccccttgcagcaaatcctctatggtggaggacgatgttgggtgttgctgtcatcccttccgttctattagccataggaatgggtttttctccagaaagcccaaggtggcttgttcagcaaggaaaagtctctgaagctgaaaaggcgatcaaaactctgtatggtaaagaaaaagtcgtcgagctagtgcgtgacttatcaacctctggccaaggtgtttctgagccagaggcaggatggtttgatctattcaacagccgctattggaaagttgtgagcgtaggtgcggctctctttttgtttcaacagttagctgggataaacgcagtggtgtactactctacatcagtgttccgtagcgccggtatccaatctgacgttgcagccagtgctctcgttggagcatcaaacgtctttggcactgctgttgcttcgtccttgatggacaaaatgggaaggaaaagtcttttactcataagcttcggtggaatggctttgtcgatgcttttgctctctttatccttcacatggaaggctcttgctgcatattctggcacccttgccgttgtaggaactgttttatatgtgctgtcattctcacttggtgctggcccggttccggctcttctccttccagagatattcgcatcccggatcagagcaaaagccgttgctctttccctcggaatgcactggatatcaaactttgtgattggtctctacttcctaagcgttgtgactaaattcggaatcagcagtgtctacttgggtttcgcggcagtatgtgtccttgcagtcatctacattgcaggaaacgtggtcgagactaaaggacggtcacttgaggaaatagagcttgctcttaactccggagcttga

SEQ ID NO: 97213 - protein, 547 aa, Brassica napus
MQSSTYTVKANAAFAFQRRTFSNLLNRSATTTTGSRFSPLNLHLHCSASKAMGAKLARAENGIQTVMNLSSVKARSVRAQASSVGGGGDEEEAVPLRSESNSSGTVLPFVAVACLGAILFGYHLGVVNGALEYLAKDLGIADNTVLQGWIVSALLAGATVGSFTGGTLADKFGRTRTFQLDAIPLAIGAFLCATAQSVQTMIVGRLLAGIGIGISSAIVPLYISEISPTEIRGALGSVNQLFICIGILAALIAGLPLAANPLWWRTMLGVAVIPSVLLAIGMGFSPESPRWLVQQGKVSEAEKAIKTLYGKEKVVELVRDLSTSGQGVSEPEAGWFDLFNSRYWKVVSVGAALFLFQQLAGINAVVYYSTSVFRSAGIQSDVAASALVGASNVFGTAVASSLMDKMGRKSLLLISFGGMALSMLLLSLSFTWKALAAYSGTLAVVGTVLYVLSFSLGAGPVPALLLPEIFASRIRAKAVALSLGMHWISNFVIGLYFLSVVTKFGISSVYLGFAAVCVLAVIYIAGNVVETKGRSLEEIELALNSGA

SEQ ID NO: 97214 - DNA, 1524 bp, Brassica napus
  CDS (1)..(1524)
atggaagatcaggtcatctccagcaagaatccggatcccgtcgatcagaagccgaccaatgaaaagccacccggagttaatagatacgctcttcagtgtgctattgtcgcctccatcgtctccatcatctttggttacgatactggtgttatgagtggagcaatggtgtttatagaagaagagctaaagacaaacgaagttcagatcgaagttctcaccggaatcctcaacctttgtgcccttgtcggatcactactcgccggaagaacgtcggacataatcggacgtcgttacacaatcgtcttggcctcaatactcttcatgttaggctcaatactaatgggctggggtccaaattatcccgttctcctaaccggtagatgcacagccggtctaggagtcggttttgctctaatggttgctccggtttactcagccgagatagcaaccgcttcacacagaggactcttagcttctctacctcatctttgcatcagtatagggattttactaggttacctagtcaattacttcttctccaagctaccaatgcatatcggttggagactgatgctcggcatagctgcgatcccgtcgctagtgctagcgttagggatcttgaaaatgccggaatctccacggtggttgatcctacaaggccgtctcggagagggcaagaggatactggacttggtgtcgaactcgcctgaagaggcggagatacggtttcaagacatcaaaaccgctgccggaatcgacccaaagtgcgaagatgaagtggtgaagatggagaacaagaagactcacggtgaaggagtttggaaagagctaatcctaagaccaacacctgccgtaagacgagttcttttgactgcgttagggattcatttcttccagcacgccacgggtatcgaagccgtgcttttatacggtccgaagatctttaagagggcagggatcacggctaaagacaagcttttcttggtcacaatcggtgtcggaatcatgaagacgacgtttattttcacagcgactttcttgcttgacaaggtaggtcggaggaagcttttgttgaccagcgttggaggaatggtttgtgcgttgacgatgttagggtttgggctcacgatggcacagaactctggcgggaaactagcttgggctttggtattaagcatagtttctgcttatagttttgtagcggttttctctattgggcttgggccgataacttgggtgtacagctctgaggtgttcccgttgaagcttagggcgcaaggagcgagtctcggcgttgcggtgaatagagtgatgaatgctacggtgtccatgtcgtttttgtcgctgactagggcgataacaaccggaggagctttctttatgtttgctggagttgcggcggtggcgtggaacttcttcttcttcctaatgcccgagacgaaaggtaagtcgcttgaagagatcgaagcgctttttcaaagagatggtgacaataaaacaaaaggagagaacgtcaccgtttaa

SEQ ID NO: 97215 - protein, 507 aa, Brassica napus
MEDQVISSKNPDPVDQKPTNEKPPGVNRYALQCAIVASIVSIIFGYDTGVMSGAMVFIEEELKTNEVQIEVLTGILNLCALVGSLLAGRTSDIIGRRYTIVLASILFMLGSILMGWGPNYPVLLTGRCTAGLGVGFALMVAPVYSAEIATASHRGLLASLPHLCISIGILLGYLVNYFFSKLPMHIGWRLMLGIAAIPSLVLALGILKMPESPRWLILQGRLGEGKRILDLVSNSPEEAEIRFQDIKTAAGIDPKCEDEVVKMENKKTHGEGVWKELILRPTPAVRRVLLTALGIHFFQHATGIEAVLLYGPKIFKRAGITAKDKLFLVTIGVGIMKTTFIFTATFLLDKVGRRKLLLTSVGGMVCALTMLGFGLTMAQNSGGKLAWALVLSIVSAYSFVAVFSIGLGPITWVYSSEVFPLKLRAQGASLGVAVNRVMNATVSMSFLSLTRAITTGGAFFMFAGVAAVAWNFFFFLMPETKGKSLEEIEALFQRDGDNKTKGENVTV

SEQ ID NO: 97216 - DNA, 1569 bp, Brassica napus
  CDS (1)..(1569)
atggctggcggtggattcgtagtcggagatggccaaaaggcttatcccggcaaactcactccctttgttctcttcacttgcgtcgtcgctgccatgggtggtctcatcttcggatacgatatcggaatctctggtggtgtgacgtcgatgccgtcttttctccgtcgatttttcccgtcggtttaccgtaaacagcaagaagacgcgacaacgaatcagtactgtcaatacgatagtcctaagcttacgctgttcacttcgtcgttgtatttggcagcgctaatttcgtcgctggtggcttccaccgtgacgaggaagttcggacgacggctctcgatgctcttcggtggtatactcttctgcgccggagctctcatcaatggttttgctaaacacgtttggatgctcatcgttggtcgtatcttgctcggttttggtatcggtttcgctaatcagtctgtgccactatacctatctgaaatggctccatacaaatacagaggagcgctaaacatcggcttccagctttcaatcacaatcggaatcctcgtagccgaagtgctcaactacttctttgccaagatcaaaggaggctggggatggcgtctcagtctcggcggtgctgtggtccctgccctgatcatcacactcggctccctagtccttcctgacactcccaactcaatgatcgagcgaggccagcacgaggaggccaaaaccaagctcagacgtatccgtggcgtcgatgacgttagccaagagttcgacgatttagtcgcagctagtaaagagtctcagtcgatagagcacccgtggacgaacctcctccgccgtaaataccggccgcatctcaccatggccattatgattccattctttcagcagctcaccggaatcaatgtgattatgttttacgctcctgttttgttcaacaccattggtttcacgaccgacgcttctctcatgtccgccgtggtcactggctcggtcaacgtcgctgccacgcttgtgtcgatctacggtgttgacaagtggggacgtaggtttctctttcttgaaggcggtacacaaatgcttatatgccaggctgtggttgctgcatgcatcggggccaagttcggggtagacgggacccctggtgagataccaaagtggtatgctatagtggttgtaacgtttatatgcatctatgtggcgggtttcgcatggtcatggggtccgctagggtggttagtacctagtgagatcttccccttggagataaggtcagccgctcagagtatcacggtgtcagtgaacatgatcttcacgttcataatcgcgcagatcttcctgacgatgctttgccatttgaagtttgggctgttccttgtattcgccttcttcgtgatagtgatgtcgattttcgtctacatattcttgccggagacgaaagggattccgattgaggaaatgggacaagtgtggaggtcacattggtattggtcaaggtttgtggaggatggtgagtatgggaatggagttgagatgggcaagagcagcagcaaccaaggaactaaacatgtttag

SEQ ID NO: 97217 - protein, 522 aa, Brassica napus
MAGGGFVVGDGQKAYPGKLTPFVLFTCVVAAMGGLIFGYDIGISGGVTSMPSFLRRFFPSVYRKQQEDATTNQYCQYDSPKLTLFTSSLYLAALISSLVASTVTRKFGRRLSMLFGGILFCAGALINGFAKHVWMLIVGRILLGFGIGFANQSVPLYLSEMAPYKYRGALNIGFQLSITIGILVAEVLNYFFAKIKGGWGWRLSLGGAVVPALIITLGSLVLPDTPNSMIERGQHEEAKTKLRRIRGVDDVSQEFDDLVAASKESQSIEHPWTNLLRRKYRPHLTMAIMIPFFQQLTGINVIMFYAPVLFNTIGFTTDASLMSAVVTGSVNVAATLVSIYGVDKWGRRFLFLEGGTQMLICQAVVAACIGAKFGVDGTPGEIPKWYAIVVVTFICIYVAGFAWSWGPLGWLVPSEIFPLEIRSAAQSITVSVNMIFTFIIAQIFLTMLCHLKFGLFLVFAFFVIVMSIFVYIFLPETKGIPIEEMGQVWRSHWYWSRFVEDGEYGNGVEMGKSSSNQGTKHV

SEQ ID NO: 97218 - DNA, 1428 bp, Brassica napus
  CDS (1)..(1428)
atggtggcggtgaaagaagaaagaagcatagaagaagggcttctaaagctcaagaaccaaaacgacacttcacaatgtcgtattactgcctgtgttatcctcagcactttcgtagccatatgcggctccttctcctttggagttgctgttggttatacttcaggtgctgagataggaatgataaaagacatgggcctctctatcgcagaattttcagcatttggctcattctccacgttgggagcaacagtcggtgcgctgttcagcggtaaaatggcgatcatgctaggaagaaaaggaacaatgtgggtctccaatatactctgcatcactggttggctatccatcgctttcgctaaggatgtgttgtggctgaacatcggaagaatatcatcagggataggaatcggcttgattagctacgtggtaccggtctacatagcagaaattacgccaaaacatgttcgcggcacatttaccttttcaaatcagcttcttcaaaacgctggactcgccatggtttatttttgcgggaatttcatcaactggaggatgatggctttactaggtgctttaccatgcgtcattcaagcaatcggtttattcttcgtaccagaatccccaagatggctggcaaaagttggtacggaaaaagaactagaaaattcactgcttcggcttagagggagagatgctgatatctcaaacgaagcctcagagattcaacttatgaccaaaatgctagaaagtgattcaaagtcaagcttcactgatttgttccagagaaagtatagacacactctcgtggtaggaatcgggctaatgttaatacaacaattctcaggaagtactgctgtaatatcttatgcaaacaccatttttagaaaagctggtttttcggtggccattggatcgacaatgttaggcatattcatgataccaaaagccatgattggtctaattcttgtagataaatggggcagacggcccctcttgttgacttcagcctctgggatgaccataactagcatgcttattggactcgccttcacattacagaaaatgcaattacttccagaactaactccagtattcacgtttatatgcgttacgctgtatattgcaacttatgcaataggcgtgggaggcctcccttgggtaataatgtcagagatatttccaataaatataaaagtaacagcagggagtttagttacgttagcctcatggtcaagtagttccatcgtcacttacgctttcaactttctattcgaatggagcactcaaggaacattttacatattcggggctatcggaggaggagcgttgctttttatttggctgctcgttccggaaacgaaaggattatcacttgaagaaatacaaatttcgcttacaggtcagcccgatgagataagccatatgtag

SEQ ID NO: 97219 - protein, 475 aa, Brassica napus
MVAVKEERSIEEGLLKLKNQNDTSQCRITACVILSTFVAICGSFSFGVAVGYTSGAEIGMIKDMGLSIAEFSAFGSFSTLGATVGALFSGKMAIMLGRKGTMWVSNILCITGWLSIAFAKDVLWLNIGRISSGIGIGLISYVVPVYIAEITPKHVRGTFTFSNQLLQNAGLAMVYFCGNFINWRMMALLGALPCVIQAIGLFFVPESPRWLAKVGTEKELENSLLRLRGRDADISNEASEIQLMTKMLESDSKSSFTDLFQRKYRHTLVVGIGLMLIQQFSGSTAVISYANTIFRKAGFSVAIGSTMLGIFMIPKAMIGLILVDKWGRRPLLLTSASGMTITSMLIGLAFTLQKMQLLPELTPVFTFICVTLYIATYAIGVGGLPWVIMSEIFPINIKVTAGSLVTLASWSSSSIVTYAFNFLFEWSTQGTFYIFGAIGGGALLFIWLLVPETKGLSLEEIQISLTGQPDEISHM

SEQ ID NO: 97220 - DNA, 1527 bp, Brassica napus
  CDS (1)..(1527)
atggccgttgttgtatctgctaacgggaatggtccggcttttgaagccaagatgactgtatatgtctttgtctgcgttctgattgcagctgtcggcggtttgatcttcggttacgacatcggaatttccggtggagtgacggcgatggatgatttcttgaagaagtttttccctacggtgtgggagaggaagcagcacgctcatgagaacaattactgcaagtatgataaccagcacttgcagctattcacatcgtctctttacctagccgcactcgtggccagcttcttggcttcggccgtctgttccaaacttggaaggaagcccactatgcagtttgcttctgtctttttcttgatcggtgtcgggctagccgcaggagctgataacatcgtcatgttgatcattggaagaatcttacttggcttcggtgtaggctttggcaatcaggcagtgccgcttttcttatccgagattgctcctgcacagctcaggggaggtctcaatattgtattccaactcatggtaacaattggaatactaatagccaaccttgtcaactacttcactgccaccgttcaccctaacggatggcgaatcgccctcggtggagccgcaatccccgcggttatcctcctcttgggttcactgatcatctgtgagacccccacgagcctcatagagcgcaacaaaaacgaagaaggcagagaaactctaaggaaaatcagaggagttgaagatataaatgatgagtatgaatctatcgtccatgcgtgcgagattgcgagtcaagttaaagacccttacaggaaactgttgaaaccagcgagtcgtccacctttaatcattggaatgcttctacagcttttccagcagtttagtggaatcaatgccattatgttctatgcaccggtcttgttccagaccgttggatttggaagtaacgcagctcttctctctgcggttatcacgggaagcatcaacgttcttagtacgtttgtagggatctatcttgtcgatagaactggccggaggttccttcttttacaatcttccgttcacatgctcatttcccagatgatcattggaatcatcctagcaaaagacttgggtatcacgggaacgctcgggaaggcacaagccatggtggttgtggtctttgtgtgcgcttacgtgatgggattcgcgtggtcatggggaccattaggatggctaattcctagcgagacgtttcctctagaaactcgaagtgcagggttcgctgttgcagtctcgtgcaacatgttattcaccttcgtgatcgcgcaggctttcttgtcgatgctttgtgggatgagatcgggaatattcttcttcttcagcgcttggatcattgtgatgggactgtttgctttgttctttataccggagactaaaggtgtggccattgatgatgtgagggagagagtgtggaagccacactggttctggaaaaggtatatgcttgctgaggatgatcatcaagatgtggagaagagaactgaatga

SEQ ID NO: 97221 - protein, 508 aa, Brassica napus
MAVVVSANGNGPAFEAKMTVYVFVCVLIAAVGGLIFGYDIGISGGVTAMDDFLKKFFPTVWERKQHAHENNYCKYDNQHLQLFTSSLYLAALVASFLASAVCSKLGRKPTMQFASVFFLIGVGLAAGADNIVMLIIGRILLGFGVGFGNQAVPLFLSEIAPAQLRGGLNIVFQLMVTIGILIANLVNYFTATVHPNGWRIALGGAAIPAVILLLGSLIICETPTSLIERNKNEEGRETLRKIRGVEDINDEYESIVHACEIASQVKDPYRKLLKPASRPPLIIGMLLQLFQQFSGINAIMFYAPVLFQTVGFGSNAALLSAVITGSINVLSTFVGIYLVDRTGRRFLLLQSSVHMLISQMIIGIILAKDLGITGTLGKAQAMVVVVFVCAYVMGFAWSWGPLGWLIPSETFPLETRSAGFAVAVSCNMLFTFVIAQAFLSMLCGMRSGIFFFFSAWIIVMGLFALFFIPETKGVAIDDVRERVWKPHWFWKRYMLAEDDHQDVEKRTE

SEQ ID NO: 97222 - DNA, 1635 bp, Brassica napus
  CDS (1)..(1635)
atgcaatcgtcaacgtacgcagctgttaaaggaaacgctgcgtttgcgtttcagagacgtagcttctctaacctcgtcagcagatcggcgactactaccggaattcgcttctccaccggctcttacttcgcacaactccactcttccgcctcgaaagccatgggagcgaagcttgctcgcgctgagaacgggattcacagtctctcctcggtcaaagctcgatcggttagagcacaagcctcctctggtggtggtgacgaagaagaagcaatacctctgagatctgaaggaaaaatctcagggacggttttacccttcgttggtgttgcttgtcttggtgctatcttgtttggttatcatctcggggttgttaacggtgctcttgagtaccttgctaaggatcttggtatcgctgataatgctgttttgcaagggtggattgttagcgcgttgcttgctggtgcaacggtcggttctttcaccggaggtgcattagctgacaaattcggacgaactagaacttttcaattggatgctatcccgcttgccgttggagctttcttatgtgcaacagctcagagtgtgcagactatgattgtgggacgtctgctcgcaggggttggaatcggaatctcatcagccattgtaccactttacatttccgagatatcaccaactgaaattcgcggtgcactcggatctgtgaaccagttgttcatatgtataggaatactcgcagccttgatagctggattaccccttgcagcaaaccctctatggtggaggacgatgtttggtgttgcagttatcccttccgttctattagccataggaatggggttttctccagaaagcccaaggtggctcgttcagcaaggaaaacttactcaagcggaaaaggctatcaaaactctgtatggtaaagaaaaagtggttgaactagtgcgtgacttatcaaactctggccaaggtacttctgagccagaggcaggatggtttgatctattcagcagccgctactggaaagttgtaagcgttggtgcggcgctcttcttgtttcagcagttagctgggataaatgcagttgtgtactactctacatctgtgttccgcagcgccggaatccaatctgatgttgcagccagtgctcttgttggagcatcaaacgtgtttggaactgctgttgcttcgtctttgatggacaaaatgggaaggaaaagtcttctacttactagctttggtggaatggcgttgtctatgctgttgctctcgttgtccttcacatggaaagctcttgctgcatattcaggcactctcgctgttgttggaactgttctctatgtcctgtcattctcacttggtgctggcccggtaccagctcttcttcttccagagatattcgcatctcggatcagagcaaaagctgtcgctctttctctcggcatgcactggatctcaaactttgtgattggactctacttcttgagcgttgtgactaaattcggaatcagcagtgtgtacttgggattcgcaggagtgtgtgtccttgcagtcatgtacattgcaggaaacgtagtggagactaaaggacggtcactcgaggaaatagagcttgcacttacctctggagcttga

SEQ ID NO: 97223 - protein, 544 aa, Brassica napus
MQSSTYAAVKGNAAFAFQRRSFSNLVSRSATTTGIRFSTGSYFAQLHSSASKAMGAKLARAENGIHSLSSVKARSVRAQASSGGGDEEEAIPLRSEGKISGTVLPFVGVACLGAILFGYHLGVVNGALEYLAKDLGIADNAVLQGWIVSALLAGATVGSFTGGALADKFGRTRTFQLDAIPLAVGAFLCATAQSVQTMIVGRLLAGVGIGISSAIVPLYISEISPTEIRGALGSVNQLFICIGILAALIAGLPLAANPLWWRTMFGVAVIPSVLLAIGMGFSPESPRWLVQQGKLTQAEKAIKTLYGKEKVVELVRDLSNSGQGTSEPEAGWFDLFSSRYWKVVSVGAALFLFQQLAGINAVVYYSTSVFRSAGIQSDVAASALVGASNVFGTAVASSLMDKMGRKSLLLTSFGGMALSMLLLSLSFTWKALAAYSGTLAVVGTVLYVLSFSLGAGPVPALLLPEIFASRIRAKAVALSLGMHWISNFVIGLYFLSVVTKFGISSVYLGFAGVCVLAVMYIAGNVVETKGRSLEEIELALTSGA

SEQ ID NO: 97224 - DNA, 1524 bp, Brassica napus
  CDS (1)..(1524)
atggaagatcaggtcatctccagcaagaatccggatcccgtcgatcagaagccgaccaatgaaaagccacccggagttaatagatacgctcttcagtgttctattgtcgcctccatcgtctccatcatctttggttacgatactggtgttatgagtggagcaatggtgtttattgaagaagatctaaagactaacgaagttcagatcgaagttctcaccggaatcctcaacctttgtgcccttttcggatcattactcgctggaagaacatcggacataatcggacgtcgttacacaatcgtcttagcttcaatactgttcatgttaggttcagtattaatgggctggggtccaaattatcccgttctcctaaccggtagatgcacagccggtctaggcgtcggttttgctctaatggttgctccggtttactcagccgagatagcaaccgcttcacatagaggactcttagcttctcttcctcatctttgcatcagtatagggattttactaggttacctagtcaattacttcttctccaagttaccaatgcatatcggttggagactgatgctcggcatagctgcgatcccctcgctagtgctagcgttagggatcttgaaaatgccggagtctccacgctggttggtcttacaaggccgtctcggagaagccaagaagatactgaagttagtatcgaactcgcctgaagaagctgagatacggtttaaagacatcaaaaccgctgctggaatcgacgcaaattgtgaagatgaagttgtgaagatggagaacaagaagactcacggtgaaggagtgtggaaagagctaatcttaagaccaacacctgccgtacgacgagttcttttgactgcgttagggattcatttcttccagcacgccacgggtatcgaagccgtgcttttatacggtccgaagatctttaagagggcagggatcacggctaaagacaagcttttcttggtcacaatcggtgtcggaatcatgaagacgacgtttattttcacggcgactttcttgctcgacaaggtaggtcggaggaagcttttgttgaccagcgtcggaggaatggtttgcgcgttgacgatgttgggatttgggcttacgatggcccagaactcaggcgggaagctagcttgggctttggtgctcagcatagtttcagcttacagtttcgtcgcggttttctctattgggcttggcccaataacttgggtctacagctctgaggtgttcccgttgaagcttagggcgcaaggagcgagtctcggcgttgcggtgaatagagtgatgaatgctacggtgtccatgtcgtttttgtcgctgactagggcgataacaaccggaggagctttctttatgtttgctggagttgcggcggtggcgtggaacttcttcttcttcctaatgccggagacgaaaggtaagtcgcttgaagagatcgaagcgctttttcaaagagatggtgacaataaaacaaaaggagagaacgtcaccgtttaa

SEQ ID NO: 97225 - protein, 507 aa, Brassica napus
MEDQVISSKNPDPVDQKPTNEKPPGVNRYALQCSIVASIVSIIFGYDTGVMSGAMVFIEEDLKTNEVQIEVLTGILNLCALFGSLLAGRTSDIIGRRYTIVLASILFMLGSVLMGWGPNYPVLLTGRCTAGLGVGFALMVAPVYSAEIATASHRGLLASLPHLCISIGILLGYLVNYFFSKLPMHIGWRLMLGIAAIPSLVLALGILKMPESPRWLVLQGRLGEAKKILKLVSNSPEEAEIRFKDIKTAAGIDANCEDEVVKMENKKTHGEGVWKELILRPTPAVRRVLLTALGIHFFQHATGIEAVLLYGPKIFKRAGITAKDKLFLVTIGVGIMKTTFIFTATFLLDKVGRRKLLLTSVGGMVCALTMLGFGLTMAQNSGGKLAWALVLSIVSAYSFVAVFSIGLGPITWVYSSEVFPLKLRAQGASLGVAVNRVMNATVSMSFLSLTRAITTGGAFFMFAGVAAVAWNFFFFLMPETKGKSLEEIEALFQRDGDNKTKGENVTV

SEQ ID NO: 97226 - DNA, 1683 bp, Glycine max
  CDS (1)..(1683)
atggcatcaacttctctcttcaacttcagactccctctgttcaacttcaacccactgcaccatcgacggataaagaggccaaaatctctgctctcctctcctcgcaacagtccacgcctcgtttcttccattaacgaccatttggcgctcacacgtgtcacatatccgcttctccaatctcactctgctccgaagcgcagattccacgttggtgtacagaaagagtattctgatggggaaagctctgagtcgattgtttctgacgctacataccaagaggaattttcctggtcttctgtagttcttccgtttctattccccgcattgggtggcttgttatttggttatgatattggtgccacctctggcgctacaatctcactgcagtcacctgagcttagcggtatatcatggttcaatctttctgccattcagcttggactagtggttagtggttccctatacggggctcttcttggctcgcttgttgcatttgcgatagctgatttccttgggaggaagaaacaactcattactgcagcactgttgtatttgtttggtggtgtgattactgcctatgcaccagaacttggtgttctcttaccaggaaggctgatttatggacttggtataggtttgggcatgcatggggctcctttatatattgcggagacttgcccatcacaaatccgtgggacattagtatcattaaaagaactcttcattgtccttgggattctgcttggttattttgtgggaagctttctgattgagacagttggaggatggcggttcatgtacggatttagtgctccagttgctgtattaatggggcttggaatgtggactctccccaattctccacggtggttgcttctcagagcagtgcaaggaaaaggttcttttcaagatttgaaggaacaggcaattgcttccctgagcaaattaaggggccgaccacctggtgacaaagaatctgagaagcaaatagaagagacccttgtctcattgaaatctgtctatgcagaccaggaatccgaggggaatttcttagaggtgtttcagggtcccaatctgaaagctttcataattggtggggggctagtcctatttcaacagataacaggtcaaccaagtgttctgtattatgcaggcccaattcttcagagtgctggattttctgctgcatctgatgctacaaaagtttcagttgttattggcctattcaagttactaatgacttggattgctgtcctaaaagttgatgatttggggagaagacctctgctgattggaggtgtcagtggcattgccctttctctagttctcctttctgcttattataaatttcttggaggttttccacttgttgctgttggagctttacttctttatgttggttgctaccagatatcatttgggccaataagttggctaatggtatcagaggtcttcccacttcgcactagaggcaaggggattagtctggctgttcttaccaacttcgcttcaaatgctgttgttacctttgcattctccccgctaaaggagtttctaggagctgaaaatctttttctcctttttggggctattgctactctatcacttttgttcattatcttttctgttccagagacaaaaggcatgagtttagaagatatagaatccaaaatcttgaagtga

SEQ ID NO: 97227 - protein, 560 aa, Glycine max
MASTSLFNFRLPLFNFNPLHHRRIKRPKSLLSSPRNSPRLVSSINDHLALTRVTYPLLQSHSAPKRRFHVGVQKEYSDGESSESIVSDATYQEEFSWSSVVLPFLFPALGGLLFGYDIGATSGATISLQSPELSGISWFNLSAIQLGLVVSGSLYGALLGSLVAFAIADFLGRKKQLITAALLYLFGGVITAYAPELGVLLPGRLIYGLGIGLGMHGAPLYIAETCPSQIRGTLVSLKELFIVLGILLGYFVGSFLIETVGGWRFMYGFSAPVAVLMGLGMWTLPNSPRWLLLRAVQGKGSFQDLKEQAIASLSKLRGRPPGDKESEKQIEETLVSLKSVYADQESEGNFLEVFQGPNLKAFIIGGGLVLFQQITGQPSVLYYAGPILQSAGFSAASDATKVSVVIGLFKLLMTWIAVLKVDDLGRRPLLIGGVSGIALSLVLLSAYYKFLGGFPLVAVGALLLYVGCYQISFGPISWLMVSEVFPLRTRGKGISLAVLTNFASNAVVTFAFSPLKEFLGAENLFLLFGAIATLSLLFIIFSVPETKGMSLEDIESKILK

SEQ ID NO: 97228 - DNA, 1467 bp, Glycine max
  CDS (1)..(1467)
atggaccaggcgaccacgttcaacaaatatgcctttgcttgtgctgcagttgcttcaatggtatccatcatatctggctatgacacgggtgttatgagtggagcaatgatattcatcaaggatgacattggaatcagtgacacccaacaagaggttctagcaggaatcttgaacctatgtgcattgggggggtccttagctgcgggaagaacctccgattatattggtcgtcgctacacaatcttgttggcctcactcctcttcatggtgggtgcaattctcatggggtatggtccaaactatgcaattctaatgcttggaagatgcattggtggtgttggtgtaggctttgctctcatgatagcaccagtttactcagcagagatttcttctgcatcatcaaggggttttctaacctcgttacccgagctttgcatcggcattgggatcttacttgggtacatatcaaactactttttggggaaattgactttgaggctgggatggagattaatgcttggggtagcagcttttccctcgctggctttggccttggggattctggggatgccagagtccccaaggtggttgacaatgcaaggtcgcctaggggatgcaaagaaagtgttattgcgagtttccaacacggaacacgaggccaagcttcggtttagagaaataaaagttgcaatgaggattaatgattgtgatggtgatgacaacaatgtgaaaccttcttacaagtcacaaggggaaggggtgtggaaagaattgctggtgaggcccacaccggaagtgcgttggatgctaattgcggcagtggggattcacttctttgagcatgcaactggcattgaggcagtgatgttgtatagtcccagaatcttcaagaaagctggtgtcacaagcaaggacaagcttcttcttgcaacggttggtattggcctcacaaagatcattttcttggtcatggctttgtttttgcttgacaaagttggtagaaggcgtcttttacaaatcagcactgggggaatggtttgtgggctcacacttttggggtttagtttgaccatggtggatcgttctagtgaaaagctcttgtgggctttgagccttagtattgtggccatttatgcttatgttgctttctttaatgttgggcttgggcctgttacttgggtttatgcgtcggagatttttcctttgaagttgagggcgcaaggggctagtataggagttgcggtgaatagaaccatgaatgctgtggtttccatgagttttatttcggtctacaaagcgatcactataggtgggagctttttcatgtttgctgggatatctatagtggcttgggtgttcttctactttttccttcctgaaaccaaaggtgtgcccttggaagagatggagatggttttcagcaaaaaatacagtgggaaaaatgtagcgatagaaactggtccatga

SEQ ID NO: 97229 - protein, 488 aa, Glycine max
MDQATTFNKYAFACAAVASMVSIISGYDTGVMSGAMIFIKDDIGISDTQQEVLAGILNLCALGGSLAAGRTSDYIGRRYTILLASLLFMVGAILMGYGPNYAILMLGRCIGGVGVGFALMIAPVYSAEISSASSRGFLTSLPELCIGIGILLGYISNYFLGKLTLRLGWRLMLGVAAFPSLALALGILGMPESPRWLTMQGRLGDAKKVLLRVSNTEHEAKLRFREIKVAMRINDCDGDDNNVKPSYKSQGEGVWKELLVRPTPEVRWMLIAAVGIHFFEHATGIEAVMLYSPRIFKKAGVTSKDKLLLATVGIGLTKIIFLVMALFLLDKVGRRRLLQISTGGMVCGLTLLGFSLTMVDRSSEKLLWALSLSIVAIYAYVAFFNVGLGPVTWVYASEIFPLKLRAQGASIGVAVNRTMNAVVSMSFISVYKAITIGGSFFMFAGISIVAWVFFYFFLPETKGVPLEEMEMVFSKKYSGKNVAIETGP

SEQ ID NO: 97230 - DNA, 1518 bp, Glycine max
  CDS (1)..(1518)
atggcaggagggtctttcacaacaggcactgtgagcaaggagagggcagagcagtacaaggggagagtcactgcttatgtcatcatctcttgcattgttgctgccacaggaggggctctctttggctatgatattggaatttcaggtggggttacatccatggatgactttcttatagagttcttcccctcagtatacagacagaaaaagcatgcccatgaaaacaactactgcaagtatgacaatcagggcctagcagcatttacctcttctctgtacattgctggtttagttgcatccctgatggcatcccctgtgacaagaaagtatggacgtcgagtaagtatcataggtggtggtatcagctttcttattggatcagctctgaatgcttcagctgttaacctgataatgttgatcttaggccgggttatgcttggtgttggcattggatttggaaatcaggctattcaattcggctcgtcagagatggcaccaacacaccttcgaggaggcctgaacatgatgtttcaagttgcaaccacttttgggattttcacagctaacatgatcaattttggaacacaaaagatcaagccttggggttggaggctgtccctaggcttggctgcagtaccagctcttttgatgactgtgggagggatatttcttcctgacactccaaatagcttaattgaacgaggattggcggaaaaaggaaggaagctgctggagaaaatccgaggaaccaaggaagttgatgcagagttccaagatatggttgatgcaagcgagttggcaaagtccataaagcacccatttcgtaacatccttgaaagaaggtacaggccagagttggtgatggcaatcttcatgcctacctttcagatcctgactggcataaattccattctcttctatgctccagtgctgtttcaaagcatgggatttggaggagatgcatcactcatctcttcagctttaaccggtggagttcttgctagttcaacattcatttccatagcaacagtagataggttgggcaggagagttcttcttgtcagtggtggactacaaatgatcacatgccaaatcatagtggccattattctaggggtcaagtttggagcagaccaagaattgtcaaaagggttttcaattttggtggttgtggtgatttgcctatttgttgttgcttttgggtggtcatggggtccacttgggtggacagtccctagtgagatatttccattggaaatccggtcagcagggcagggcatcacagttgctgtaaaccttctcttcactttcataattgctcaggcctttcttgctcttctctgctcattcaagtttgggatctttctcttctttgctggctggatcaccatcatgaccatatttgtttacctgttcttacctgaaaccaaagggattcccattgaggagatgtcatttatgtggaggaggcactggttctggaaaaggatttgcctcccaacagatggtagtatctga

SEQ ID NO: 97231 - protein, 505 aa, Glycine max
MAGGSFTTGTVSKERAEQYKGRVTAYVIISCIVAATGGALFGYDIGISGGVTSMDDFLIEFFPSVYRQKKHAHENNYCKYDNQGLAAFTSSLYIAGLVASLMASPVTRKYGRRVSIIGGGISFLIGSALNASAVNLIMLILGRVMLGVGIGFGNQAIQFGSSEMAPTHLRGGLNMMFQVATTFGIFTANMINFGTQKIKPWGWRLSLGLAAVPALLMTVGGIFLPDTPNSLIERGLAEKGRKLLEKIRGTKEVDAEFQDMVDASELAKSIKHPFRNILERRYRPELVMAIFMPTFQILTGINSILFYAPVLFQSMGFGGDASLISSALTGGVLASSTFISIATVDRLGRRVLLVSGGLQMITCQIIVAIILGVKFGADQELSKGFSILVVVVICLFVVAFGWSWGPLGWTVPSEIFPLEIRSAGQGITVAVNLLFTFIIAQAFLALLCSFKFGIFLFFAGWITIMTIFVYLFLPETKGIPIEEMSFMWRRHWFWKRICLPTDGSI

SEQ ID NO: 97232 - DNA, 1494 bp, Glycine max
  CDS (1)..(1494)
atggcatttgatcccgtgcaacccgtcgcaaagaaagcaaggtcaggtggtgagattgtgagtgcaagagagcctctgcttaatggggttcatgactctgaaagctattccgtctctgctgcaattctcccatttctcttcccagctttgggtggcctactatttggctatgatattggtgccacatcttcggcaaccatttccattcagtcaccaacactaagtggagtatcttggtacaagttgtcttctgttgaaattggtcttcttactagtggatcattgtatggtgccttaattggctccgtgttggccttcaatgttgctgacttcttaggtagaagaaaggagctgattggagctgcagtagtttatcttgttggagcccttgtaacagcattagctcctaattttcctgtattggtgcttgggagacttgtatttggcacaggaattggactggcaatgcatgctgctccaatgtacattgcagagacagctccaacaccaatacgtggacaactaatatctctaaaagagttctttatagtacttgggatggttgcaggatatggaattggtagcttgttcgtcgaaaccgtatctgggtggcggtatatgtatggagttagtagtcctgtggcaataatcatgggagttggaatgtggtggctcccagcttctcctagatggttacttttacgtgctatacagggaaaaggggatgttcagaattcaaaagacatagcaattcgtagtttgtgtcagcttcgaggtcaagctttttatgattcagttccttggcaagtagatgagattctggcagaactttcttatctaggtgaagaaaaagaagctacctttggagaactattccaaggaaaatgcttgaaagccctttggattggttcaggattggtcttgtttcagcagatcacagggcaaccaagtgtgctctactatgctggatcaatctttcagagtgcaggattctccggagcatctgatgcaacccgagtctctattctccttgggtttttcaagttgattatgactggagttgctgttgtcgttgttgataaacttggaaggaggcctttactacttgggggagtttcagggatagtgatctctttattctttctcggttcatattacattttcttggataattcaccagttgttgctgtaattggtctgctgttgtacgttggcagttatcagatttcctttggtccaattggttggttaatgatagcagagattttccccttgcgcctaagaggtcgaggactaagtatagctgtactcgtcaattttggtgcaaatgccctggtgacatttgctttttccccactgaaggcattattgggagctggaattttgttttacacattttgtgtaatagccgtggcatctcttgtattcatatactttgttataccagaaaccaaggggcttacactagaggagatcgaggccaaatgcctctag

SEQ ID NO: 97233 - protein, 497 aa, Glycine max
MAFDPVQPVAKKARSGGEIVSAREPLLNGVHDSESYSVSAAILPFLFPALGGLLFGYDIGATSSATISIQSPTLSGVSWYKLSSVEIGLLTSGSLYGALIGSVLAFNVADFLGRRKELIGAAVVYLVGALVTALAPNFPVLVLGRLVFGTGIGLAMHAAPMYIAETAPTPIRGQLISLKEFFIVLGMVAGYGIGSLFVETVSGWRYMYGVSSPVAIIMGVGMWWLPASPRWLLLRAIQGKGDVQNSKDIAIRSLCQLRGQAFYDSVPWQVDEILAELSYLGEEKEATFGELFQGKCLKALWIGSGLVLFQQITGQPSVLYYAGSIFQSAGFSGASDATRVSILLGFFKLIMTGVAVVVVDKLGRRPLLLGGVSGIVISLFFLGSYYIFLDNSPVVAVIGLLLYVGSYQISFGPIGWLMIAEIFPLRLRGRGLSIAVLVNFGANALVTFAFSPLKALLGAGILFYTFCVIAVASLVFIYFVIPETKGLTLEEIEAKCL

SEQ ID NO: 97234 - DNA, 1569 bp, Glycine max
  CDS (1)..(1569)
atggccggcggaggtttcaccagcggcggcggcgccggagatttcgaggccaaaatcactcccatcgtcatcatttcatgtatcatggctgccaccggaggtctcatgttcggctacgacgtcggcgtttcaggtggtgtgacgtctatgcccccgttcttgaagaagttttttccgacggtatacagaaagacagtggaagagaaaggactggacagtaattactgcaaatacgacaaccaaggattacagcttttcacgtcgtctctgtatctggctggtttgacttcgacgttctttgcttcatacacgactcgtaggttgggaagaaggctgaccatgttgattgctggggtattcttcatctgtggagttgtccttaatgctgctgctcaagaccttgccatgctcatcgttggcagaatcttacttggctgtggtgttggctttgctaatcaggccgtgccagtgttcctctctgagatagcaccttcaagaatacgaggagcattgaatatattgttccagctcaatgtcacaattggcattctatttgctaaccttgtcaactatggcaccaacaaaatcaaaggtgggtggggttggaggctatctcttgggttggctggtatcccagcagttctgctaacattgggagccttgttcgtggtggacacccccaacagtctgatcgaacgtgggcgcttggaagaaggaaaaacagtgcttaaaaagattcgcggcactgacaacattgaacttgagttccaggaattgcttgaggccagtcgtgtggctaaagaggtcaagcatccattcaggaatcttctcaagcgcaggaaccgaccccaacttgtcatttccgttgccctacagatattccagcaattcacaggcatcaacgcaatcatgttttatgccccggtgctgttcaacacgttaggattcaagaacgatgcatccctgtattctgctgtgataactggggctgtgaacgtgctctccactgttgtatcgatctactcagtggacaaagtgggacgtcgcattctgttgctggaagctggtgtgcagatgttcttgtctcaagtggtgattgcaatcatactgggaataaaggtgacggaccattctgatgacctttcaaaaggcattgcaattctggtggttgtgatggtctgcactttcgtgtcttcctttgcatggtcttggggtcctcttgggtggcttatccccagtgagactttcccattggagactcgttccgctggtcagagtgtcaccgtttgtgttaacctgctcttcaccttcgtcattgcacaagccttcctctctatgctctgccacttcaagtttggtatcttcttgttcttctctggctgggtcctcgtcatgtctgtcttcgtgcttttcctgttgcccgagactaagaatgtccccatcgaagagatgaccgagagagtgtggaagcagcattggttctggaagaggtttatcgatgatgccgcggatgagaaagtagcccatgtctctaatggtaatggatttgatccaacctccaggttgtaa

SEQ ID NO: 97235 - protein, 522 aa, Glycine max
MAGGGFTSGGGAGDFEAKITPIVIISCIMAATGGLMFGYDVGVSGGVTSMPPFLKKFFPTVYRKTVEEKGLDSNYCKYDNQGLQLFTSSLYLAGLTSTFFASYTTRRLGRRLTMLIAGVFFICGVVLNAAAQDLAMLIVGRILLGCGVGFANQAVPVFLSEIAPSRIRGALNILFQLNVTIGILFANLVNYGTNKIKGGWGWRLSLGLAGIPAVLLTLGALFVVDTPNSLIERGRLEEGKTVLKKIRGTDNIELEFQELLEASRVAKEVKHPFRNLLKRRNRPQLVISVALQIFQQFTGINAIMFYAPVLFNTLGFKNDASLYSAVITGAVNVLSTVVSIYSVDKVGRRILLLEAGVQMFLSQVVIAIILGIKVTDHSDDLSKGIAILVVVMVCTFVSSFAWSWGPLGWLIPSETFPLETRSAGQSVTVCVNLLFTFVIAQAFLSMLCHFKFGIFLFFSGWVLVMSVFVLFLLPETKNVPIEEMTERVWKQHWFWKRFIDDAADEKVAHVSNGNGFDPTSRL

SEQ ID NO: 97236 - DNA, 1536 bp, Glycine max
  CDS (1)..(1536)
atggctggtggaggagtagagattggaggaccaggaaaaagggctcatctttacgagcacaagttcagttggtatttcgtctatacatgcttcgttggggcccttggcggttctctctttggctatgatctcggtgtttcaggtggggtgacttcaatggatgatttcctgaaggaattcttcccaaaggtttacagaaggaagcagatgcatctgcatgaaacagactattgtaaatatgacgaccaagtgctgacactgtttacatcatctctttatttctcagcacttgtcatgacattctttgcttccttcttgacaagaaagaagggaagaaaggccagtatcattgtgggagcccttagcttcctggctggggctatcctcaatgccgcagccaagaacattgcaatgctaattattggcagagtccttcttggtggaggcattggatttggcaaccaagctgttccattgtatctttcggaaatggctccagctaagaaccgaggagcagtgaaccaactgtttcagttcacaacttgtgctggaatcttaattgcaaacctagtgaattactttactgaaaaaatccatccctatggatggaggatatctctgggtttggcaggtcttccagcatttgcaatgcttgttggaggtatttgttgtgctgagacaccaaacagccttgtggagcaaggaaggttggataaagcaaaacaagtattgcagagaattagaggtaccgagaacgttgaagccgaatttgaggatcttaaagaagccagtgaagaagcacaagctgttaagagcccgtttaggacactcctcaagaggaagtacaggccacaactgatcataggtgcattggggattccagcgttccagcagctaactggcaataactccatcctcttctatgcccctgtcatttttcagagcttgggctttggtgccaatgcttcactgttttcatcttttattaccaatggggctcttcttgttgccactgtcatctcaatgtttttggttgacaagtatggtagaagaaaattctttctggaagctggctttgaaatgatatgctgcatgattattacaggtgcagtcttggctgtgaactttgggcacggcaaagaaattgggaaaggagtgagtgcctttctggttgttgtgatcttcttgttcgttttggcatatgggagatcttggggtccccttgggtggttggttcccagtgagctcttcccattagagataagatcatctgcacagagtattgtggtctgtgtcaacatgatcttcactgcacttgttgctcaattgttcctcatgtcactttgccacctcaaatttgggatcttcttgctctttgcttccttaattatcttcatgagcttctttgtcttcttccttttgcccgaaaccaagaaagttccaattgaggagatttatcttctttttgagaatcattggttctggaggagatttgtaactgaccaagacccagagacatcaaaggggactgcttaa

SEQ ID NO: 97237 - protein, 511 aa, Glycine max
MAGGGVEIGGPGKRAHLYEHKFSWYFVYTCFVGALGGSLFGYDLGVSGGVTSMDDFLKEFFPKVYRRKQMHLHETDYCKYDDQVLTLFTSSLYFSALVMTFFASFLTRKKGRKASIIVGALSFLAGAILNAAAKNIAMLIIGRVLLGGGIGFGNQAVPLYLSEMAPAKNRGAVNQLFQFTTCAGILIANLVNYFTEKIHPYGWRISLGLAGLPAFAMLVGGICCAETPNSLVEQGRLDKAKQVLQRIRGTENVEAEFEDLKEASEEAQAVKSPFRTLLKRKYRPQLIIGALGIPAFQQLTGNNSILFYAPVIFQSLGFGANASLFSSFITNGALLVATVISMFLVDKYGRRKFFLEAGFEMICCMIITGAVLAVNFGHGKEIGKGVSAFLVVVIFLFVLAYGRSWGPLGWLVPSELFPLEIRSSAQSIVVCVNMIFTALVAQLFLMSLCHLKFGIFLLFASLIIFMSFFVFFLLPETKKVPIEEIYLLFENHWFWRRFVTDQDPETSKGTA

SEQ ID NO: 97238 - DNA, 1557 bp, Glycine max
  CDS (1)..(1557)
atgcctgcggtaggaggtattagcaacggagggggcaaggagtaccctggaagcctcactccttttgtgacggtaacatgtatagttgcagccatgggtgggttaatcttcggttacgatatcggaatttcaggtggggtgacatccatggatccgtttctgctcaagtttttcccgtcggtgttccggaagaagaattccgacaaaacggtgaaccagtactgtcaatacgacagccagacactgacgatgttcacgtcgtcgctgtatctcgccgcgttgctgtcgtcgttggttgcctccaccgtcacacgtaggttcggccgaaaactctccatgcttttcggaggcttgcttttcctcgtcggtgcccttatcaacggttttgcccaacacgtgtggatgctcatcgtgggtcggatcttgctcgggttcggtatcgggtttgccaatcagtctgtgccactctacctatctgaaatggctccatacaaatatagaggagcattgaacattggctttcagttgtccatcactgttggtatccttgtggccaatgtgttgaactatttctttgctaaaatcaaaggtggttggggatggaggttgagtttgggaggtgctatggtccctgcccttataatcacagtaggatcactagtccttccagacactcccaattccatgattgaaaggggtgatcgcgagaaggccaaggctcagcttcagagaattcgcggcatcgacaatgttgatgaagagttcaatgaccttgtggcagcaagtgaatcctctagccaagtggagcacccttggaggaacttgttgcaaagaaagtacagaccccacctcaccatggcagtgttgattccattcttccagcaactcactggaatcaatgtcatcatgttttacgcgccggtcctgttcagctccatcgggtttaaggatgatgctgctctaatgtcagctgtgatcaccggcgttgttaatgttgtcgcaacttgtgtctcaatttatggtgttgacaagtggggtaggagagcccttttccttgaaggtggagtccaaatgctcatttgccaggctgtagttgcagctgcaattggagcaaagtttggaactgatgggaacccaggtgatttgccaaagtggtatgcaattgttgtggttctcttcatttgcatttatgtatcagcatttgcctggtcatggggtcccctaggttggttggtgcctagtgagatctttcccttggagattcgttcagctgctcagagtatcaatgtgtcggtgaacatgcttttcactttcttgattgcacaagtcttcttgacaatgctttgccacatgaagttcggcttgttcctcttctttgccttcttcgtgttgatcatgacattcttcgtctacttcttcttgcccgaaacaaagggcattccaattgaagaaatggggcaggtttggcaggcacaccccttctggtccagattcgtggagcatgatgattatggcaatggtgttgagatgggaaagggagctattaaagaagtgtag

SEQ ID NO: 97239 - protein, 518 aa, Glycine max
MPAVGGISNGGGKEYPGSLTPFVTVTCIVAAMGGLIFGYDIGISGGVTSMDPFLLKFFPSVFRKKNSDKTVNQYCQYDSQTLTMFTSSLYLAALLSSLVASTVTRRFGRKLSMLFGGLLFLVGALINGFAQHVWMLIVGRILLGFGIGFANQSVPLYLSEMAPYKYRGALNIGFQLSITVGILVANVLNYFFAKIKGGWGWRLSLGGAMVPALIITVGSLVLPDTPNSMIERGDREKAKAQLQRIRGIDNVDEEFNDLVAASESSSQVEHPWRNLLQRKYRPHLTMAVLIPFFQQLTGINVIMFYAPVLFSSIGFKDDAALMSAVITGVVNVVATCVSIYGVDKWGRRALFLEGGVQMLICQAVVAAAIGAKFGTDGNPGDLPKWYAIVVVLFICIYVSAFAWSWGPLGWLVPSEIFPLEIRSAAQSINVSVNMLFTFLIAQVFLTMLCHMKFGLFLFFAFFVLIMTFFVYFFLPETKGIPIEEMGQVWQAHPFWSRFVEHDDYGNGVEMGKGAIKEV

SEQ ID NO: 97240 - DNA, 1461 bp, Glycine max
  CDS (1)..(1461)
atgagtttgagggaagacaatgaagagggaagggatctgaagaagccatttcttcacacgggaagttggtatcgtatgagtgggagacaatccagtgtgttcggttccacacaggccattcgtgattcctccatctctgtctttgcttgtgttctaatcgttgctttgggtccaattcagtttggtttcactgctggttacacctcacctacacaatctgctatcatcaatgatctaggcctctcagtctctgagttttctttgtttggttctttgtccaatgtgggtgccatggttggagcaattgctagtggtcagattgctgagtacatagggcgcaaagggtctttgatgattgcatccattcctaatattattggttggctggctatctcatttgcaaaagattcttcttttctttatatgggaagattgttggaagggtttggtgtaggaataatatcttacacggtgcctgtgtacatagctgagatatcacctccaaacttgcgggggggtttggtttcagttaaccagctctctgtcaccattggaattatgctggcatatctgctggggatttttgttgaatggagaatccttgcaattataggaattttaccctgcacaatattgatacctgccctgtttttcattcccgagtctcctagatggctggcaaaaatgggaatgacagaagaatttgaaacttccttgcaagtgctccgaggctttgatactgatatttctgttgaagtgaatgaaattaagagggctgttgcttcaacaaacacaagaattacagttcgatttgcagacctcaaacaaagaagatattggcttcccttaatgattggaattggactgctaattttgcaacagctttctggaattaatggtgttcttttttattccagtaccatctttcgaaatgctggaatcagttcaagtgacgcggcaacatttggagttggtgctgttcaggttcttgccaccagtctaactttgtggctggcagacaaatctggtcgccggcttctccttattgtctctgcaactggaatgtcttttagtctcttagttgttgcaatcacattctacataaaggctagtatatcagaaacttcttccttgtatgggatattgagcaccttgtcgctggttggagtcgtggccatggttattgcattctctcttggaatgggagctatgccatggattataatgtctgagattcttccaataaacattaaaggcctcgcgggaagtgtggcaacacttgccaactggttgttttcctggttggttacattgacagcaaatatgcttttggattggagctctggaggaaccttcaccatatatgcagttgtatgtgccttgactgtagtatttgttaccatttgggtccctgagacaaagggaaaaactattgaagaaatccaatggtctttcagatga

SEQ ID NO: 97241 - protein, 486 aa, Glycine max
MSLREDNEEGRDLKKPFLHTGSWYRMSGRQSSVFGSTQAIRDSSISVFACVLIVALGPIQFGFTAGYTSPTQSAIINDLGLSVSEFSLFGSLSNVGAMVGAIASGQIAEYIGRKGSLMIASIPNIIGWLAISFAKDSSFLYMGRLLEGFGVGIISYTVPVYIAEISPPNLRGGLVSVNQLSVTIGIMLAYLLGIFVEWRILAIIGILPCTILIPALFFIPESPRWLAKMGMTEEFETSLQVLRGFDTDISVEVNEIKRAVASTNTRITVRFADLKQRRYWLPLMIGIGLLILQQLSGINGVLFYSSTIFRNAGISSSDAATFGVGAVQVLATSLTLWLADKSGRRLLLIVSATGMSFSLLVVAITFYIKASISETSSLYGILSTLSLVGVVAMVIAFSLGMGAMPWIIMSEILPINIKGLAGSVATLANWLFSWLVTLTANMLLDWSSGGTFTIYAVVCALTVVFVTIWVPETKGKTIEEIQWSFR

SEQ ID NO: 97242 - DNA, 1506 bp, Glycine max
  CDS (1)..(1506)
atgactggggggggtatcactatgcaatcgacgccgggaagctcaggatacttggatttgtatccagagcggaagatgtcctttttcaaaaatccttacattctcggactggctgctgtcgccggcatcggtggtctcctcttcggctacgacactggtgtgatatcaggggctcttttatacattaaggatgattttgaggaggttagaaacagcaatcttctccaggaaacaatagtcagcatggctattgccggggcaatcgtgggagcagcattgggtggttggattaatgatgcctatggtcgaaagaaggccaccctctttgccgatgttatctttaccgccggagcaataatcatggcttctgctccagatccttatgttctcattttgggacgccttctggttggtttgggtgtgggcatagcttctgtcactgctcccgtttatattgcagaagcatcaccttccgaaataaggggttcattagtcagcacaaatgtcctcatgataaccggtggacagtttctttcctatcttgttaacctcgcttttactggtgttcctggcacttggcgatggatgcttggtgtttctggtgtgcctgctgttgttcagtttgttctcatgctcttcctccccgaatccccaagatggctttttgtcaagaataggaaaaatgaagccgttgatgtgctttctaagatctttgacgttgctcgcttagaagacgaagtcgatttcctcactgctcaatccgagcaagagcgccaaagaaggtcaaatatcaaattctgggatgtttttagatccaaagaaatcagactggcattcctcgtcggtgccggacttctggcttttcagcagttcacgggtattaacacagtcatgtactacagcccgacaattgtccaaatggcagggttccatgctaatgaattggctcttcttctatcccttatagttgccggcatgaatgcagccggaacaattcttggcatttaccttatcgaccatgctggacgaaaaaaattagctctttctagtctgggaggagtaattgtatctttggtcatcttggcctttgcattttataagcaatcatccacgtcaaatgagttgtatggatggcttgcagttgtaggcttagccttgtatattggttttttctcgccaggaatggggcctgtgccatggactctgagttcagagatatatccggaagaatatcgaggtatctgtgggggcatgtcagctactgtgtgttgggtctcaaatttgattgtctcagagacctttctttcaattgcggagggtatagggattggttcaacttttctgattattggtgtcatagctgtggttgcatttgtatttgtgcttgtttatgttccagagaccaaaggattgacctttgatgaagtggaagtaatatggagggagagagcttggggcaagaaccccaacacacaaaaccttcttgagcagggaagtagttcctaa

SEQ ID NO: 97243 - protein, 501 aa, Glycine max
MTGGGITMQSTPGSSGYLDLYPERKMSFFKNPYILGLAAVAGIGGLLFGYDTGVISGALLYIKDDFEEVRNSNLLQETIVSMAIAGAIVGAALGGWINDAYGRKKATLFADVIFTAGAIIMASAPDPYVLILGRLLVGLGVGIASVTAPVYIAEASPSEIRGSLVSTNVLMITGGQFLSYLVNLAFTGVPGTWRWMLGVSGVPAVVQFVLMLFLPESPRWLFVKNRKNEAVDVLSKIFDVARLEDEVDFLTAQSEQERQRRSNIKFWDVFRSKEIRLAFLVGAGLLAFQQFTGINTVMYYSPTIVQMAGFHANELALLLSLIVAGMNAAGTILGIYLIDHAGRKKLALSSLGGVIVSLVILAFAFYKQSSTSNELYGWLAVVGLALYIGFFSPGMGPVPWTLSSEIYPEEYRGICGGMSATVCWVSNLIVSETFLSIAEGIGIGSTFLIIGVIAVVAFVFVLVYVPETKGLTFDEVEVIWRERAWGKNPNTQNLLEQGSSS

SEQ ID NO: 97244 - DNA, 1467 bp, Glycine max
  CDS (1)..(1467)
atgtgtgtgagaatggaagagagtggcgatgcgagggatcttcagaaaccgttcctccacacagggagttggtacaagatgggttccaggcagtccagcatcatgggatcctccactcaggttatccgcgacggcgccgtttccgtcctcttctgcgtcctcatcgtcgccttgggtcccattcaattcggcttcacgtgtgggtattcttctccaacccaaggggctatagttcgcgatctaaacctctctatttcggagttttctttctttggatctttgtctaatgtgggagcaatggtgggagctatagctagtggtcagatagctgaatacatcgggcgcaaagggtcattgatgattgctgcgatccccaatataatagggtggcttgctatttcttttgccaaagattcctcatttttgtatatggggaggttgttggaaggttttggcgttgggattatctcttatgtggtgcctgtttatatagctgagattgcacctcaaaacttgagaggtggccttggatcagtgaaccagctctctgttacaattggcattatgctggcttatctgttgggtctttttgtcaactggagagtccttgcaattctaggaattttgccttgtacagtattaatacctggattatttttcatacctgaatcccccagatggttggccaagatggggatgatagatgagtttgagacttctttgcaagtgttacgaggatttgacactgatatatctgttgaagtacatgaaattaagagatctgtggcttcaacgggaaaaagagctgcaatccgatttgcagatctcaagaggaaaagatattggttcccgttaatggttggtattggattacttgttcttcagcaattatctggtatcaatggaattttgttctattcaactaccatctttgcaaatgcaggaatttcatccagcgaagctgctacagttggacttggagccgttcaggtcatagcaactggaatttccacatggttggtggacaaaagtggccggaggctgcttctaataatatcctcatctgtaatgacagttagccttctcattgtttctatagcattttatctggagggggttgtatcagaggattcacatttattcagcattttgggaatagtttctattgttggactcgtggctatggtgattgggttctctctaggtctgggacccatcccttggcttataatgtctgagatacttccagtgaatataaagggccttgctggcagcatagcgacaatgggaaattggctgatttcgtgggggatcacgatgactgctaacttgcttttgaattggagcagtggagggacatttacaatctacacagtcgtagctgcctttactatagcttttatagcaatgtgggttcctgagaccaagggaagaacattggaagaaattcagttttccttcagatag

SEQ ID NO: 97245 - protein, 488 aa, Glycine max
MCVRMEESGDARDLQKPFLHTGSWYKMGSRQSSIMGSSTQVIRDGAVSVLFCVLIVALGPIQFGFTCGYSSPTQGAIVRDLNLSISEFSFFGSLSNVGAMVGAIASGQIAEYIGRKGSLMIAAIPNIIGWLAISFAKDSSFLYMGRLLEGFGVGIISYVVPVYIAEIAPQNLRGGLGSVNQLSVTIGIMLAYLLGLFVNWRVLAILGILPCTVLIPGLFFIPESPRWLAKMGMIDEFETSLQVLRGFDTDISVEVHEIKRSVASTGKRAAIRFADLKRKRYWFPLMVGIGLLVLQQLSGINGILFYSTTIFANAGISSSEAATVGLGAVQVIATGISTWLVDKSGRRLLLIISSSVMTVSLLIVSIAFYLEGVVSEDSHLFSILGIVSIVGLVAMVIGFSLGLGPIPWLIMSEILPVNIKGLAGSIATMGNWLISWGITMTANLLLNWSSGGTFTIYTVVAAFTIAFIAMWVPETKGRTLEEIQFSFR

SEQ ID NO: 97246 - DNA, 1572 bp, Glycine max
  CDS (1)..(1572)
atgactgagggaaagctagttgaagctgcagaagctcataagacacttcaggatttcgatcctccaaagaagcgcaaaaggaacaagtatgcttttgcttgtgctatgctggcctccatgacttccatcttgcttggttatgatattggagtgatgagtggagcagccatatacataaaaagggacctgaaagtctcggacgagcaaatcgagatcctgctcggaatcatcaacctatactctctgataggctcatgtctcgccggcagaacctccgactggataggtcgccgttacacgattgttttcgccggcaccatcttctttgtcggagcacttctcatgggtttctcccccaattattcctttctcatgtttggccgtttcgtcgctggcattggcatcggctacgccctcatgatagcccccgtctacaccgccgaggtctccccggcctcctctcgtggcttcctcacttccttccctgaggtatttattaatggagggatattaattggatacatatcaaactatgcattttcgaagctgacactaaaggtgggatggcgaatgatgcttggagttggtgcaataccttcggtactcctaacagtaggagtgttggcgatgccggagtccccaaggtggcttgtgatgaggggtcgtttgggagaggcaagaaaagtgcttaacaaaacctcagacagcaaggaagaggcccaactaaggctagcggaaatcaaacaagccgcagggatccccgagagttgcaacgacgacgtcgttcaggtaaataaacaaagcaacggtgaaggtgtatggaaagagctcttcctctatccaacgcccgcaattcgtcacatcgtaatcgctgcccttggtattcacttcttccaacaagcgtcgggcgtagacgccgtcgttttgtacagccccaggatcttcgaaaaggctgggattacaaacgacacgcataagcttcttgcaaccgtggccgttggattcgttaagaccgtgttcatcttggcggctacgtttacgttggaccgcgtgggtcgtcgtccgttgttattgtctagtgtcggcggcatggtgctctcgcttctcacgcttgcgatcagcctcactgttattgatcattcggagaggaaattaatgtgggccgttggatcgagcatagccatggtgttggcttacgtggccacgttctccatcggtgcgggtcccatcacgtgggtctatagttctgagatcttcccgttgaggctgcgggcgcagggtgcggccgcgggagttgcggtgaataggaccactagcgcggttgtctcaatgacttttctgtccctcactagagccatcactattggtggagctttcttcctttattgtggcattgctactgttgggtggatattcttttacaccgtcttgcctgagacccggggaaaaacgctcgaagacatggaagggtcttttggtacttttaggtccaaatccaacgccagcaaggctgtagaaaatgagaatgggcaagtagcacaagtccagctaggaaccaatgtccaaacttga

SEQ ID NO: 97247 - protein, 523 aa, Glycine max
MTEGKLVEAAEAHKTLQDFDPPKKRKRNKYAFACAMLASMTSILLGYDIGVMSGAAIYIKRDLKVSDEQIEILLGIINLYSLIGSCLAGRTSDWIGRRYTIVFAGTIFFVGALLMGFSPNYSFLMFGRFVAGIGIGYALMIAPVYTAEVSPASSRGFLTSFPEVFINGGILIGYISNYAFSKLTLKVGWRMMLGVGAIPSVLLTVGVLAMPESPRWLVMRGRLGEARKVLNKTSDSKEEAQLRLAEIKQAAGIPESCNDDVVQVNKQSNGEGVWKELFLYPTPAIRHIVIAALGIHFFQQASGVDAVVLYSPRIFEKAGITNDTHKLLATVAVGFVKTVFILAATFTLDRVGRRPLLLSSVGGMVLSLLTLAISLTVIDHSERKLMWAVGSSIAMVLAYVATFSIGAGPITWVYSSEIFPLRLRAQGAAAGVAVNRTTSAVVSMTFLSLTRAITIGGAFFLYCGIATVGWIFFYTVLPETRGKTLEDMEGSFGTFRSKSNASKAVENENGQVAQVQLGTNVQT

SEQ ID NO: 97248 - DNA, 1542 bp, Zea mays
  CDS (1)..(1542)
atgaccggaggcgggttcgccgtggcggagggcggccacgcgcgcgacgactacgggggaggcgtcacggtctccgtcgtggtcacctgcctcatggccgcctcctgcggactcatcttcggctacgacattggcgtctcaggtggcgtgacacaaatggagtcgttcctggcgaagttcttcccggaagtgtcaagcgggacaaaggacgcgaagcacgacgcatactgcaaatacgacgaccagcggctcacggcgttcacctcgtcgctgtacatcgccgcgatgctgtcatcgctggtggcgagccgcgtgacgaggacggtgggccggcaggccgtgatgctgatgggcggcgtcctgttcctcctaggctccgcgatcaacgccggcgccgtcaacgtcgccatgctcatcctcggacggatgctgctcggcttcggggtcgggttcaccacgcaggccgcccctctgtacctcgcggagacatcgccggcgcggtggcgcggggcgttcaccgcggcgtacagcatcttccaggtgctgggcgcgctggccgccaccgtcactaactacctgaccaaccgcgtcccggggtggggctggcgcgtgtcgctcggcctcgccgccgtcccggccgccatcgtcgtcctcggcgccctgctcgtcccggacacccccagcagcctcgtgttgcgcggcgacgccgacggggcccgggcctcgctgcagcgcctccgtggcccgggcgcggagaccgacgcggagctcaaggacatcgtccgcgccgtggagcgcgcgcggcgggacgacgagggcgcgtacgggaggctgtgcgccaaggggtacggccactacctggtgatggtggtggccatcccttccttcttcgacctcaccggcgtcatcgtcatggccgtcttctcgccggtgctgttccggacggtcgggttcagcagccagaaggcgatatttgggtccgtgatccttagcctcgtcaaccttgcctcgtcattgctctcctccttcgtcttggaccgcgccggccgcaggttcttgttcatcgtcggtggcgcggcaatgatgatttgtcagttggccatgtcgtgcatcctggcgggccacttcggcaagcagaacgcggtgacgatgccgcgggactacgcggtggccgtgctggtgctcatgtgcctgtacaccttcagcttcggcgtgtcgtgggggccgctcaagtgggtggtgccgagcgagatctaccccgtggagatcaggtcggcggcgcaggcgctgacggtgtccatcgcgctctgcctctcattcgcgcagacgcaggtgttcgtctccctgctctgcgccatgaagcacgccatcttcctgttctacgccggatgggtcctcgtcatgactgccttcatcgccgcgttcctgccggagaccaaaggcgtgccgctggaggccatgcgcgccgtctgggcggggcactggtactggaggaggttcgtcagggacgccaagcaggaggttcaggtgaactgcatgtag

SEQ ID NO: 97249 - protein, 513 aa, Zea mays
MTGGGFAVAEGGHARDDYGGGVTVSVVVTCLMAASCGLIFGYDIGVSGGVTQMESFLAKFFPEVSSGTKDAKHDAYCKYDDQRLTAFTSSLYIAAMLSSLVASRVTRTVGRQAVMLMGGVLFLLGSAINAGAVNVAMLILGRMLLGFGVGFTTQAAPLYLAETSPARWRGAFTAAYSIFQVLGALAATVTNYLTNRVPGWGWRVSLGLAAVPAAIVVLGALLVPDTPSSLVLRGDADGARASLQRLRGPGAETDAELKDIVRAVERARRDDEGAYGRLCAKGYGHYLVMVVAIPSFFDLTGVIVMAVFSPVLFRTVGFSSQKAIFGSVILSLVNLASSLLSSFVLDRAGRRFLFIVGGAAMMICQLAMSCILAGHFGKQNAVTMPRDYAVAVLVLMCLYTFSFGVSWGPLKWVVPSEIYPVEIRSAAQALTVSIALCLSFAQTQVFVSLLCAMKHAIFLFYAGWVLVMTAFIAAFLPETKGVPLEAMRAVWAGHWYWRRFVRDAKQEVQVNCM

SEQ ID NO: 97250 - DNA, 1557 bp, Glycine max
  CDS (1)..(1557)
atgcctgcggtcggaggtataaacaccggagggggcaaggagtaccctggaagcctcactctatttgtgacggtaacatgtatagttgcagccatgggtggtttaatcttcggttacgatatcggaatttcaggtggagtgacgtccatggatccgtttctgctcaagttttttccgtcagtgttccggaagaaaaactccgacaaaacggtgaaccagtactgccaatacgacagccagacactgacgatgttcacgtcgtccttgtacctcgccgctttgctgtcgtcgttggttgccgccaccgtcacgcgtaaattcggccggaaactctccatgcttttcggaggcttgcttttcctcgtcggtgccctcatcaacggtttcgcccaacacgtttggatgttaatcgtgggtcggatcttgctcgggttcggtatcggcttcgccaatcagtctgtgccactctacctatctgaaatggctccatacaaatatagaggagcattgaacattggctttcagttgtccatcactgttggtatccttgtggccaatgtgttgaactatttctttgctaaaatcaaaggtggttggggatggaggttgagtttgggaggtgctatggtccctgcccttataatcacagtaggatcactagtccttccagacactcccaattccatgattgaaaggggtgatcgcgagaaggccaaggctcagcttcagagaattcgcggcatcgacaatgttgatgaagagttcaatgaccttgtggcagcaagtgaatcctctagccaagtggagcacccttggaggaacttgttgcaaagaaagtacagaccccacctcaccatggcagtgttgattccattcttccagcaactcactggaatcaatgtcatcatgttttacgcgccggtcctgttcagctccatcgggtttaaggatgatgctgctctaatgtcagctgtgatcaccggcgttgttaatgttgtcgcaacttgtgtctcaatttatggtgttgacaagtggggtaggagagcccttttccttgaaggtggagtccaaatgctcatttgccaggctgtagttgcagctgcaattggagcaaagtttggaactgatgggaacccaggtgatttgccaaagtggtatgcaattgttgtggttctcttcatttgcatttatgtatcagcatttgcctggtcatggggtcccctaggttggttggtgcctagtgagatctttcccttggagattcgttcagctgctcagagtatcaatgtgtcggtgaacatgcttttcactttcttgattgcacaagtcttcttgacaatgctttgccacatgaagttcggcttgttcctcttctttgccttcttcgtgttgatcatgacattcttcgtctacttcttcttgcccgaaacaaagggcattccaattgaagaaatggggcaggtttggcaggcacaccccttctggtccagattcgtggagcatgatgattatggcaatggtgttgagatgggaaagggagctattaaagaagtgtag

SEQ ID NO: 97251 - protein, 518 aa, Glycine max
MPAVGGINTGGGKEYPGSLTLFVTVTCIVAAMGGLIFGYDIGISGGVTSMDPFLLKFFPSVFRKKNSDKTVNQYCQYDSQTLTMFTSSLYLAALLSSLVAATVTRKFGRKLSMLFGGLLFLVGALINGFAQHVWMLIVGRILLGFGIGFANQSVPLYLSEMAPYKYRGALNIGFQLSITVGILVANVLNYFFAKIKGGWGWRLSLGGAMVPALIITVGSLVLPDTPNSMIERGDREKAKAQLQRIRGIDNVDEEFNDLVAASESSSQVEHPWRNLLQRKYRPHLTMAVLIPFFQQLTGINVIMFYAPVLFSSIGFKDDAALMSAVITGVVNVVATCVSIYGVDKWGRRALFLEGGVQMLICQAVVAAAIGAKFGTDGNPGDLPKWYAIVVVLFICIYVSAFAWSWGPLGWLVPSEIFPLEIRSAAQSINVSVNMLFTFLIAQVFLTMLCHMKFGLFLFFAFFVLIMTFFVYFFLPETKGIPIEEMGQVWQAHPFWSRFVEHDDYGNGVEMGKGAIKEV

SEQ ID NO: 97252 - DNA, 1533 bp, Zea mays
  CDS (1)..(1533)
atgcccggtggcgccttcctcctcaacggcagcggcggcggcatggcggactacggcggcggcctcaccgtccccgtcgtcgtgacctgcctcatggcggcctccggcggcctcatcttcggctacgacattggcatctcaggaggtgtgtcggagatggaggatttcctgaacaagttcttccccgggttgctcaagaggacggcgcgcgccaacaaggacgtgtactgcatttacaacaaccaggcgctgacggccttcacgtcgtcgctgtacgcgttcggcatggtggggacgctgctggcgagccgcgtgacccggcggctggggcggcaggccgtcatgctgatcggcggcggcctgttcttggccggcgccctcgtcaacgccgccgcggccaacatcgccatgctcatcgtcgggaggatgctgctcggcctggggctcggcttctccggccaggccacgccggtgtacctcgccgaggtgtcgcccccgcgctggcgcggcggcttcatctcggccttccccctcttcatcagcgtcgggtacctggtggccaacctcatcaactacggcacctcgcggatcccgggctggggctggcgcctctcgctcggcctcgcctccgtcccggccgccgtcatggtggtcggcgccgcgttcatcccggacacccccagcagcctcgtcctgcgcgggaagcacgacgacgcccgcgccgcgctccagcgggtgcgcggcaagggcgtggacatcggccccgagttcgcggacatcctcgccgcggcggagaacgaccgccggaacgaggagggcgcgttccgccggatcctgcgccgggagtaccggccctacctggtgatggccgcggcgttcccggcgttcctcaacctcacaggggtggccgtcaccgccttcttctcgccgatactgttccggaccgtcggcttcgagagcgacgccgcgctcatgggcgccgtcatcctgggcctcatgaacatcggcggcatcctcgcgtcgggcttcgccatggaccgctacggccggaagctgctcttcatgatcggtggcgcgctcatgttcacgtgccaggtggcgatggcgagcataatcggatcacacctcggcaacgggagcaagatgcccaaggggtacgcggtgacggtgctggtggtggcgctgatcttctcggcgagcttcagctggtcgtggggcgcgctgtactggaccatccccggcgagatataccccgtggaggtgcggtcggcggggcagggcgcggccgtggcgctcaacctggggctcaacttcttgcaggcgcagttcttcctggccatgctgtgctgcttcaagtacggcaccttcctcttctacgcgtcgtggctggttgtcatgaccgccttcgccgtggcgttcgtgccggagaccaagggcgtgccgctcgagtccatggctcacgtcttcgcgcgccactggtactggggcaggttcgtcaaggaccaccagaagttgggcgaagagtccacctag

SEQ ID NO: 97253 - protein, 510 aa, Zea mays
MPGGAFLLNGSGGGMADYGGGLTVPVVVTCLMAASGGLIFGYDIGISGGVSEMEDFLNKFFPGLLKRTARANKDVYCIYNNQALTAFTSSLYAFGMVGTLLASRVTRRLGRQAVMLIGGGLFLAGALVNAAAANIAMLIVGRMLLGLGLGFSGQATPVYLAEVSPPRWRGGFISAFPLFISVGYLVANLINYGTSRIPGWGWRLSLGLASVPAAVMVVGAAFIPDTPSSLVLRGKHDDARAALQRVRGKGVDIGPEFADILAAAENDRRNEEGAFRRILRREYRPYLVMAAAFPAFLNLTGVAVTAFFSPILFRTVGFESDAALMGAVILGLMNIGGILASGFAMDRYGRKLLFMIGGALMFTCQVAMASIIGSHLGNGSKMPKGYAVTVLVVALIFSASFSWSWGALYWTIPGEIYPVEVRSAGQGAAVALNLGLNFLQAQFFLAMLCCFKYGTFLFYASWLVVMTAFAVAFVPETKGVPLESMAHVFARHWYWGRFVKDHQKLGEEST

SEQ ID NO: 97254 - DNA, 1503 bp, Zea mays
  CDS (1)..(1503)
atgggtggcggcagcaacagaggcggcgccggcgccggcgaggagagcggcagcgaccacgacggtgtgctgcggaggccgctgctcaacacggggagctggtaccggatgagctcgcggcagtccagctttgccccggggacctcctccatggccgtcctgcgcgagtcccacgtctccgccttcctctgcacgctcatcgtcgcgctcggccccatccagttcggcttcaccagcggcttctcctccccgacccaggacgccatggttcgggacctcaacctctctatctccgagttctcggcgttcggatcgctgtccaacgtcggcggcatggtcggggcgatcgccagcgggcagatggccgagtacattggccgtaaagggtcgttgatgattgctgcaatcccaaatatcatcggttggcttgcgatctcctttgcaaaagatgcctcatttctatatatgggacgattgcttgaagggtttggtgtcggcatcatatcctacacggtaccggtatacatagcagagatatctcctcagaacatgaggggagctcttggttctgtgaaccagttgtctgtgacctttggcatattcttggcctatttgctcggcatgtttattccttggagacttcttgctgtgatcggagccttgccctgcacaatgttgattcctggactattcttcattccagaatctcccagatggctggcaaagatgaatttgacggaagattgtgagacgtccctacaagtgctgagggggtttgagactgacatcacaacagaagtgaatgatataaagagggcagtggcatcatcaagtaagaggaccacaatcagttttcaagaattaaaccaaaagaaataccgcacgccactacttctagggattggcctacttgtactgcaaaatcttagtggaatcaacggtgtactgttttatgcaagtagcatcttcaaagctgcaggggttacaaacagcgacttggccacctgttcacttggtgctattcaggtccttgctactggagttacaacatggctgttagacagagctggacgacgcatccttctcattatttctacctctggcatgactctatgccttcttgccgtttctgttgtattttttctcaaggataacatttcacaggattctaactcatactacatcttaacaatgatctcccttgttggtattgtgtctttcgtcattaccttctcgtttggtatgggtgccattccatggctcatgatgtctgagatcctcccggttagcatcaagagccttggcggaagcatcgcaacactggccaactggctgacatccttcgccataacaatgacgacgaacttgatgctcacgtggagtgttggaggcacttttctctcgtacatggttgtgagcgccttcaccatcgtttttgttgtcctttgggtgccggagacgaaggggagaactctagaggagatacaattttcgtttcgctga

SEQ ID NO: 97255 - protein, 500 aa, Zea mays
MGGGSNRGGAGAGEESGSDHDGVLRRPLLNTGSWYRMSSRQSSFAPGTSSMAVLRESHVSAFLCTLIVALGPIQFGFTSGFSSPTQDAMVRDLNLSISEFSAFGSLSNVGGMVGAIASGQMAEYIGRKGSLMIAAIPNIIGWLAISFAKDASFLYMGRLLEGFGVGIISYTVPVYIAEISPQNMRGALGSVNQLSVTFGIFLAYLLGMFIPWRLLAVIGALPCTMLIPGLFFIPESPRWLAKMNLTEDCETSLQVLRGFETDITTEVNDIKRAVASSSKRTTISFQELNQKKYRTPLLLGIGLLVLQNLSGINGVLFYASSIFKAAGVTNSDLATCSLGAIQVLATGVTTWLLDRAGRRILLIISTSGMTLCLLAVSVVFFLKDNISQDSNSYYILTMISLVGIVSFVITFSFGMGAIPWLMMSEILPVSIKSLGGSIATLANWLTSFAITMTTNLMLTWSVGGTFLSYMVVSAFTIVFVVLWVPETKGRTLEEIQFSFR

SEQ ID NO: 97256 - DNA, 1611 bp, Zea mays
  CDS (1)..(1611)
atggcagtggcagctccggccgcggtgagcacgggagccgggcagggcaaggagtaccccggcgggctcaccctctacgttctcctcacctgcgccgttgctgccaccggcggccttgtctgcggctacgacatcggcatatccggcggcgtgacatccatggacgcgttcctgcacaagttcttcccgtcggtgtaccgcaaggagcagacggcgcggggaggcggcagccagtactgcaagttcgacagccagctgctgaccgcgttcacgtcgtcgctgtacctggcggcgctcgcggcctccttcttcgtcgcgtccgtggcgcactccctgggccggaaatggtgcatgtttggcggtggcgtctccttcctcgccggcgccgccctcaacgccgccgcgcaggacgtcgccatgctcatcgtcggccgcattcttcttggcatcggcgtcggcttcgctggcctgtccatcccaatctacctgtcggagatggcgccgcaccacctccgaggcacgctaaacatcggcttccagctgatgatcaccgtgggcatcttctccgccaacctcgtcaactacggcgtcgacaagatcagaggcggatggggctggcgtctcagcctcgggctcgccgccgtcccggcggccgtgatcaccgtgggctcgctcttcctccccgacacgccaaactccctcatccgccgcggctaccacgagcaggcgcggcaggtcctcgcccggatccgtggcgcggacgtcgacgtggccgacgaatacggcgacctcgtgtcggccagcgaggcgtccgccgccgtccggcgcccgtggctggacgtcctcgggcgcaggtaccggccgcagctaaccatggccgtcctcgtcccctttttccagcagctcaccggcatcaacgtcatcatgttctacgcgcccgtcctgttcaagacgatcgggctcggaggggacgcgtcgctcatgtcggccgtcatcaccgggctggtcaacatcgtcgcgacgttcgtgtccatcgccaccgtcgacaggctcggccggcgcagcctcttcctgcagggagggtgccagatgctcgtttgccagatcgtcatcggaaccctgatcggcgtccagttcggggcgagcggagacggagccgccatccccaaggcctccgcggccaccgtcgtggcgttcatctgcatctacgtcgcgggcttcgcgtggtcgtggggcccgctcggtgtcctggtgccgagcgagatcttcccgctggagatccgaccggcggggcagggaatcaacgtggccgtcaacatgatgtgcaccttcgccgtcgcgcaggccttcctcccgatgctctgccacttgaggttcggcctcttctacttcttcggcgggtgggtgctcgtgatgacgctgttcgtcgcggccttcctgccggagacgaagggcgtgcccgttgagaagatggggactgtgtggaggacgcactggttctggggaaggttcgttgctgacgctggcatggacggccgcgcgggaaaccgcgactccgccttccacaagggcaaggacattgctatagagagccgtagtcgtcctgtgtag

SEQ ID NO: 97257 - protein, 536 aa, Zea mays
MAVAAPAAVSTGAGQGKEYPGGLTLYVLLTCAVAATGGLVCGYDIGISGGVTSMDAFLHKFFPSVYRKEQTARGGGSQYCKFDSQLLTAFTSSLYLAALAASFFVASVAHSLGRKWCMFGGGVSFLAGAALNAAAQDVAMLIVGRILLGIGVGFAGLSIPIYLSEMAPHHLRGTLNIGFQLMITVGIFSANLVNYGVDKIRGGWGWRLSLGLAAVPAAVITVGSLFLPDTPNSLIRRGYHEQARQVLARIRGADVDVADEYGDLVSASEASAAVRRPWLDVLGRRYRPQLTMAVLVPFFQQLTGINVIMFYAPVLFKTIGLGGDASLMSAVITGLVNIVATFVSIATVDRLGRRSLFLQGGCQMLVCQIVIGTLIGVQFGASGDGAAIPKASAATVVAFICIYVAGFAWSWGPLGVLVPSEIFPLEIRPAGQGINVAVNMMCTFAVAQAFLPMLCHLRFGLFYFFGGWVLVMTLFVAAFLPETKGVPVEKMGTVWRTHWFWGRFVADAGMDGRAGNRDSAFHKGKDIAIESRSRPV

SEQ ID NO: 97258 - DNA, 1596 bp, Zea mays
  CDS (1)..(1596)
atggccggcgggtttggcagcggcggggcagccgccgggagggccgagctctacgagggcaagatcaccggctacttcatcctcgcttgcatcgtcggctccttcggcggatccctcttcggctatgacctcggagtctccagcggcgtgacttccatggacgacttcctggtgaagttcttcccggacgtgtaccggcggaagcaggcgcacctccacgagacggactactgcaagtacgacaaccaggtgctgacgctcttcacctcgtcgctctacttcgcgggcctcgtctccaccttcggcgcctcctacgtgaccaagcgccacggccggcgcgccagcatcatgggtggcgccgccagcttcttcctcggcggcgccatcaacggcgccgccatgaacatcgccatgctcatcgtcggacgcatcctcctcggcgtcggcgtcggcttcgcaaatcaggccgtgcctgtgtacctgtcggagatggcgccggcgcgtctccggggcatgctcaacatcggcttccagctgatgatcaccatcggcatcctggcggcggagctcatcaactacggcaccaacaagatcaaggccgggtacgggtggcgcgtgagcctggcgctggcggcggtgccggcggccatcatcaccctgggctccctcttcctcccggacacccccaactcgctgctggagcggggccacccggaggaggcacgccgcatgctccgccgcatccgcggcacggacgacatcggcgaggagtacgcggacctggtggcggccagcgaggaggcccgccaggtgcgccacccgtggcggaacatcctgcgccgccggtaccgcgcgcagctcaccatggccgtcgcgatccccttcttccagcagctcaaggggatcaacgtcatcatgttctacgcgcccgtgctgttcgacacgctgggattcaagaaagaagccttcctcatgtcctccgtcatcacgggcctcgtcaacgtcttcgccaccgtcgtgtccatcgtcaccgtcgaccgcgtcggccgccgcaagctgttcctccagggcggcgcgcagatgatcgtgtgccagctcatcgtgggcacgctcatcgccgccaaattcgggaccagcggcacgggggacatcgccaagggctacgccgcggtcgtcgtggtcttcatctgcgcctacgtcgccggcttcgcctggtcgtgggggcccctgggctggctcgtgccgtccgagatcttcccgctggagatccccccggcggggcagagcatcaacgtctccgtcaacatgttcttcaccttctgcatcgcgcaggccttcctcaccatgctctgccacttcaagttcggcctcttctacttcttcgccggcggggtcgtcatcatgaccgtcttcatcgccttcttcctgcccgagaccaagaacgtgcccatcgaggagatggtgcttggctggaagtcacactggttctggaaaaggttcatcgccgacgaggacgtgcacgtcggcattggcaacaaccacccgcagacgaccgtggccaaaaacggcagggacaacaagggggccggcgggtga

SEQ ID NO: 97259 - protein, 531 aa, Zea mays
MAGGFGSGGAAAGRAELYEGKITGYFILACIVGSFGGSLFGYDLGVSSGVTSMDDFLVKFFPDVYRRKQAHLHETDYCKYDNQVLTLFTSSLYFAGLVSTFGASYVTKRHGRRASIMGGAASFFLGGAINGAAMNIAMLIVGRILLGVGVGFANQAVPVYLSEMAPARLRGMLNIGFQLMITIGILAAELINYGTNKIKAGYGWRVSLALAAVPAAIITLGSLFLPDTPNSLLERGHPEEARRMLRRIRGTDDIGEEYADLVAASEEARQVRHPWRNILRRRYRAQLTMAVAIPFFQQLKGINVIMFYAPVLFDTLGFKKEAFLMSSVITGLVNVFATVVSIVTVDRVGRRKLFLQGGAQMIVCQLIVGTLIAAKFGTSGTGDIAKGYAAVVVVFICAYVAGFAWSWGPLGWLVPSEIFPLEIPPAGQSINVSVNMFFTFCIAQAFLTMLCHFKFGLFYFFAGGVVIMTVFIAFFLPETKNVPIEEMVLGWKSHWFWKRFIADEDVHVGIGNNHPQTTVAKNGRDNKGAGG

SEQ ID NO: 97260 - DNA, 1521 bp, Zea mays
  CDS (1)..(1521)
atgagcttccgggaccaggagagtggcggggaggatgggggcaggacgtcctccgcctccgacctgcggaagccgctcatcaacaccgggagctggtaccgcatgccgccggcgggtggcgtgatgggctcgcggcaatctagcctcatggagcgattgggctcctctgcgttctctctccgcgacgtcgctatctcggccacgctctgcacgctcattgtcgcgctaggtcccatccagttcggtttcacatgcggctactcctcgcccacgcaggacgccatcattgctgatctcggcctctccctctctgagttctccctcttcggttcattatctaatgtaggggcgatggtaggcgccatctccagtgggcaacttgcagagtatatcggccgcaaggggtctctcatgatcgctgcgattccaaacataattgggtggctcgcgatatcattcgcaaaagattcctctttcttgtttatgggtcggctgctagaaggatttggagtcggtgtaatatcgtatacagtaccggtttatattgcagaaatcgctcctcaggatcagaggggagctcttggttctgtcaatcagctctccgtcacgattggtatattgcttgcctacttgtttggcatgtttgttccctggagaattcttgctgttctaggcattttaccttgttcaatcctgattcctggactgttctttgtgcctgaatccccaaggtggttggcaaaaatggggaagatggaggattttgaatattcattgcaagttctgagaggatttcagacagatatcacagcagaagtaaatgaaataaagagatcattagcatcatcgaggaggaggacaaccataaggttcgctgatatcaaacagaagagatacagtgttccccttgtgataggaatcggtctccttgtcctgcagcagctaagtggtgtcaatggcattctattttatgctgcgagcatcttcaaagctgctggtattacaaacagtaatctagcaacatttggtttaggggctgttcaggtgattgctactggagtgacaacctggttgactgacaaagctggtcgaaggcttcttctcattatttccaccacaggaatggtcattactcttgttattgtttctgtgtcattttttgtgaaggacaacatagctgctggttcgcacttatactctgtaatgagtatgctttcactggctggacttgtggcatttgtgattgcattttctcttggcttgggagcgattccgtggatcattatgtctgagatccttcctgttaacatcaagagccttgctggaagtgttgcgaccctggcgaactggctgacagcatgggccattacaatgacggcaagcctgatgttgaactggagcagtggaggaacatttgctatctacgccgtcgtgtctaccatggccctcattttcgtgtgcttgtgggtgcctgagaccaagggaagaacgctagaggaaatcgccttctcattccgctga

SEQ ID NO: 97261 - protein, 506 aa, Zea mays
MSFRDQESGGEDGGRTSSASDLRKPLINTGSWYRMPPAGGVMGSRQSSLMERLGSSAFSLRDVAISATLCTLIVALGPIQFGFTCGYSSPTQDAIIADLGLSLSEFSLFGSLSNVGAMVGAISSGQLAEYIGRKGSLMIAAIPNIIGWLAISFAKDSSFLFMGRLLEGFGVGVISYTVPVYIAEIAPQDQRGALGSVNQLSVTIGILLAYLFGMFVPWRILAVLGILPCSILIPGLFFVPESPRWLAKMGKMEDFEYSLQVLRGFQTDITAEVNEIKRSLASSRRRTTIRFADIKQKRYSVPLVIGIGLLVLQQLSGVNGILFYAASIFKAAGITNSNLATFGLGAVQVIATGVTTWLTDKAGRRLLLIISTTGMVITLVIVSVSFFVKDNIAAGSHLYSVMSMLSLAGLVAFVIAFSLGLGAIPWIIMSEILPVNIKSLAGSVATLANWLTAWAITMTASLMLNWSSGGTFAIYAVVSTMALIFVCLWVPETKGRTLEEIAFSFR

SEQ ID NO: 97262 - DNA, 1572 bp, Zea mays
  CDS (1)..(1572)
atggcgggcggcggggtggcggcgctgggcgtgaagacggagcgcgcggcgcagtacaaggggcgcatgacgctcgccgtcgccacgacctgcctcgtggccgccgtcgggggcgccatcttcggctacgacatcggcatctccggaggcgtgacatccatggacccattcctggagaaattcttcccggtagtgttccaccggaagaactccggcgggaagaacaactactgtaagtacgacaaccagggactagcggcgttcacatcgtcactctacctcgccggcctcgttgcctccctcgtcgcgtcccccgtgacgaggaactacggccgcaaagctagcattgtctgcggcggcgtgagcttcctcatcggcgcggccctcaacgtggccgccgtgaatctggctatgctcatcctcgggcgcatcatgctcggcgtcggcatcggttttggcaaccaggctgtgccgctgtacctgtcggagatggcgccggcgcacctccgcggcggcctgaacatgatgttccagctcgcgacgacgctgggcatcttcaccgcgaacctgatcaactatggcacgcagaacatcaagccgtgggggtggcggctgtcgctgggcctcgcggcggtgccggcgctgctgatgacgttgggcgggctctttcttccggagactcccaacagcctcattgagcgcgggcgcgtggaggagggtcggcgcgtgctggagcgcatccggggcacggccgacgtggacgccgagttcacggacatggtggaggcgagcgagctggccaacaccgtcgagcacccgttccggaacatcctgcagccgcgcaaccggccgcagctggtgatggccgtgtgcatgccggcgttccagatcctgacgggcatcaactccatcctcttctacgcgccggtcctgttccagagcatgggtttcggcgggaacgcgtccctctactcctccgtgctcaccggcgccgtgctcttctcctcgacgctcatctccatcggcatcgtcgaccgcctcggccgccggaagctcctcatcagcggcgggatccagatgatcgtctgccaggtgatcgtggcggtgatcctgggcgtgaagttcggggcggagaagcaactggcgcggagctactcggtcgcggtggtggtggtgatctgcctgttcgttctggcgttcgggtggtcgtggggcccgctgggatggacggtgccgagcgagatcttcccgctggagacgcggtcggcggggcagagcatcacggtggccgtgaacctgctcttcaccttcgccatcgcgcaggcgttcctgtcgctgctgtgcgccttcaagttcggcatcttcctctttttcgcggggtggatcaccgtcatgaccgtgttcgtctacgtcttcctgccggagaccaagggcgtgcccatcgaagagatggtgctgctatggcggaagcactggttctggaagaaggtcatgccggacatgccgctcgaggatggctggggcgcggctgagggtcatgcggcacctgccagcaacaatcacaagggatga

SEQ ID NO: 97263 - protein, 523 aa, Zea mays
MAGGGVAALGVKTERAAQYKGRMTLAVATTCLVAAVGGAIFGYDIGISGGVTSMDPFLEKFFPVVFHRKNSGGKNNYCKYDNQGLAAFTSSLYLAGLVASLVASPVTRNYGRKASIVCGGVSFLIGAALNVAAVNLAMLILGRIMLGVGIGFGNQAVPLYLSEMAPAHLRGGLNMMFQLATTLGIFTANLINYGTQNIKPWGWRLSLGLAAVPALLMTLGGLFLPETPNSLIERGRVEEGRRVLERIRGTADVDAEFTDMVEASELANTVEHPFRNILQPRNRPQLVMAVCMPAFQILTGINSILFYAPVLFQSMGFGGNASLYSSVLTGAVLFSSTLISIGIVDRLGRRKLLISGGIQMIVCQVIVAVILGVKFGAEKQLARSYSVAVVVVICLFVLAFGWSWGPLGWTVPSEIFPLETRSAGQSITVAVNLLFTFAIAQAFLSLLCAFKFGIFLFFAGWITVMTVFVYVFLPETKGVPIEEMVLLWRKHWFWKKVMPDMPLEDGWGAAEGHAAPASNNHKG

SEQ ID NO: 97264 - DNA, 1509 bp, Zea mays
  CDS (1)..(1509)
atggcgaggagcaggacgtcgggcggcggcgagtacgagagcggcagcgaccacgacggcgcgctgcagaagccgctgctgcccaacagcgggagctggtaccggatggggatggggtcgcgccagtccagcctcaacgccgccggcacctcctccatggccgtcctgcgcgagtcccacgtctccgccttcctctgcacgctcatcgtcgcgctcggccccatccagttcggcttcaccggcggctactcctccccgacgcaggccagcatcatccgggacctcaacctctccatctccgagttctcggtgttcggctcgctgtccaacgtgggcgccatggtcggggcgatcgccagcggccagatggccgagtacgttggccgcaaagggtcgttgatgattgcagcaattccaaacgtcattggttggcttgcgatctcctttgcaaaagactcttcatttctgtatatgggacgcttgcttgaaggattcggtgtcggtatcatttcctatgtggtaccggtatacatagcagagatatctccacaaaacatgagaggggctcttggctctgtgaaccagttatctgtaacccttggtatcatgtttgcctatttgctcggcttgtttgttccttggaggcttcttgcagtaataggaaccttgccctgcatagtgttgatacctggccttttcttcattccggaatctccaagatggctggcaaagatgaatatgatggatgattgcgagacttctctacaagttctgagaggattcgatgctgacatcactgcagaattgaatgatataaagagagcagtaatgtcagcaaacaaaagggctacaattcgtttccaagagttgaaccaaaagaaataccgaacgcccctaattataggaattggtctacttgtgctgcaacagctaagtggaataaatggtatactattttatgcaagtagcatcttcaaagctgccggtctgaaggacagtgacttggacacctttgcacttggagctattcaggttcttgccacttttgttacaaccatgttcttggacagagctgggcggcgaatcctccttattatttcttctgctgggatgactctaagtcttcttgtagttgctattgtattttacatcaaggataatatttcacatgactctgacttgtatgacatcttaagtatggtgtccttggttggtgtcgtggcttatgtcattgccttctccttcggtatgggtgccattccttggatcataatgtctgagatcctcccagttagcatcaagagtcttgcaggaagcttcgcgacccttgccaactggttgacatcctttggaataacaatgacggcaaatttgctgatcagctggagtgctggaggtacgtttacctcctacatgattgtgagtgccttcactctcgtgttcgtaatcgtttgggtgccagagacaaagggaagaaccctcgaagagatacaatggtcgttccgctga

SEQ ID NO: 97265 - protein, 502 aa, Zea mays
MARSRTSGGGEYESGSDHDGALQKPLLPNSGSWYRMGMGSRQSSLNAAGTSSMAVLRESHVSAFLCTLIVALGPIQFGFTGGYSSPTQASIIRDLNLSISEFSVFGSLSNVGAMVGAIASGQMAEYVGRKGSLMIAAIPNVIGWLAISFAKDSSFLYMGRLLEGFGVGIISYVVPVYIAEISPQNMRGALGSVNQLSVTLGIMFAYLLGLFVPWRLLAVIGTLPCIVLIPGLFFIPESPRWLAKMNMMDDCETSLQVLRGFDADITAELNDIKRAVMSANKRATIRFQELNQKKYRTPLIIGIGLLVLQQLSGINGILFYASSIFKAAGLKDSDLDTFALGAIQVLATFVTTMFLDRAGRRILLIISSAGMTLSLLVVAIVFYIKDNISHDSDLYDILSMVSLVGVVAYVIAFSFGMGAIPWIIMSEILPVSIKSLAGSFATLANWLTSFGITMTANLLISWSAGGTFTSYMIVSAFTLVFVIVWVPETKGRTLEEIQWSFR

SEQ ID NO: 97266 - DNA, 1458 bp, Zea mays
  CDS (1)..(1458)
atggacctagaggaccaagaagcgcagaagcctctcctggtcaccgcgcccgggagaatcggtgatggcagtcacttagctgagtccgacgctgccccgtcctcctcttcgattgcggtggtggtcgccagcaccgcagtcgccgtcgccggatccttcgagttcggcatctcggtgggccactcgtcgccttctcagtctggcatcatgcgtgatctcagcctctccttagccgagtactctgtctttggctccatactaaccattggagcaatgctaggagctgttgtcagtggtaccgtggcagaccgagttggtcgaagatctgcaatggcgatatcagatcttctctgcattttcggatatctcttgataatcttttcccagaatttctggtggcttgacattggaaggttctcaattggatgtggaattggccttctttcatatgtggttccagtgtatatatcagagataacaccaaagaatcttagaggaggtttcgcaactgtaaaccagtttatgatatgttgtggggcatcacttgcttatgttctgggaacttttatctcctggcggactttggcaatcattggagtggcaccatgtttgctgcaactggttggccttcttgttactcctgagtccccaagatggctggctaggtttggccacccaggtgcatttgaggcagcattgcagaagctaaggggaaagggaactgatatctctgacgaagcaaaaggaatcaaagattttacagaaaagcttcagcaattaccaaagtcgaagatgttggacctttttcagaaggattatatccgtgctgttacagttggagtagggttaatggtccttcaacagtttgggggagtgaatgccatttgcttttatgccagtgaaatatttgtttcagctggtttctcatcaggaaatacaggaatgctggctatggttgctgttcagattccgatgacaggactaggagtacttctgatggacaaagctggacggaggccacttttgatggtatctgcagctggaacatgcctgggttgcctactagttggattgtcattcttagctaaggaacatcactggggaaaggacctgaacttagtgctggctttggcaggcattctgattttcggtggatcattttcactgggtatgggaggaataccctgggttataatgtcagagatctttcccataaacatgaaaggagcagcaggaagccttgtaacactcgtcagctggcttggctcgtggatagtctcgtacgccttcaacttcctcctggtgtggaactcctacggcacattcttcatctttgcaagcatctgtgggctcacagttgtgtttgtggagcagctagtgccagaaaccaaaggaagaaccctagaggagatccaagcctccatgaactcatccttggcgcccccctctgatatatga

SEQ ID NO: 97267 - protein, 485 aa, Zea mays
MDLEDQEAQKPLLVTAPGRIGDGSHLAESDAAPSSSSIAVVVASTAVAVAGSFEFGISVGHSSPSQSGIMRDLSLSLAEYSVFGSILTIGAMLGAVVSGTVADRVGRRSAMAISDLLCIFGYLLIIFSQNFWWLDIGRFSIGCGIGLLSYVVPVYISEITPKNLRGGFATVNQFMICCGASLAYVLGTFISWRTLAIIGVAPCLLQLVGLLVTPESPRWLARFGHPGAFEAALQKLRGKGTDISDEAKGIKDFTEKLQQLPKSKMLDLFQKDYIRAVTVGVGLMVLQQFGGVNAICFYASEIFVSAGFSSGNTGMLAMVAVQIPMTGLGVLLMDKAGRRPLLMVSAAGTCLGCLLVGLSFLAKEHHWGKDLNLVLALAGILIFGGSFSLGMGGIPWVIMSEIFPINMKGAAGSLVTLVSWLGSWIVSYAFNFLLVWNSYGTFFIFASICGLTVVFVEQLVPETKGRTLEEIQASMNSSLAPPSDI

SEQ ID NO: 97268 - DNA, 1458 bp, Zea mays
  CDS (1)..(1458)
atgcggtggaagcttaactcctccgtctacaagcgcgtgccgtccagggaaaccgccatggaacccgacgtcgagacgccaatgagaatgacggacggcggcggcagcggcgcggggccgtcgtggcgcatgtcgttgccgcatgtctgtgtcgccacgctcacctcgttcctctttggataccactccggggtggtgaacgagcccttggaggtcatctccgctgaccttggcttcgccggcaacactcttgctgaagggctcgtggtgagtatctgtttgggaggagcttttgttgggtgcctcttcagcggctccatcgcagatggtattgggcgacgccgtgcgttccagctcagtgcgctgcctatgattattggtgctgccataagtgctctctccaatagtttggagggtatgctccttggaagatttttggtaggaacagggatgggattgggtccaccagtagcttcactttatataacggaggtttctccttctacagtgaggggtacatatggtagctttgttcagattgcaacctgccttggaattatagtatcactactcattggtacacctgtcaaagatattgatagatggtggagagtgtgtttctgggttgccgttatcccagcaactttacaagctctcggtatggagttttgtgctgagagccctcagtggctttataagtgtggaaaaataagtgaagcagagatgcaatttgaaaagcttttaggtccccttcatgtaaaatctgccatggcagaactttctagatatgaaagagtagatgatggagaaagtgtcaagtactcagagttgttctatggtcgccacttcaatgttgtttttattggcacaacgctctttgctttacaacagttatccggcataaattctgtgttctatttctcatcaactgtattcagaagtgtgggggtgccctctaaccttgccaacatatgcatggggatttctaatctatcaggatcaattgtagcaatgcttctaatggacaagctaggtagaaaagtgcttctttcagggagttttcttgggatggcttttgcaatggggcttcaggctgttggagcaaaccgtcagtatcttggttctgcatgtgtatatctttcagttggtggcattctgttgtttgtcttgtcattttcactaggagcaggccctgtcccaggacttcttttgcctgagattttccctaataaaatccgagctaaggctatggctctctgcatgtctgtacattggatcgtgaacttctttgttagtttgatgttcttgcgtcttctggagcaacttggtccacagcttctctacacaatattttcgtcagtctgtgtggtagcctcaatatttgtgaggcgccatgtgttggagacgaagggaaagactttacaagagatagaggtttcactcctgcaaccacaataa

SEQ ID NO: 97269 - protein, 485 aa, Zea mays
MRWKLNSSVYKRVPSRETAMEPDVETPMRMTDGGGSGAGPSWRMSLPHVCVATLTSFLFGYHSGVVNEPLEVISADLGFAGNTLAEGLVVSICLGGAFVGCLFSGSIADGIGRRRAFQLSALPMIIGAAISALSNSLEGMLLGRFLVGTGMGLGPPVASLYITEVSPSTVRGTYGSFVQIATCLGIIVSLLIGTPVKDIDRWWRVCFWVAVIPATLQALGMEFCAESPQWLYKCGKISEAEMQFEKLLGPLHVKSAMAELSRYERVDDGESVKYSELFYGRHFNVVFIGTTLFALQQLSGINSVFYFSSTVFRSVGVPSNLANICMGISNLSGSIVAMLLMDKLGRKVLLSGSFLGMAFAMGLQAVGANRQYLGSACVYLSVGGILLFVLSFSLGAGPVPGLLLPEIFPNKIRAKAMALCMSVHWIVNFFVSLMFLRLLEQLGPQLLYTIFSSVCVVASIFVRRHVLETKGKTLQEIEVSLLQPQ

SEQ ID NO: 97270 - DNA, 1572 bp, Zea mays
  CDS (1)..(1572)
atggccggcggtggcatcgtgaacacgggcggtggcaaggactaccccggcaagctcaccctcttcgtgttgctcacctgcatcgtcgccgccaccggcggtctcatcttcggatatgacatcggtatctcaggcggcgtgacgtccatgaacccgttcctggagaagttcttcccggaggtgtaccggaagaagcaggaggccaagacgaaccagtactgcaagtacgacaaccagctgctgcagaccttcacctcctccctctacctggccgcgctggtcgcctccttcttcgccgccaccgtcacccgcgccgtcggccgcaagtggtccatgctcgtcggcggcctcaccttcctcgtcggagccgccctcaacggcgccgcccagaacatcgccatgctcatcatcggacgcatccttctcggcgtcggcgtcggcttcgcaaatcagtccgtgcctgtgtacctgtcggagatggcgccggcgcgtctccggggcatgctcaacatcggcttccagctgatgatcaccatcggcatcctggcggcggagctcatcaactacggcaccaacaagatcaaggccgggtacgggtggcgcgtgagcctggcgctggcggcggtgccggcggccatcatcaccctgggctccctcttcctcccggacacccccaactcgctgctggagcggggccacccggaggaggcacgccgcatgctccgccgcatccgcggcacggacgacatcggcgaggagtacgcggacctggtggcggccagcgaggaggcccgccaggtgcgccacccgtggcggaacatcctgcgccgccggtaccgcgcgcagctcaccatggccgtcgcgatccccttcttccagcagctcacggggatcaacgtcatcatgttctacgcgcccgtgctgttcgacacgctgggattcaagaacgacgcctccctcatgtcctccgtcatcacgggcctcgtcaacgtcttcgccaccgtcgtgtccatcgtcaccgtcgaccgcgtcggccgccgcaagctgttcctccagggcggcgcgcagatgatcgtgtgccagctcatcgtgggcacgctcatcgccgccaagttcgggaccagcggcacgggggacatcgccaagggctacgccgcggtcgtcgtggtcttcatctgcgcctacgtcgccggcttcgcctggtcgtgggggcccctgggctggctcgtgccgtccgagatcttcccgctggagatccgcccggcggggcagagcatcaacgtctccgtcaacatgttcttcaccttctgcatcgcgcaggccttcctcaccatgctctgccacttcaagttcggcctcttctacttcttcgccggctgggtcgtcatcatgaccgtcttcatcgccttcttcctgcccgagaccaagaacgtgcccatcgaggagatggtgcttgtctggaagtcacactggttctggaaaaggttcatcgccgacgaggacgtgcacgtcggcattggcaacaaccacccggccaaaaacggcagcgacaccaagggggccgacgcgtga

SEQ ID NO: 97271 - protein, 523 aa, Zea mays
MAGGGIVNTGGGKDYPGKLTLFVLLTCIVAATGGLIFGYDIGISGGVTSMNPFLEKFFPEVYRKKQEAKTNQYCKYDNQLLQTFTSSLYLAALVASFFAATVTRAVGRKWSMLVGGLTFLVGAALNGAAQNIAMLIIGRILLGVGVGFANQSVPVYLSEMAPARLRGMLNIGFQLMITIGILAAELINYGTNKIKAGYGWRVSLALAAVPAAIITLGSLFLPDTPNSLLERGHPEEARRMLRRIRGTDDIGEEYADLVAASEEARQVRHPWRNILRRRYRAQLTMAVAIPFFQQLTGINVIMFYAPVLFDTLGFKNDASLMSSVITGLVNVFATVVSIVTVDRVGRRKLFLQGGAQMIVCQLIVGTLIAAKFGTSGTGDIAKGYAAVVVVFICAYVAGFAWSWGPLGWLVPSEIFPLEIRPAGQSINVSVNMFFTFCIAQAFLTMLCHFKFGLFYFFAGWVVIMTVFIAFFLPETKNVPIEEMVLVWKSHWFWKRFIADEDVHVGIGNNHPAKNGSDTKGADA

SEQ ID NO: 97272 - DNA, 1602 bp, Zea mays
  CDS (1)..(1602)
atggcgggcgccggggcagcggccaatggcggcaggaacaagtacgcggttctcgatcggagcgaggagcgacagacggacgctaggacggagcggcggaggaggccgttggcgcccgagagcgagagggggagaagggagcggttcgtgtacgcctgcgcggtcttcgcctccctcaacgccgtcctgctcggctacgatgttggcgtaatgagtggcgcgatcatctacatgcagaaagacctccacataaccgagtttcagcaagaaatcctagtaggctgtctgagcgtggtctcactcttgggaagcctatcaggggggcgaacatctgacgcaattggcagaaaatggacaatgggcctcggtgcaattgtgttccagataggcgcgaccatcatgacgtttgctccatcattcactgtgcttatgatagggaggctccttgctggggttggcattggctttggtgccatggtatctggagtgtacattgctgagatctcccccgcaggtgcccgagggacgctcacatcccttcctgagatctgcatcaattttgggatccttcttggctacgtttccaattatgccttctcaggcctttctgagcacatcaattggaggattatgcttggtgtcggtatcctcccatcagtcttcattggctttgcgcttttcgtgatcccggagtcccctaggtggttgatgatggagaagagagtttcagaagcaagggcagtgctgctgcagattagcgagtctgaagctgaagctgaagaacggctggctgagatcgaggaagccgcaggtctgatgaaatcaatgaaatctgaggacaaagaagtgtggagggaacttttgaacccgtctcccgccgtccgtcggatgctgtacgctggttgcggtattcagttgttccaacagatcacaggaattgatgctactgtctattacagcccaacaattttcaaagatgctggcatcaagtctgatcaggagcttctcgctgcaactgttgctgtgggtttcactaagacagtgttcatcttggttgcaattttcctaattgatagagttggacggaagccacttctttatgtgagcaccattggcatgaccatctgcttatttctcttgggggttgcacttacactgcaaaaccatgcggtggggcttatgtctccacgtgttggtatcgacctagcaattttcgcagtttgtggcaacgtggcattcttttcaattggcatgggaccaatatgttgggtcttgtcctcagaggtatttcctttaagattacgagctcaagggtcagcgcttggtcaagtaggtggtagagtgagcagtggtttggtttccatgtcattcctttctatggcccgtgctatatcagtggcaggaatgttcttcgtctttgctgcaatatccactatctctgtactgtttgtgtacttttgtgtgccagaaacaaaagggaaaacactggagcagatcgaaatgatgtttgaaagtggggacgaatggggaggaggtgaaattgagcttgaggatacacagcatttaataccgagtatcaagaagtctgtgcctcttggttga

SEQ ID NO: 97273 - protein, 533 aa, Zea mays
MAGAGAAANGGRNKYAVLDRSEERQTDARTERRRRPLAPESERGRRERFVYACAVFASLNAVLLGYDVGVMSGAIIYMQKDLHITEFQQEILVGCLSVVSLLGSLSGGRTSDAIGRKWTMGLGAIVFQIGATIMTFAPSFTVLMIGRLLAGVGIGFGAMVSGVYIAEISPAGARGTLTSLPEICINFGILLGYVSNYAFSGLSEHINWRIMLGVGILPSVFIGFALFVIPESPRWLMMEKRVSEARAVLLQISESEAEAEERLAEIEEAAGLMKSMKSEDKEVWRELLNPSPAVRRMLYAGCGIQLFQQITGIDATVYYSPTIFKDAGIKSDQELLAATVAVGFTKTVFILVAIFLIDRVGRKPLLYVSTIGMTICLFLLGVALTLQNHAVGLMSPRVGIDLAIFAVCGNVAFFSIGMGPICWVLSSEVFPLRLRAQGSALGQVGGRVSSGLVSMSFLSMARAISVAGMFFVFAAISTISVLFVYFCVPETKGKTLEQIEMMFESGDEWGGGEIELEDTQHLIPSIKKSVPLG

SEQ ID NO: 97274 - DNA, 1545 bp, Zea mays
  CDS (1)..(1545)
atggcaggcggcgtggtggtgaacgcggccgggggcaagacgtaccccggccgcatgacgccgttcgtgttcttcacctgcctggtggcgtcatcgggcggcctcatcttcgggtacgacatcggcatctccggcggtgtcacgtccatggcgtcgttcctcaaggagttcttcccctccgtgtacgccaaggcggcggcgaacaaggacacgaaccagtactgcaagttcgacagccagctgctgacgctgttcacgtcgtcgctgtacctggcggcgctggcgacgtcgttcgtggcggcgtccgtgacgcgggtgttcgggcgcaagtggtccatgttctgcggcggggtgaccttcctggccgggtcggcgctaaacggcgccgccaccgacgtgatgatgctcatcatgggccgcatcctgctgggcgtgggcgtcggcttcgccaaccagtcggtgccgctgtacctgtcggagatggcgccggcgaagctgcgcggcatgctcaacatcgggttccagctgatgaccaccatcggcatcctggcggcgaacctgatcaacttctggacggcgggcatcgagggcgggtggggctggcgcatcgggctggggctcgcgggcgtgccggcgctcatcatcaccctgggcgcgctggtgctccccgacacgcccaactcccttatcgcccgcgggttcaacgacgacgccaaggcggtgctggtgaagatccgcggcacggacgacgtgcaggacgagtacgacgacatggtggcggcgagcgaggaggcgaacgccatcgagcacccgtggcgcaacatcctggagcgcaggtaccggccgcagctgacggtggcagcgctgatccccttcttccagcagctgacgggcatcaacgtgatcatgttctacgcgccggtgctgttcctgaccatcggcttcggcgacgacgcgtcgctgatggcggccgtcatcacggggctggtcaacatgttcgccaccgtggtgtccatcgtgtgcgtggaccgcctgggccggcgcgcgctgttcctgcagggcggcacgcagatgttcgtctcccagatcgtggtgggcacgctgatcgcgctccagttcggcaccgccggcgtgggcgagatgtcccgctccaacgcctggctgctggtgctcttcatctgcctctacgtcgccgggttcgcctggtcgtgggggccgctgggctggctcgtcccctcggaggtgttcgcgctggaggtccggtcggcggggcagagcatcgccgtgtgcgtcaacatgctgctcaccttcatcatcggccaggccttcctcagcatgctgtgctcgctcaagttcgggctcttctacttcttcgccgggtggatgttcatcatgaccaccttcatcgccctcttcctgccggagaccaagggggtgcccatcgaggagatgaacctcgtctggagccgccactggttctggggcaagtacgtcaacgtcgacacacaacacggcggcgccagcccgagatccaacggcgtctga

SEQ ID NO: 97275 - protein, 514 aa, Zea mays
MAGGVVVNAAGGKTYPGRMTPFVFFTCLVASSGGLIFGYDIGISGGVTSMASFLKEFFPSVYAKAAANKDTNQYCKFDSQLLTLFTSSLYLAALATSFVAASVTRVFGRKWSMFCGGVTFLAGSALNGAATDVMMLIMGRILLGVGVGFANQSVPLYLSEMAPAKLRGMLNIGFQLMTTIGILAANLINFWTAGIEGGWGWRIGLGLAGVPALIITLGALVLPDTPNSLIARGFNDDAKAVLVKIRGTDDVQDEYDDMVAASEEANAIEHPWRNILERRYRPQLTVAALIPFFQQLTGINVIMFYAPVLFLTIGFGDDASLMAAVITGLVNMFATVVSIVCVDRLGRRALFLQGGTQMFVSQIVVGTLIALQFGTAGVGEMSRSNAWLLVLFICLYVAGFAWSWGPLGWLVPSEVFALEVRSAGQSIAVCVNMLLTFIIGQAFLSMLCSLKFGLFYFFAGWMFIMTTFIALFLPETKGVPIEEMNLVWSRHWFWGKYVNVDTQHGGASPRSNGV

SEQ ID NO: 97276 - DNA, 1509 bp, Zea mays
  CDS (1)..(1509)
atggcgaggagcaggacgtcgggcggcggcgagtacgagagcggcagcgaccacgacggctcgctgcagaagccgctgctgcccaacagcgggagctggtaccggatggggatggggtcgcgccagtccagcctcaacgccgccggcacctcctccatggccgtcctgcgcgagtcccacgtctccgccttcctctgcacgctcatcgtcgcgctcggccccatccagttcggcttcaccggcggctactcctccccgacgcaggccagcatcatccgggacctcaacctctccatctccgagttctcggtgttcggctcgctgtccaacgtgggcgccatggtcggggcgatcgccagcggccagatggccgagtacgttggccgcaaagggtcgttgatgattgcagcaattccaaacgtcattggttggcttgcgatctcctttgcaaaagactcttcatttctgtatatgggacgcttgcttgaaggattcggtgtcggtatcatttcctatgtggtaccggtatacatagcagagatatctccacaaaacatgagaggggctcttggctctgtgaaccagttatctgtaacccttggtatcatgtttgcctatttgctcggcttgtttgttccttggaggcttcttgcagtaataggaaccttgccctgcatagtgttgatacctggccttttcttcattccggaatctccaagatggctggcaaagatgaatatgatggatgattgcgagacttctctacaagttctgagaggattcgatgctgacatcactgcagaattgaatgatataaagagagcagtaatgtcagcaaacaaaagggctacaattcgtttccaagagttgaaccaaaagaaataccgaacgcccctaattataggaattggtctacttgtgctgcaacagctaagtggaataaatggtatactattttatgcaagtagcatcttcaaagctgccggtctgaaggacagtgacttggacacctttgcacttggagctattcaggttcttgccacttttgttacaaccatgttcttggacagagctgggcggcgaatcctccttattatttcttctgctgggatgactctaagtcttcttgtagttgctattgtattttacatcaaggataatatttcacatgactctgacttgtatgacatcttaagtatggtgtccttggttggtgtcgtggcttatgtcattgccttctccttcggtatgggtgccattccttggatcataatgtctgagatcctcccagttagcatcaagagtcttgcaggaagcttcgcgacccttgccaactggttgacatcctttggaataacaatgacggcaaatttgctgatcagctggagtgctggaggtacgtttacctcctacatgattgtgagtgccttcactctcgtgttcgtaatcgtttgggtgccagagacaaagggaagaaccctcgaagagatacaatggtcgttccgctga

SEQ ID NO: 97277 - protein, 502 aa, Zea mays
MARSRTSGGGEYESGSDHDGSLQKPLLPNSGSWYRMGMGSRQSSLNAAGTSSMAVLRESHVSAFLCTLIVALGPIQFGFTGGYSSPTQASIIRDLNLSISEFSVFGSLSNVGAMVGAIASGQMAEYVGRKGSLMIAAIPNVIGWLAISFAKDSSFLYMGRLLEGFGVGIISYVVPVYIAEISPQNMRGALGSVNQLSVTLGIMFAYLLGLFVPWRLLAVIGTLPCIVLIPGLFFIPESPRWLAKMNMMDDCETSLQVLRGFDADITAELNDIKRAVMSANKRATIRFQELNQKKYRTPLIIGIGLLVLQQLSGINGILFYASSIFKAAGLKDSDLDTFALGAIQVLATFVTTMFLDRAGRRILLIISSAGMTLSLLVVAIVFYIKDNISHDSDLYDILSMVSLVGVVAYVIAFSFGMGAIPWIIMSEILPVSIKSLAGSFATLANWLTSFGITMTANLLISWSAGGTFTSYMIVSAFTLVFVIVWVPETKGRTLEEIQWSFR

SEQ ID NO: 97278 - DNA, 1620 bp, Zea mays
  CDS (1)..(1620)
atgatgcgctgcgctgcaacgggcggcgggtgcgtcgcttcgtggagcggcgattggagattgccggcggtcaacccctgcagcgtgcggatgccgacgggcaacgatgggtggtgcgccggcctgaggtcgcgggcggcggatctcgccggcctcgagatggccaacctgcgcggcggcgtcggggggctcttccgcgcgagcccgcgctacgggcgcttgcaagccacggcggcagttgaccctgaagatattccattggagaaggttcaagttaaatcctcaggacatgttctgccatatgttggcgttgcttgtttgggggctattctgtttggttaccatcttggtgtggtcaatggcgcacttgaatatctcgcgaaggatcttgggattgctgaaaatgctgtcttgcaggggtgggtggttagcacatccttggctggtgcaacactaggttcttttactgggggttctttggcagataaatttgggcggacaagaacattcatcctggatgcagtcccacttgctctaggtgcattcttgagtgcaacagctcaagatatccgcacaatgattattggccgattgcttgctggaattggtatcggggtctcatctgctcttgtacccctttacatatctgagatctcaccaactgaaattcgtggaacacttggtaccgttaatcaactttttatttgcattggaattcttgcagctttgttagctggattgcctctggcaggaaatcctgcctggtggaggacaatgtttggaattgctgtagttccatccattctgctggctgtaggaatggccttttcgcctgaaagccctcgttggctattccagcaaggaaaggttactcaagcagaattagctgtaaaaagactgtatggaaaagaaatggttaccgaaattatgtttgatctgagagctagtggccaaagttcttcggagtccgaagccggctggtttgatcttttcagcaagcgttactggaaagttgtgagtgtgggggcagcactgtttttgttccagcagcttgctggtataaacgctgttgtatattactctacatcggtgttccgtagtgcaggcattgcatctgatgttgctgctagtgctcttgttggagcagccaatgtttttggtactatggttgcatcttctctaatggacaaacaaggaaggaaaagccttctgataacaagcttttctggaatgggtgcttcaatgctactcctagcattgtccttcacctggaaagctctggcaccttattctggtactcttgctgtcgttggcactgttctgtacgtgctgtcatttgctctaggagcgggccctgttccagcgctacttcttcctgaaatatttgcctcgagaataagggccaaggctgtcgcattatctctaggcatgcactgggtatctaactttttcattggcctgtacttcctgagtgtcgtcagcaagtttgggatcagcaacgtgtatctgggatttgcatcagtatgtgcccttgcagttctgtacatagctgggaatgtggtcgagaccaaggggagatcacttgaagagattgaaagggagttaagtgtagcagaatga

SEQ ID NO: 97279 - protein, 539 aa, Zea mays
MMRCAATGGGCVASWSGDWRLPAVNPCSVRMPTGNDGWCAGLRSRAADLAGLEMANLRGGVGGLFRASPRYGRLQATAAVDPEDIPLEKVQVKSSGHVLPYVGVACLGAILFGYHLGVVNGALEYLAKDLGIAENAVLQGWVVSTSLAGATLGSFTGGSLADKFGRTRTFILDAVPLALGAFLSATAQDIRTMIIGRLLAGIGIGVSSALVPLYISEISPTEIRGTLGTVNQLFICIGILAALLAGLPLAGNPAWWRTMFGIAVVPSILLAVGMAFSPESPRWLFQQGKVTQAELAVKRLYGKEMVTEIMFDLRASGQSSSESEAGWFDLFSKRYWKVVSVGAALFLFQQLAGINAVVYYSTSVFRSAGIASDVAASALVGAANVFGTMVASSLMDKQGRKSLLITSFSGMGASMLLLALSFTWKALAPYSGTLAVVGTVLYVLSFALGAGPVPALLLPEIFASRIRAKAVALSLGMHWVSNFFIGLYFLSVVSKFGISNVYLGFASVCALAVLYIAGNVVETKGRSLEEIERELSVAE

SEQ ID NO: 97280 - DNA, 1575 bp, Zea mays
  CDS (1)..(1575)
atggccggcggcgtggtggtgagctccggtgggggcaaggactaccccggcaagctcaccatgttcgtgctcttcgcctgcatcgtcgccgccaccggcggcctcatctttggatacgacatcggcatctctggtggcgtgacgtcgatgaacccgttcctgatgaagttcttcccgtcggtgtaccgcaaggagcaggaggcggagcggaaccagagcaaccagtactgcaagttcgacagccagctgctcaccatgttcacctcctcgctctacctggcggcgctcgtggcctccttcttcgccgccaccgtcacccgcgtggccggccgcaagtggtccatgttcggcggcggcgtcacgttcctggtcggcgccgcgctcaacggcgccgccaaggacgtgggcatgctcatcctcggccgcgtcctcctcggcgtcggcgtcggcttcgccaaccagtccgtgcccgtctacctctcggagatggcgccggcgcgcctccgcgggatgctcaacatcggcttccagctcatggtcaccatcggcatcctctgcgccaacctcatcaactacggcaccgccaagatcaggggcggctggggctggcgcgtcagcctcgcgctcgcggccgtgccggcgggcatcatcgccgtgggcgcgctcttcctgcccgacacacccaactccctcatcgaccgcggctacaccgacgccgccaagcggatgctcaagcgcgtgcggggcaccgacgacgtggaggaggagtacagcgacctggtggccgccagcgacgagtccaagctggtggcgcacccctggcgcaacatcctgcagccgcgctaccgcccgcagctcgtcatggccatcgccatccccatgttccagcagctcacgggcatcaacgtcatcatgttctacgccccggtcctcttcaagacgctgggcttcgcggacgacgcctccctcatgtccgccgtcatcacgggcctcgtcaacgtcttcgccaccttcgtgtccatcgtcaccgtcgaccgcctcggccgacgcaagctgttcctgcagggcggcacccagatgctcgcgtgccagatcgtcgtgggcagactcatcggcgccaattccggcttctccggcgtcgcggagatccccaaggggtacgccgccatcgtcgtgctcttcatctgcgcctacgtggccggcttcgcctggtcctggggccccctcggatggctggtgcccagcgagatcttcccgctggagatccgctcggcggggcagagcatcaacgtgtccgtcaacatgctctgcaccttcatcatcgcgcaggccttcctccccatgctctgccgcttcaagttcatcctcttcttcttcttcggcgcctgggtcgtcgtcatgaccatcttcgtcgcgctcttcctgccggagaccaagaacgtgcccatcgaggagatggggcgggtggggaaggcgcactggtactggggccgcttcatccgcgacgtccacgtgcacgtcggcgccgacctcgagatgccctccgccaacgccaagctcggcggcatgcagtag

SEQ ID NO: 97281 - protein, 524 aa, Zea mays
MAGGVVVSSGGGKDYPGKLTMFVLFACIVAATGGLIFGYDIGISGGVTSMNPFLMKFFPSVYRKEQEAERNQSNQYCKFDSQLLTMFTSSLYLAALVASFFAATVTRVAGRKWSMFGGGVTFLVGAALNGAAKDVGMLILGRVLLGVGVGFANQSVPVYLSEMAPARLRGMLNIGFQLMVTIGILCANLINYGTAKIRGGWGWRVSLALAAVPAGIIAVGALFLPDTPNSLIDRGYTDAAKRMLKRVRGTDDVEEEYSDLVAASDESKLVAHPWRNILQPRYRPQLVMAIAIPMFQQLTGINVIMFYAPVLFKTLGFADDASLMSAVITGLVNVFATFVSIVTVDRLGRRKLFLQGGTQMLACQIVVGRLIGANSGFSGVAEIPKGYAAIVVLFICAYVAGFAWSWGPLGWLVPSEIFPLEIRSAGQSINVSVNMLCTFIIAQAFLPMLCRFKFILFFFFGAWVVVMTIFVALFLPETKNVPIEEMGRVGKAHWYWGRFIRDVHVHVGADLEMPSANAKLGGMQ

SEQ ID NO: 97282 - DNA, 1602 bp, Zea mays
  CDS (1)..(1602)
atgccggcctctgaagaggaattgtcgaactggaaagggctctctcgctgcaggagggggacgaataggatggccggaggcgtcatagttccgagcgatggtcctgccgccgaccacggcgggagcctgacgctgtcggtgttcatgacctgccttgtggctgcctcgggcggcctcatcttcggctacgacatcggcatctcaggcggcgtctcggagatggagccgttcctgcggcgcttcttcccgcgcgtactggagcggatggcgtcggccagggggaacgagtactgcctctacgacagccagacgctgacggccttcacgtcgtcgctgtacgtggccgggctgctggcgtcgctcgtggccagccgcgtgaccagggccatgggccggcaggccgtcatgctcatgggcggcgccctgttcttcgccgggggagccgtgaccggcgccgccgtcaacatcgccatgctcatcgtcggccgcatgctgctcggcttcggcgtcgggttcaccaaccaggccgcccctctgttcctcgccgagatggccccgccgcggtggcgcggctccctgaccgcgggctaccagttcttcctcgcgctcggggtgctgatcgccaacctcgtgaactacgcgacggcacacgcctcctgggggtggcgcgtctcgctgggcctggcgggcgcgtcggccgtcgccatcttcgtgggcgcgctcttcctcaccgacacccccagcagcctcgtgatgcgggggcgcgccgacggggcccgggcggcgctgctccgggtgcgcgggcccgacgccgacgtggaggccgagctcagggacatcgccaaggccgtggaggccgcgcgccgcggcgaggacggcgcgttccgccggatggccacgcggcgcgagtaccgcccgcacctggtgctcgccgtggccgtgcccatgttcttccagctcacgggcgtcatcgtgctcgccttcttcgcgccgctcgtgttccggaccgtcggcttcgggagcagagccgccctcatgggcgccgtcgtactcggcgccgtcaacctgggctcgctcgtgctctccaccttcgtcatcgaccggtacggacggaaggtgctcttcatggccggcggcgtacagatggtcgtctgccaggtcgcgattgcttggatcatgggggcgaagatcggcaagggcggcgaggcggcaatggcgcacccgtacgccgtggcggtgctggtgttcacctgcctgcacactgccgggttcgggtggtcgtggggcccgctggggtgggtgatcccgagcgagatattcccggtggacatccggtcggcagggcaggccatgaacgtctccatcggcctctgcctcacctttgtgcagacgcagtcgttcctcgccatgttttgccgcttcaagtacgccaccttcgcctactacgccgcctgggtcgccgtcatgaccgttttcatcgccctcttcctgccggagaccaagggcatcccgctcgagtccatgggcaccatttgggtgaaacactggtattggaagaggtttgtccacgacggaaagcagagcaacgtggcactgacctaa

SEQ ID NO: 97283 - protein, 533 aa, Zea mays
MPASEEELSNWKGLSRCRRGTNRMAGGVIVPSDGPAADHGGSLTLSVFMTCLVAASGGLIFGYDIGISGGVSEMEPFLRRFFPRVLERMASARGNEYCLYDSQTLTAFTSSLYVAGLLASLVASRVTRAMGRQAVMLMGGALFFAGGAVTGAAVNIAMLIVGRMLLGFGVGFTNQAAPLFLAEMAPPRWRGSLTAGYQFFLALGVLIANLVNYATAHASWGWRVSLGLAGASAVAIFVGALFLTDTPSSLVMRGRADGARAALLRVRGPDADVEAELRDIAKAVEAARRGEDGAFRRMATRREYRPHLVLAVAVPMFFQLTGVIVLAFFAPLVFRTVGFGSRAALMGAVVLGAVNLGSLVLSTFVIDRYGRKVLFMAGGVQMVVCQVAIAWIMGAKIGKGGEAAMAHPYAVAVLVFTCLHTAGFGWSWGPLGWVIPSEIFPVDIRSAGQAMNVSIGLCLTFVQTQSFLAMFCRFKYATFAYYAAWVAVMTVFIALFLPETKGIPLESMGTIWVKHWYWKRFVHDGKQSNVALT

SEQ ID NO: 97284 - DNA, 1458 bp, Zea mays
  CDS (1)..(1458)
atggacctagaggaccaagaagcgcagaagcctctcctggtcaccgcgcccgggagaatcggtgatggcagtcacttagctgagtccgacgctgcctcgtcctcctcttcgattgcggtggtggtcgccagcaccgcagtcgccgtcgccggatccttcgagttcggcatctcggtgggctactcgtcgccttctcagtctggcatcatgcgtgatctcagcctctccttagccgagtactctgtctttggctccatactaaccattggagcaatgctaggagctgttgtcagtggtaccgtggcagaccgagttggtcgaagatctgcaatggcgatatcagatcttctctgcattttcggatatctcttgataaccttttcccagaatttctggtggcttgacattggaaggttctcaattggatgtggaattggccttctttcatatgtggttccagtctatatatcagagataacaccaaagaatcttagaggaggttttgcaactgtaaaccagtttatgatatgttgtggggcatcacttgcttatgttctgggaacttttatcacctggcggactttggcaatcattggagtggcaccatgtttgctgcaactggttggccttcttgttactcctgagtccccaagatggctggctaggtttggccacccaggtgcatttgaggcagcattgcagaagctaaggggaaagggaactgatatctctgacgaagcaacaggaatcaaagattttacagaaaagcttcagcaattaccaaagtcgaagatgttggacctttttcagaaggattatatccgtgctgttacagttggagtagggttaatggtccttcaacagtttgggggagtgaatgccatttgcttttatgcaagtgaaatatttgtttcagctggtttctcatcaggaaatacaggaatgctggctatggttgctgttcagattccgatgacaggactaggagtaattctaatggacaaagctggacggaggccacttttgatggtatctgcagctggaacatgcctgggttgcctactagttggattgtcattcttagctaaggaacatcactggggaaaggacctgaacttagtgctggctttggcaggcattctgattttcggtggatcattttcactgggtatgggaggaataccctgggttataatgtcagagatctttcccataaacatgaaaggagcagcaggaagccttgtaacactcgtcagctggcttggctcgtggatagtttcgtacgccttcaacttcctcctggtgtggaactcctacggcacatttttcatctttgcaagcatatgtgggctcacagttgtgtttgtggagcagctagtgccagaaaccaaaggaagaaccctagaggagatccaagcctccatgaactcatccttggcgtccccctttgatatatga

SEQ ID NO: 97285 - protein, 485 aa, Zea mays
MDLEDQEAQKPLLVTAPGRIGDGSHLAESDAASSSSSIAVVVASTAVAVAGSFEFGISVGYSSPSQSGIMRDLSLSLAEYSVFGSILTIGAMLGAVVSGTVADRVGRRSAMAISDLLCIFGYLLITFSQNFWWLDIGRFSIGCGIGLLSYVVPVYISEITPKNLRGGFATVNQFMICCGASLAYVLGTFITWRTLAIIGVAPCLLQLVGLLVTPESPRWLARFGHPGAFEAALQKLRGKGTDISDEATGIKDFTEKLQQLPKSKMLDLFQKDYIRAVTVGVGLMVLQQFGGVNAICFYASEIFVSAGFSSGNTGMLAMVAVQIPMTGLGVILMDKAGRRPLLMVSAAGTCLGCLLVGLSFLAKEHHWGKDLNLVLALAGILIFGGSFSLGMGGIPWVIMSEIFPINMKGAAGSLVTLVSWLGSWIVSYAFNFLLVWNSYGTFFIFASICGLTVVFVEQLVPETKGRTLEEIQASMNSSLASPFDI

SEQ ID NO: 97286 - DNA, 1533 bp, Zea mays
  CDS (1)..(1533)
atgcccggtggcgccttcctcctcaacggcagcggcggcggcatggcggactacggcggcggcctcaccgtccccgtcgtcgtgacctgcctcatggcggcctccggcggcctcatcttcggctacgacattggcatctcaggaggtgtgtcggagatggaggatttcctgaacaagttcttccccgggttgctcaagaggacggcgcgcgccaacaaggacgtgtactgcatttacaacaaccaggcgctgacggccttcacgtcgtcgctgtacgcgttcggcatggtggggacgctgctggcgagccgcgtgacccggcggctggggcggcaggccgtcatgctgatcggcggcggcctgttcttggccggcgccctcgtcaacgccgccgcggccaacatcgccatgctcatcgtcgggaggatgctgctcggcctggggctcggcttctccggccaggccacgccggtgtacctcgccgaggtgtcgcccccgcgctggcgcggcggcttcatctcggccttccccctcttcatcagcgtcgggtacctggtggccaacctcatcaactacggcacctcgcggatcccgggctggggctggcgcctctcgctcggcctcgcctccgtcccggccgccgtcatggtggtcggcgccgcgttcatcccggacacccccagcagcctcgtcctgcgcgggaagcacgacgacgcccgcgccgcgctccagcgggtgcgcggcaagggcgtggacatcggccccgagttcgcggacatcctcgccgcggcggagaacgaccgccggaacgaggagggcgcgttccgccggatcctgcgccgggagtaccggccctacctggtgatggccgtggcgttcccggtgttcctcaacctcacaggggtggccgtcaccgccttcttctcgccgatactgttccggaccgtcggcttcgagagcgacgccgcgctcatgggcgccgtcatcctgggcctcatgaacatcggcggcatcctcgcgtcgggcttcgccatggaccgctacggccggaagctgctcttcatgatcggtggcgcgctcatgttcacgtgccaggtggcgatggcgagcataatcggatcacacctcggcaacgggagcaagatgcccaaggggtacgcggtgacggtgctggtggtggcgctgatcttctcggcgagcttcagctggtcgtggggcgcgctgtactggaccatccccggcgagatataccccgtggaggtgcggtcggcggggcagggcgcggccgtggcgctcaacctggggctcaacttcttgcaggcgcagttcttcctggccatgctgtgctgcttcaagtacggcaccttcctcttctacgcgtcgtggctggttgtcatgaccgccttcgccgtggcgttcgtgccggagaccaagggcgtgccgctcgagtccatggctcacgtcttcgcgcgccactggtactggggcaggttcgtcaaggaccaccagaagttgggcgaagagtccacctag

SEQ ID NO: 97287 - protein, 510 aa, Zea mays
MPGGAFLLNGSGGGMADYGGGLTVPVVVTCLMAASGGLIFGYDIGISGGVSEMEDFLNKFFPGLLKRTARANKDVYCIYNNQALTAFTSSLYAFGMVGTLLASRVTRRLGRQAVMLIGGGLFLAGALVNAAAANIAMLIVGRMLLGLGLGFSGQATPVYLAEVSPPRWRGGFISAFPLFISVGYLVANLINYGTSRIPGWGWRLSLGLASVPAAVMVVGAAFIPDTPSSLVLRGKHDDARAALQRVRGKGVDIGPEFADILAAAENDRRNEEGAFRRILRREYRPYLVMAVAFPVFLNLTGVAVTAFFSPILFRTVGFESDAALMGAVILGLMNIGGILASGFAMDRYGRKLLFMIGGALMFTCQVAMASIIGSHLGNGSKMPKGYAVTVLVVALIFSASFSWSWGALYWTIPGEIYPVEVRSAGQGAAVALNLGLNFLQAQFFLAMLCCFKYGTFLFYASWLVVMTAFAVAFVPETKGVPLESMAHVFARHWYWGRFVKDHQKLGEEST

SEQ ID NO: 97288 - DNA, 1563 bp, Zea mays
  CDS (1)..(1563)
atggcgatcggggcgttcgtggagggcgctccggcggacggcggagaaggttacagcggccgcgtgacgcccttcgtggtgctgtcctgcgtcgtcgccggcagcggcggcgtcctcttcggatacgacctcggcatctccggtggtcttacctcaatggactgcttcctgaagagattcttcccaaaggtgtaccgtcagaagcaggacagcaaagtgagccactactgcgagttcaacagcgagctcctcaccgtcttcacgtcctccctctatatcgccggccttgttgcaactctggctgcagcaaccatcacaaggaggtatggccgtcgcacatcaatgctgatcggcggcagtgtcttcatcgcgggctcagtgttcggtggtgcagccaccaatattcccatgctcctaatgaacaggattctactggggattggtctggggttcactaatcagtcaatcccattgtacctgtccgaaatggcgccaccccaataccgcggggcaatcaacaacggcttcgagctctgcatcagccttggcatcctcttcgcgaacgtgctcaactatttcgtcataaaaatcacagcaggatggggatggaggatatccctgtccatggccgcactgcccgccgcattcctaaccatcggcgcgatcttcctccccgagacgccaagcttcataatccaacgtgacggcaacaacacggacaaggcaagggtgctgctccagaagctgcgcggaacggcctcggtccagaaagagctcgacgacctggtccgtgctagcgacctctcacgagcaacccggtacccattcaggaacatactcgagaggaagtacaggccgcagcttgtggtggcgctgctggtccctttcttcaaccaggttagcgggatcaacgtggtgaacttctacgcgccggtcatgttcaggacgatcggtctcaaggagagcgcgtccctcctgtcctcggtggtgacacgcctgtgcgcgacgtctgccaacgtcgtggcgatggtggtggtcgacagggttgggcgcaggaagctcttccttgccggcggcgtgcagatgatactttcgcagttcaccgtcggcgcgatcctggctgcgaagttcagggactacgaggagatgggtgatgggtacgcgtacctggtgctgaccacactgtgtgtgttcgttgcaggctttgcgtggtcgtggggccctctcaccttcttggtccctgccgaggtctgcccgctggagatcaggtccgcggggcagagcatcgtggtcgctgtggttttcttgatgacgtttgtgattagccagacgtttcttgaggtcctctgccgcatcaagtcggcgacgttcttcgtcttcggtggatggatctgcctgatgacgttgttcgtttatctgttcctgcctgagaccaagaagctgcccatggagcagatggagcaggtatggaagacacactggttctggaagaaggttgtgggagaggaagcggataggaaagaaacaggagcagggaagatagctttgtcgggcttgtcttag

SEQ ID NO: 97289 - protein, 520 aa, Zea mays
MAIGAFVEGAPADGGEGYSGRVTPFVVLSCVVAGSGGVLFGYDLGISGGLTSMDCFLKRFFPKVYRQKQDSKVSHYCEFNSELLTVFTSSLYIAGLVATLAAATITRRYGRRTSMLIGGSVFIAGSVFGGAATNIPMLLMNRILLGIGLGFTNQSIPLYLSEMAPPQYRGAINNGFELCISLGILFANVLNYFVIKITAGWGWRISLSMAALPAAFLTIGAIFLPETPSFIIQRDGNNTDKARVLLQKLRGTASVQKELDDLVRASDLSRATRYPFRNILERKYRPQLVVALLVPFFNQVSGINVVNFYAPVMFRTIGLKESASLLSSVVTRLCATSANVVAMVVVDRVGRRKLFLAGGVQMILSQFTVGAILAAKFRDYEEMGDGYAYLVLTTLCVFVAGFAWSWGPLTFLVPAEVCPLEIRSAGQSIVVAVVFLMTFVISQTFLEVLCRIKSATFFVFGGWICLMTLFVYLFLPETKKLPMEQMEQVWKTHWFWKKVVGEEADRKETGAGKIALSGLS

SEQ ID NO: 97290 - DNA, 24 bp, Artificial sequence
  primer
atgtcacaagacgctgctattgca

SEQ ID NO: 97291 - DNA, 25 bp, Artificial sequence
  primer
ttatttggtgctgaacattctcttg

SEQ ID NO: 97292 - protein, 531 aa, Artificial sequence
  consensus sequence
  Variant (2)..(4): Xaa in position 2 to 4 is any amino acid
  Variant (7)..(9): Xaa in position 7 to 9 is any amino acid
  Variant (11)..(42): Xaa in position 11 to 42 is any amino acid
  Variant (43)..(65): Xaa in position 43 to 65 is any or no amino acid
  Variant (67)..(77): Xaa in position 67 to 77 is any amino acid
  Variant (80)..(106): Xaa in position 80 to 106 is any amino acid
  Variant (107)..(120): Xaa in position 107 to 120 is any or no amino acid
  Variant (123)..(125): Xaa in position 123 to 125 is any amino acid
  Variant (127)..(127): Xaa in position 127 is any amino acid
  Variant (129)..(129): Xaa in position 129 is any amino acid
  Variant (131)..(136): Xaa in position 131 to 136 is any amino acid
  Variant (138)..(141): Xaa in position 138 to 141 is any amino acid
  Variant (143)..(144): Xaa in position 143 to 144 is any amino acid
  Variant (146)..(148): Xaa in position 146 to 148 is any amino acid
  Variant (151)..(156): Xaa in position 151 to 156 is any amino acid
  Variant (158)..(162): Xaa in position 158 to 162 is any amino acid
  Variant (164)..(175): Xaa in position 164 to 175 is any amino acid
  Variant (176)..(198): Xaa in position 176 to 198 is any or no amino acid
  Variant (201)..(215): Xaa in position 201 to 215 is any amino acid
  Variant (217)..(220): Xaa in position 217 to 220 is any amino acid
  Variant (222)..(223): Xaa in position 222 to 223 is any amino acid
  Variant (225)..(226): Xaa in position 225 to 226 is any amino acid
  Variant (228)..(278): Xaa in position 228 to 278 is any amino acid
  Variant (279)..(311): Xaa in position 279 to 311 is any or no amino acid
  Variant (314)..(315): Xaa in position 314 to 315 is any amino acid
  Variant (317)..(317): Xaa in position 317 is any amino acid
  Variant (319)..(322): Xaa in position 319 to 322 is any amino acid
  Variant (324)..(327): Xaa in position 324 to 327 is any amino acid
  Variant (329)..(349): Xaa in position 329 to 349 is any amino acid
  Variant (350)..(357): Xaa in position 350 to 357 is any or no amino acid
  Variant (359)..(368): Xaa in position 359 to 368 is any amino acid
  Variant (372)..(380): Xaa in position 372 to 380 is any amino acid
  Variant (382)..(411): Xaa in position 382 to 411 is any amino acid
  Variant (412)..(432): Xaa in position 412 to 432 is any or no amino acid
  Variant (434)..(446): Xaa in position 434 to 446 is any amino acid
  Variant (448)..(449): Xaa in position 448 to 449 is any amino acid
  Variant (451)..(464): Xaa in position 451 to 464 is any amino acid
  Variant (465)..(465): Xaa in position 465 is any or no amino acid
  Variant (467)..(475): Xaa in position 467 to 475 is any amino acid
  Variant (476)..(480): Xaa in position 476 to 480 is any or no amino acid
  Variant (482)..(512): Xaa in position 482 to 512 is any amino acid
  Variant (513)..(523): Xaa in position 513 to 523 is any or no amino acid
  Variant (528)..(529): Xaa in position 528 to 529 is any amino acid
GXXXFGXXXGXXXXXXXXXXXXXXXXXXXXXXXXXXXXXXXXXXXXXXXXXXXXXXXXXXXXXXXGXXXXXXXXXXXGRXXXXXXXXXXXXXXXXXXXXXXXXXXXXXXXXXXXXXXXXXGRXXXGXGXGXXXXXXPXXXXEXXPXXXRGXXXXXXQXXXXXGXXXXXXXXXXXXXXXXXXXXXXXXXXXXXXXXXXXWRXXXXXXXXXXXXXXXGXXXXPXXPXXLXXXXXXXXXXXXXXXXXXXXXXXXXXXXXXXXXXXXXXXXXXXXXXXXXXXXXXXXXXXXXXXXXXXXXXXXXXXXXXXXXXXXQQXXGXNXXXXYXXXXFXXXXXXXXXXXXXXXXXXXXXXXXXXXXXTXXXXXXXXXXGRRXXXXXXXXXMXXXXXXXXXXXXXXXXXXXXXXXXXXXXXXXXXXXXXXXXXXXXXXXXXXXFXXXXXXXXXXXXXEXXPXXXXXXXXXXXXXXXNXXXXXXXXXXXXXXFXXXXXXXXXXXXXXXXXXXXXXXXXXXXXXXXXXXXXXXXXXETKGXXLE

SEQ ID NO: 97293 - protein, 29 aa, Artificial sequence
  protein pattern
  Variant (2)..(4): Xaa in position 2 to 4 is any amino acid
  Variant (6)..(6): Xaa in position 6 is any amino acid
  Variant (7)..(7): Xaa in position 7 is Ala, Gly or Ser
  Variant (8)..(8): Xaa in position 8 is Ala, Ile, Leu or Val
  Variant (10)..(15): Xaa in position 10 to 15 is any amino acid
  Variant (17)..(19): Xaa in position 17 to 19 is any amino acid
  Variant (20)..(20): Xaa in position 20 is Ala, Gly or Ser
  Variant (22)..(23): Xaa in position 22 to 23 is any amino acid
  Variant (25)..(27): Xaa in position 25 to 27 is any amino acid
RXXXGXXXGXXXXXXPXXXXEXXPXXXRG

SEQ ID NO: 97294 - DNA, 315 bp, Saccharomyces cerevisiae
  CDS (1)..(315)
atgacggattgtcgtttggctggctcaccaactaaacgttctccgtctttagtgaaagccactacagacggagtagttcttgagccttctgcattttcgataattctcggaactttaccttccataatagctaccgcagaattggtagtacctaaatcaataccgataactgcatctggaattttggttgactggaaacgggtcagaatacgaagtatattatgtgctttaaaggctttccatgatggtaacatgttacttgaatttaagttcttaattatgaccagtgaaatagttacaaatgctcttcggtaa

SEQ ID NO: 97295 - protein, 104 aa, Saccharomyces cerevisiae
MTDCRLAGSPTKRSPSLVKATTDGVVLEPSAFSIILGTLPSIIATAELVVPKSIPITASGILVDWKRVRIRSILCALKAFHDGNMLLEFKFLIMTSEIVTNALR

SEQ ID NO: 97296 - DNA, 20 bp, Artificial sequence
  primer
atgacggattgtcgtttggc

SEQ ID NO: 97297 - DNA, 21 bp, Artificial sequence
  primer
ttaccgaagagcatttgtaac

SEQ ID NO: 97298 - DNA, 1695 bp, Saccharomyces cerevisiae; identical to SEQ ID NO: 97134
  CDS (1)..(1695)

SEQ ID NO: 97299 - protein, 564 aa, Saccharomyces cerevisiae; identical to SEQ ID NO: 97135

SEQ ID NO: 97300 - DNA, 1548 bp, Oryza sativa (japonica cultivar-group)
  CDS (1)..(1548)
atggcgggagggttctctgtgtcggggtccggggtggagttcgaggcgaagatcacgccgatcgtcatcatctcctgcatcatggcggccaccggcggcctcatgttcggctacgacgtcggtatctcaggcggagtgacatcgatggatgacttcctgcgcgagttcttcccgacggtgctgaagaagaagcacgaggacaaggagagcaactactgcaagtatgacaaccagggcctgcagctgttcacctcgtcgctgtacctcgccggcctcacggccaccttcttcgcctcctacaccactcgccggctcggccgccgcctcaccatgctcatcgccggcgtcttcttcatcgtcggcgtcatcttcaacggcgccgcccagaacctcgccatgctcatagtcggcaggatcctgctcggctgtggcgtcggctttgccaaccaggccgttccattgttcctgtcggagatcgcgccgacgaggatccgcggcgggctcaacatcctcttccagctcaacgtcaccatcggcatcctcttcgccaacctcgtcaactacggcaccgccaagatccacccgtggggatggcggctgtcgctgtcgctggccggcatcccggcggcgctgctgacgctgggcgcgctgttcgtggtggacacgcccaacagcctgatcgagcgcgggaggctggaggaagggaaggcggtgctgaggaagatccgggggacggacaacgtggagccggagttcaacgagatcgtggaggcgagccgcgtggcgcaggaggtgaagcacccgttccgcaacctgctccagcgccggaaccggccgcagctggtgatcgccgtgctgctgcagatattccagcagttcacgggcatcaacgccatcatgttctacgcgcccgtgctgttcaacacgctcgggttcaagaccgacgcgtcgctctactccgcggtgatcacgggggccgtgaacgtgctgtccacgctggtgtccgtctactcggtggacagggtggggaggcggatgctgctgctggaggccggcgtgcagatgttcctgtcgcaggtggccatcgccgtcgtgctggggatcaaggtgacggaccggtcggacaacctcggccacgggtgggcgatcatggtggtggtgatggtgtgcacgttcgtgtcctccttcgcgtggtcgtggggcccgctcgggtggctcatccccagcgagacgttcccgctggagacgcggtcggcggggcagagcgtcaccgtgtgcgtcaacctgctcttcaccttcgtcatcgcgcaggcgttcctctccatgctctgccacctcaagtacgccatcttcgccttcttctccgcgtgggtcgtcgtcatgtcgctcttcgtgctcttcttcctgcccgagaccaagaacatccccatcgaggagatgaccgagagggtgtggaagcagcactggttctggaagcgcttcatggacgacgccgacaaacaccacgtcgtccccaatggcgggaagagcaacggcgccaccgtttaa

SEQ ID NO: 97301 - protein, 515 aa, Oryza sativa (japonica cultivar-group)
MAGGFSVSGSGVEFEAKITPIVIISCIMAATGGLMFGYDVGISGGVTSMDDFLREFFPTVLKKKHEDKESNYCKYDNQGLQLFTSSLYLAGLTATFFASYTTRRLGRRLTMLIAGVFFIVGVIFNGAAQNLAMLIVGRILLGCGVGFANQAVPLFLSEIAPTRIRGGLNILFQLNVTIGILFANLVNYGTAKIHPWGWRLSLSLAGIPAALLTLGALFVVDTPNSLIERGRLEEGKAVLRKIRGTDNVEPEFNEIVEASRVAQEVKHPFRNLLQRRNRPQLVIAVLLQIFQQFTGINAIMFYAPVLFNTLGFKTDASLYSAVITGAVNVLSTLVSVYSVDRVGRRMLLLEAGVQMFLSQVAIAVVLGIKVTDRSDNLGHGWAIMVVVMVCTFVSSFAWSWGPLGWLIPSETFPLETRSAGQSVTVCVNLLFTFVIAQAFLSMLCHLKYAIFAFFSAWVVVMSLFVLFFLPETKNIPIEEMTERVWKQHWFWKRFMDDADKHHVVPNGGKSNGATV

SEQ ID NO: 97302 - DNA, 1569 bp, Oryza sativa (japonica cultivar-group)
  CDS (1)..(1569)
atggcagctgcaaccgcagctgatgttgccgaggatacggccagtgtgtactccggcaagcttaccctctacgtcttcctcacctgcggcgtcgcggcgaccggcggcctcatcatcggctatgacatcggcatctctggtggtgtgacatcgatggacacgttcctggggaagttcttcccgtcggttctccaccaagaacagacggcgcagggcacaagccagtactgcaagttcaacagccagccgctgaccgcgttcacctcgtcgctgtacctcgcggcgctcgtggcctccttcttcgtcgcgtccttcacgcgcgcgctgggcaggaagtggtccatgttcggcggcggcgtctccttcctcgccggtgccaccctcaacggcgccgcgcggaacgtcgccatgctcatcgtcggccgcatcctcctcggcatcggcgtcgccttctgtggtctgtccactccgatatacttgtctgagatggcgccaccgcggctgcgtggcatgctcaacatcggcctccagctgatgatcaccgtgggcatcttctccgccaatctcgtcaactacggtgcggccaagatcaggggtggctgggggtggcgtgtcagcctcggcctcgctgccgccccggcatgcgtcatcgccgtgggctcgctcttcctcccggactcaccgagctccctcatcaaccgtggccgccacgagcaggcgcggcgggtgctgcggcgcatccgtggcaccgacgaggtggacgacgagtacggcgacctcgtcgcagcagccagcgagatcgaggtgtattccggctgctccgcgagacgacggccgtggcgcgacgtcctgcagcgcaggtaccggccgcagctcgccatggccgtcctcatccccttcttccagcagctcaccggcatcaacgtcatcatgttctacgcgcccgtgctgttcaagaccatcggcctcggaggagacgcgtcgctcatgtcggcggtcatcaccgggctggtcaatatcgttgccacgttcgtgtccatcgccaccgtcgacagccttggccgacgcaagctcttgttccagggaggctgccagatgcttgtgagccaggttatcattggaacgctgatcggtgtggtgtttggtacgagtggcgatggcaacatctcgagggcgttggcggtctgcatcgtggtgttcatctgcgtctacgtcgccggcttcgcttggtcgtggggcccgcttggcgtcctcctgccgagcgagatcttcccgctggaggtccggccggcggggcagagcatcagcgtggccgtgaacatgctctgcacgttcgccgtcgcggaggccttcctcccgatgctctgccacatgaggttcggcctcttctacttctttagcggatgggtgctcgtgatgacgctcttcgtctcggccttcctgcctgagaccaagggcgtgccgatcgagaagatgaccgtcgtgtggagaacgcactggttttggggtagattttactgtaaccaggatgcagatgcacacgttcaagtggcaaacagcaaagtttga

SEQ ID NO: 97303 - protein, 522 aa, Oryza sativa (japonica cultivar-group)
MAAATAADVAEDTASVYSGKLTLYVFLTCGVAATGGLIIGYDIGISGGVTSMDTFLGKFFPSVLHQEQTAQGTSQYCKFNSQPLTAFTSSLYLAALVASFFVASFTRALGRKWSMFGGGVSFLAGATLNGAARNVAMLIVGRILLGIGVAFCGLSTPIYLSEMAPPRLRGMLNIGLQLMITVGIFSANLVNYGAAKIRGGWGWRVSLGLAAAPACVIAVGSLFLPDSPSSLINRGRHEQARRVLRRIRGTDEVDDEYGDLVAAASEIEVYSGCSARRRPWRDVLQRRYRPQLAMAVLIPFFQQLTGINVIMFYAPVLFKTIGLGGDASLMSAVITGLVNIVATFVSIATVDSLGRRKLLFQGGCQMLVSQVIIGTLIGVVFGTSGDGNISRALAVCIVVFICVYVAGFAWSWGPLGVLLPSEIFPLEVRPAGQSISVAVNMLCTFAVAEAFLPMLCHMRFGLFYFFSGWVLVMTLFVSAFLPETKGVPIEKMTVVWRTHWFWGRFYCNQDADAHVQVANSKV

SEQ ID NO: 97304 - DNA, 1536 bp, Oryza sativa (japonica cultivar-group)
  CDS (1)..(1536)
atggcgggaggcggcgtggcggcgctgggggtgaagaaggagcgggcggcggagtacaagggccgcatgacgctcgccgtcggcatggcctgcctcgtcgccgccgtcggcggcgccatcttcggctacgacatcggcatctccgggggagtgacgtccatggatccgttcctcaagaagttcttcccggtggtgttccggaagaagaacgacgacggccagaacaactactgcaagtacgacaaccagggcctctcggcgttcacctcctccctctacctcgccggcctcgtctcctcccttgccgcctcgccggtgacgaggaactacggccgccgcgccagcatcgtctgcggcggcctcagcttcctcgccggcgccacgctcaacgccgccgccgttaacctcgtcatgctcatcctcggccgcatcctgctcggcgtcggcatcggcttcggcaaccaggccgtgccgctgtacctgtcggaaatggcgccggcgcacctccgcggcgcgctgaacatgatgttccagctggcgacgacgctgggcatcttcacggcgaacatgatcaactacgggacgcagcacatcaggccgtgggggtggcggctctcgctggggctcgcggcggcgccggcgctgctgatgaccgtcggcgggctgctcctgccggagacgcccaacagcctgatcgagcgcgggcgcgtcgaggagggccgccgcgtgctggagcgcatccggggcaccgccgacgtggacgccgagttcacggacatggcggaggcgagcgagctcgccaactccatcgagcacccgttccgcaacatcctggagccgcgcaaccggccgcagctggtgatggcggtgtgcatgccggcgttccagatcctgacgggcatcaactccatcctcttctacgcgcccgtgctgttccagagcatgggcttcggcggcagcgcgtcgctctactcctcagtcctcaccggcgccgtcctcttctcctccaccatcatctccatctccaccgtcgaccgcctcggccgccgcaagctcctcatcagcggcggcatccaaatgatcatctgccaggtgatagtggcggtgatcttgggggtgaagttcgggacggacaaggagctgacgaggagctactcgatcgcggtggtggtggtgatctgcctgttcgtgctggcgttcgggtggtcgtgggggccgctggggtggacggtgccgagcgagatcttcccgctggagacgaggtcggcggggcagagcatcacggtggcggtgaacctcttcttcaccttcgtcatcgcgcaggcgttcctgtccctgctctgcgcgctcaagttcggcatcttcctcttcttcgccgggtggatcaccgtcatgaccgtcttcgtccacgtcttcctgccggagaccaagggcgtgcccatcgaggagatggtgctcctatggaggaagcactggttctggaagaaggtcatgcccgacctgccgctcgaggacggcgacagtcatcacaagtga

SEQ ID NO: 97305 - protein, 511 aa, Oryza sativa (japonica cultivar-group)
MAGGGVAALGVKKERAAEYKGRMTLAVGMACLVAAVGGAIFGYDIGISGGVTSMDPFLKKFFPVVFRKKNDDGQNNYCKYDNQGLSAFTSSLYLAGLVSSLAASPVTRNYGRRASIVCGGLSFLAGATLNAAAVNLVMLILGRILLGVGIGFGNQAVPLYLSEMAPAHLRGALNMMFQLATTLGIFTANMINYGTQHIRPWGWRLSLGLAAAPALLMTVGGLLLPETPNSLIERGRVEEGRRVLERIRGTADVDAEFTDMAEASELANSIEHPFRNILEPRNRPQLVMAVCMPAFQILTGINSILFYAPVLFQSMGFGGSASLYSSVLTGAVLFSSTIISISTVDRLGRRKLLISGGIQMIICQVIVAVILGVKFGTDKELTRSYSIAVVVVICLFVLAFGWSWGPLGWTVPSEIFPLETRSAGQSITVAVNLFFTFVIAQAFLSLLCALKFGIFLFFAGWITVMTVFVHVFLPETKGVPIEEMVLLWRKHWFWKKVMPDLPLEDGDSHHK

SEQ ID NO: 97306 - DNA, 1683 bp, Saccharomyces cerevisiae; identical to SEQ ID NO: 96992
  CDS (1)..(1683)

SEQ ID NO: 97307 - protein, 560 aa, Saccharomyces cerevisiae; identical to SEQ ID NO: 96993

SEQ ID NO: 97308 - DNA, 1644 bp, Schizosaccharomyces pombe 972h-
  CDS (1)..(1644)
atgggtaagacattgaccattgtcatgttggtcttcgtgtccatggccggatggatgtttggcgccgataccggttccattggtggtatcaccaacatgagagatttccaatctcgtttcgcagatcggtataatccggtgactgacacgtattcgtattcttcagcgcgacaaggtttaattactggtatggttaacgttggttctatgactggttgtattttgtcttctcctcttatggatcgcattggcaagcgtgtttccattatgttttggactattgtttatttgattggtattattcttcaagttaccgctgtcccatcttgggtccaaatcatggttgctaagatttggactggtcttgccattggtgccttgtctgtgcttgcccccggtttccaatctgaggttgctcccgctacccttcgtggtaccattgtcaccacctatcaattggctgtcactggtggtattttcattgccgcttgtatcaacatgggtactcacaagttgcacaagactgctcaatggcgtgtatccatgggtattaacttgctttggggtattatcatgttcatcggtatttctttccttcctgaatcccctcgttatttgattgctattggtaaagatgaagaggctcttgacattatgtgcaaaaacaacgttcttcctcgtgaacacgaaattattcaaacggaataccatgtcattaaaactgactgtgaagctgaaatggccggtggtcccgctacttggggtgacattctaggtgcggatattcgttatcgtaccttccttggtcttggtgtcatgtctcttcaacaacttaccggtgataactactacttctactatggtttcgaggtgtttgagggtactggtatgaactctccttatctttctgctttgattcttgatgccgttaactttggatgtacgtttggtggtcttttcgtcctagagttctttggtcgtcgtatgccattgattattggtggtgtttggcaatccattactttcttcatttacgcagctgttggtaatcgtgctcttactcgtaagaatggtacctcaaaccatcgtgccggtgccgttatgattgtgttctcatgtcttttcattttcagttttgctcaaacttggggtcctgccgcatacgttatcgttggtgaatcgtatcccattcgttatcgttccaagtgtgctgccgtcgctaccactggtaactggttgtggggtttccttattactttctttactcccttcattagtgactccattggattcaagtatggttatattttcgctgcctgtaatttgtgtgctgcttgtattattttcttgtttgcccatgaaaccaaaggtcttaccttggaagagattaacgaactgtatctctccggcgctaagccctggatgcctaggcccgagaatctcggacaagctgcaaagcaacaacaagaggttcttgaaaaatctcgtggtgttcaaggtgaaagtgccgctcatcttgaaaacgttgacaatgagggtatggaggatacttcgagtaacgacattacatcttctacctcttcttctgaaggccgtgctaagcctgagtctaactatgttgatgaacaagatcgctacgcataa

SEQ ID NO: 97309 - protein, 547 aa, Schizosaccharomyces pombe 972h-
MGKTLTIVMLVFVSMAGWMFGADTGSIGGITNMRDFQSRFADRYNPVTDTYSYSSARQGLITGMVNVGSMTGCILSSPLMDRIGKRVSIMFWTIVYLIGIILQVTAVPSWVQIMVAKIWTGLAIGALSVLAPGFQSEVAPATLRGTIVTTYQLAVTGGIFIAACINMGTHKLHKTAQWRVSMGINLLWGIIMFIGISFLPESPRYLIAIGKDEEALDIMCKNNVLPREHEIIQTEYHVIKTDCEAEMAGGPATWGDILGADIRYRTFLGLGVMSLQQLTGDNYYFYYGFEVFEGTGMNSPYLSALILDAVNFGCTFGGLFVLEFFGRRMPLIIGGVWQSITFFIYAAVGNRALTRKNGTSNHRAGAVMIVFSCLFIFSFAQTWGPAAYVIVGESYPIRYRSKCAAVATTGNWLWGFLITFFTPFISDSIGFKYGYIFAACNLCAACIIFLFAHETKGLTLEEINELYLSGAKPWMPRPENLGQAAKQQQEVLEKSRGVQGESAAHLENVDNEGMEDTSSNDITSSTSSSEGRAKPESNYVDEQDRYA

SEQ ID NO: 97310 - DNA, 1404 bp, Staphylococcus epidermidis ATCC 12228
  CDS (1)..(1404): transl_table=11
atgttgaaacgctttcataaaggcattataattagtctagctatagaaaaaggaatgatacgaatgaaagcaaataagtatttaatctttattttgggagcacttggtggcttattatatggttatgataatggtgtgatttccggtgctttattatttatacataaagacatacctctcaatagtacaactgagggtatcgttgtgtcttcaatgttaattggcgcaatagtcggtgcgggaagcagtgggccacttgctgataaattaggtcgtcgacgtctagtaatgctcatcgctattgtatttattattggggcactgattcttgctgcatcaaccaatttagcattattaattattggacgtttaattattggtttagcagtgggtggttcgatgtctacggtacctgtttatttaagtgaaatggcaccgacagaatatcgtggctcactaggttcacttaatcaactaatgattacaattggtattttagcagcatatttagtcaactatgcatttgcggatattgagggttggcgttggatgctaggattagcagttgttccatcggttattttacttgtgggtatttattttatgcctgagagtccaagatggttacttgaaaatagaaacgaagaagccgctcgtcaagtgatgaagattacttatgacgatagcgaaattgataaagaacttaaagagatgaaagaaattaacgctatctctgaatctacatggacagtcattaaatcaccatggttaggtagaatattaattgtaggttgtatatttgctattttccagcaatttattggtatcaatgcagtcattttctattcatcttcaatctttgctaaggctggactgggtgaagcggcgtctatattaggttcagttggtataggaactattaatgttcttgtaacaatagttgccatttttgtagtagataagattgatcgtaaaaaactacttgttggtggtaatattggtatgattgcctcattattaattatggcaatcttaatttggacaattggaattgcttcatcagcgtggattattattgtttgtttatcattatttattgtattctttgggatttcttggggacctgttctatgggttatgctacctgaattattcccgatgcgcgcacgtggcgctgctacgggcatttcagcgcttgtgctaaatatcggaacgcttatcgtgtcattgttcttcccaatattaagtgatgcattaagtacagaatgggtatttttaatctttgcattcataggtgttttagcgatgattttcgtaattaaattcttaccagaaacacgcggacgtagtttagaagaaatagaatatgaattacgtgaacgtacaggagcaagaactgaataa

SEQ ID NO: 97311 - protein, 467 aa, Staphylococcus epidermidis ATCC 12228
MLKRFHKGIIISLAIEKGMIRMKANKYLIFILGALGGLLYGYDNGVISGALLFIHKDIPLNSTTEGIVVSSMLIGAIVGAGSSGPLADKLGRRRLVMLIAIVFIIGALILAASTNLALLIIGRLIIGLAVGGSMSTVPVYLSEMAPTEYRGSLGSLNQLMITIGILAAYLVNYAFADIEGWRWMLGLAVVPSVILLVGIYFMPESPRWLLENRNEEAARQVMKITYDDSEIDKELKEMKEINAISESTWTVIKSPWLGRILIVGCIFAIFQQFIGINAVIFYSSSIFAKAGLGEAASILGSVGIGTINVLVTIVAIFVVDKIDRKKLLVGGNIGMIASLLIMAILIWTIGIASSAWIIIVCLSLFIVFFGISWGPVLWVMLPELFPMRARGAATGISALVLNIGTLIVSLFFPILSDALSTEWVFLIFAFIGVLAMIFVIKFLPETRGRSLEEIEYELRERTGARTE

SEQ ID NO: 97312 - DNA, 1407 bp, Bacteroides thetaiotaomicron VPI-5482
  CDS (1)..(1407): transl_table=11
atgaagtctacaattaactttggctatcttattttcctttctgttgtagcagctttgggaggatttttgttcggatatgatactgctgttatatccggaacaatcgctcaggttactcaactttttcaactggatacgttgcaacaggggtggtatgtgggatgtgctttaataggttctatcgtcggtgttctttttgccggtatcctgagtgataagctgggacgaaaaatgacgatgattatttcagcgactctgttttctacatcggctttaggttgtgcgatctccgcagacttcacccaattggtagtctatcgtattattggtggagttggtattggtgttgtgtcgattgtttctcctttgtatatatctgaagtggctgtggcacaatatagagggcgtttggtatctttatatcaattggctgtgacagttggatttttaggagcttatttgattaactatcaattgctggcttatgctgaaagtggtaatcagttaagtatggactggttgaataagatatttgttactgaagtctggcgaggaatgttgggaatggaaacattgccggctgtgttattcttcatcattatcttctttattccggagagtcctcgttggctgatcgtaagaggtaaagaagaaaaagctgtcaatatattagaaaggatatataattcagtttcagaggctgcaagtcaattaaaagaaacgaaatctgtattgacgtctgaaacaaaatctgaatgggctatgttaatgaaacccggaatttttaaagcggtcatcattggtgtatgcattgctattttgggacagttcatgggtgtaaatgctgtactttattatggcccttccattttcgaaaacgcaggactttcaggaggagattctttgttttaccaagttctcgtaggactagtcaacactctgaccaccgttcttgctcttgtgatcattgacagggtcggccgcaagcaactggtctattacggagtttcgggtatggttgtctccctcctgctgatcggcgtttacttcctcttcggtgattcctggggagtatccagcctcttcctgcttgttttcttcctgttctatgtattctgctgtgccgtctccatctgtgccgtggtgttcgtgctcctttcggagatgtaccccaccaaggtacgcgggctggcgatgtccattgcaggattcgccctgtggataggaacgtacctgatcggacagttaaccccctggatgctccagaatctcacccccgccggaacattcttcctgttcgcagtcatgtgcgtgccgtatatgctcatcgtatggaaactcgtgccggagaccacaggaaagtcactggaagagattgaaagatactggacccggtcggaacagtag

SEQ ID NO: 97313 - protein, 468 aa, Bacteroides thetaiotaomicron VPI-5482
MKSTINFGYLIFLSVVAALGGFLFGYDTAVISGTIAQVTQLFQLDTLQQGWYVGCALIGSIVGVLFAGILSDKLGRKMTMIISATLFSTSALGCAISADFTQLVVYRIIGGVGIGVVSIVSPLYISEVAVAQYRGRLVSLYQLAVTVGFLGAYLINYQLLAYAESGNQLSMDWLNKIFVTEVWRGMLGMETLPAVLFFIIIFFIPESPRWLIVRGKEEKAVNILERIYNSVSEAASQLKETKSVLTSETKSEWAMLMKPGIFKAVIIGVCIAILGQFMGVNAVLYYGPSIFENAGLSGGDSLFYQVLVGLVNTLTTVLALVIIDRVGRKQLVYYGVSGMVVSLLLIGVYFLFGDSWGVSSLFLLVFFLFYVFCCAVSICAVVFVLLSEMYPTKVRGLAMSIAGFALWIGTYLIGQLTPWMLQNLTPAGTFFLFAVMCVPYMLIVWKLVPETTGKSLEEIERYWTRSEQ

SEQ ID NO: 97314 - DNA, 1713 bp, Magnaporthe grisea 70-15; identical to SEQ ID NO: 96998
  CDS (1)..(1713)

SEQ ID NO: 97315 - protein, 570 aa, Magnaporthe grisea 70-15; identical to SEQ ID NO: 96999

SEQ ID NO: 97316 - DNA, 1584 bp, Gibberella zeae PH-1; identical to SEQ ID NO: 97000
  CDS (1)..(1584)

SEQ ID NO: 97317 - protein, 527 aa, Gibberella zeae PH-1; identical to SEQ ID NO: 97001

SEQ ID NO: 97318 - DNA, 1650 bp, Candida glabrata CBS 138; identical to SEQ ID NO: 97006
  CDS (1)..(1650)

SEQ ID NO: 97319 - protein, 549 aa, Candida glabrata CBS 138; identical to SEQ ID NO: 97007

SEQ ID NO: 97320 - DNA, 1707 bp, Candida glabrata CBS 138; identical to SEQ ID NO: 97008
  CDS (1)..(1707)

SEQ ID NO: 97321 - protein, 568 aa, Candida glabrata CBS 138; identical to SEQ ID NO: 97009

SEQ ID NO: 97322 - DNA, 1692 bp, Candida glabrata CBS 138; identical to SEQ ID NO: 97010
  CDS (1)..(1692)

SEQ ID NO: 97323 - protein, 563 aa, Candida glabrata CBS 138; identical to SEQ ID NO: 97011

SEQ ID NO: 97324 - DNA, 1602 bp, Candida glabrata CBS 138; identical to SEQ ID NO: 97012
  CDS (1)..(1602)

SEQ ID NO: 97325 - protein, 533 aa, Candida glabrata CBS 138; identical to SEQ ID NO: 97013

SEQ ID NO: 97326 - DNA, 1659 bp, Candida glabrata CBS 138; identical to SEQ ID NO: 97014
  CDS (1)..(1659)

SEQ ID NO: 97327 - protein, 552 aa, Candida glabrata CBS 138; identical to SEQ ID NO: 97015

SEQ ID NO: 97328 - DNA, 1650 bp, Candida glabrata CBS 138; identical to SEQ ID NO: 97016
  CDS (1)..(1650)

SEQ ID NO: 97329 - protein, 549 aa, Candida glabrata CBS 138; identical to SEQ ID NO: 97017

SEQ ID NO: 97330 - DNA, 1671 bp, Candida glabrata CBS 138; identical to SEQ ID NO: 97018
  CDS (1)..(1671)

SEQ ID NO: 97331 - protein, 556 aa, Candida glabrata CBS 138; identical to SEQ ID NO: 97019

SEQ ID NO: 97332 - DNA, 1695 bp, Candida glabrata CBS 138; identical to SEQ ID NO: 97020
  CDS (1)..(1695)

SEQ ID NO: 97333 - protein, 564 aa, Candida glabrata CBS 138; identical to SEQ ID NO: 97021

SEQ ID NO: 97334 - DNA, 1668 bp, Candida glabrata CBS 138; identical to SEQ ID NO: 97022
  CDS (1)..(1668)

SEQ ID NO: 97335 - protein, 555 aa, Candida glabrata CBS 138; identical to SEQ ID NO: 97023

SEQ ID NO: 97336 - DNA, 1665 bp, Debaryomyces hansenii CBS767; identical to SEQ ID NO: 97024
  CDS (1)..(1665)

SEQ ID NO: 97337 - protein, 554 aa, Debaryomyces hansenii CBS767; identical to SEQ ID NO: 97025

SEQ ID NO: 97338 - DNA, 1737 bp, Debaryomyces hansenii CBS767; identical to SEQ ID NO: 97026
  CDS (1)..(1737)

SEQ ID NO: 97339 - protein, 578 aa, Debaryomyces hansenii CBS767; identical to SEQ ID NO: 97027

SEQ ID NO: 97340 - DNA, 1602 bp, Yarrowia lipolytica CLIB122; identical to SEQ ID NO: 97028
  CDS (1)..(1602)

SEQ ID NO: 97341 - protein, 533 aa, Yarrowia lipolytica CLIB122; identical to SEQ ID NO: 97029

SEQ ID NO: 97342 - DNA, 1755 bp, Aspergillus nidulans FGSC A4; identical to SEQ ID NO: 97032
  CDS (1)..(1755)

SEQ ID NO: 97343 - protein, 584 aa, Aspergillus nidulans FGSC A4; identical to SEQ ID NO: 97033

SEQ ID NO: 97344 - DNA, 1653 bp, Candida albicans SC5314; identical to SEQ ID NO: 97034
  CDS (1)..(1653): transl_table=12

SEQ ID NO: 97345 - protein, 550 aa, Candida albicans SC5314; identical to SEQ ID NO: 97035

SEQ ID NO: 97346 - DNA, 1623 bp, Candida albicans SC5314; identical to SEQ ID NO: 97038
  CDS (1)..(1623): transl_table=12

SEQ ID NO: 97347 - protein, 540 aa, Candida albicans SC5314; identical to SEQ ID NO: 97039

SEQ ID NO: 97348 - DNA, 1620 bp, Ustilago maydis 521; identical to SEQ ID NO: 97040
  CDS (1)..(1620)

SEQ ID NO: 97349 - protein, 539 aa, Ustilago maydis 521; identical to SEQ ID NO: 97041

SEQ ID NO: 97350 - DNA, 1638 bp, Cryptococcus neoformans var. neoformans B-3501A; identical to SEQ ID NO: 97042
  CDS (1)..(1638)

SEQ ID NO: 97351 - protein, 545 aa, Cryptococcus neoformans var. neoformans B-3501A; identical to SEQ ID NO: 97043

SEQ ID NO: 97352 - DNA, 1662 bp, Strongylocentrotus purpuratus
  CDS (1)..(1662)
atggcatgcgccgcaccaacagcactagctgaatctgaaccagctaacgaaaacgtacctttacttaccgaatatcctgcttatgaccgccctgcacttggtaagatgaccactaaggaaccactggagttaagtggatcaaacggacacaggaacgatagtgaaatggaatcacctaaaccgggaaaggttactggaacattggccttggcctgtgcagcggcagtatgtggctcctcacttcagtttgggtacaacacaggtgtcatcaacgcaccacagaaagtcataacagcgttcatcaatgagacaaatttcaagcggactggcgaggctatggggcaagaacaggtcactttcatctggtcaacggcggtggccatctttgcggtaggaggcatggtgggatcgctatcagcagggttctttgctaactatcttgggaggaagaaaagcatgttggcaaacaacctgattgcctttgtgggagcagctcttatggggttctccaagatggccaactcgtacgagatgctcatcatcggtagattgatcattggtatcaactgtgggctaaacactggttttgtacccctgtatctgtctgagattgctcctttcaatctgagaggagggataggggttctcaatcaagtgggcgtggcaagcggtatcctcctctcacaaatatttggtctaccagtggtccttggtacggagaaatggtggcctctgttgctaggtctgacagccattcctgccgtctatcagctaattgttcttccgttctgtcccgagagtcctcgctatctccttatcaccaaaaacgaagaggaagccagcagaaagagcctggaatggtttcgtaaggatactgacgtagcagcagacatggccgaaatgaaacgagagtacgaggaggagacgaaggagaggagaatcacaatcttagaacttttaaagaagaactcattgcgacggcctcttgtcatcagcatcgtcatgcagctttctcagcagttgtcaggaatcaatgccgtcctgtactactccacttccatcttcatttctgcgggagttgagcctgacatagcaccatatgtaacgctcagtacaggaggagcgatagcattgatggctttagttactgtgcctttgatggaccatgcgggaaggaagacccttcacatgcttggtcttggtcttatgttcatctttgctgtcatcctaaccatcttcctcaacctccaaacggtgtgggcaggatcctcctacatcagtatcctctctgtcatgctctttgttgttgcctttggccttggtcctgcatcgatcccctggctatttgtggctgagctcttctctcaaggaccccgtccagcagcggtcagtgtagccttcatggtcaactggatggccaacttcgttgtaggactcctcttcccactcatgcaggatggccttggatactacgtctttctcatctttgctgccttcctggtcgtcttcttcctcttcacctggaagtttgttcccgagacaaaaaacaagagcttcgaggagatcagcgccctcttcaaatcgaagagccaacgcgaccacgaggctaacggaacgaagaacgtctatgagcagggcggtcttcttgcaaagaactgctga

SEQ ID NO: 97353 - protein, 553 aa, Strongylocentrotus purpuratus
MACAAPTALAESEPANENVPLLTEYPAYDRPALGKMTTKEPLELSGSNGHRNDSEMESPKPGKVTGTLALACAAAVCGSSLQFGYNTGVINAPQKVITAFINETNFKRTGEAMGQEQVTFIWSTAVAIFAVGGMVGSLSAGFFANYLGRKKSMLANNLIAFVGAALMGFSKMANSYEMLIIGRLIIGINCGLNTGFVPLYLSEIAPFNLRGGIGVLNQVGVASGILLSQIFGLPVVLGTEKWWPLLLGLTAIPAVYQLIVLPFCPESPRYLLITKNEEEASRKSLEWFRKDTDVAADMAEMKREYEEETKERRITILELLKKNSLRRPLVISIVMQLSQQLSGINAVLYYSTSIFISAGVEPDIAPYVTLSTGGAIALMALVTVPLMDHAGRKTLHMLGLGLMFIFAVILTIFLNLQTVWAGSSYISILSVMLFVVAFGLGPASIPWLFVAELFSQGPRPAAVSVAFMVNWMANFVVGLLFPLMQDGLGYYVFLIFAAFLVVFFLFTWKFVPETKNKSFEEISALFKSKSQRDHEANGTKNVYEQGGLLAKNC

SEQ ID NO: 97354 - DNA, 1500 bp, Tribolium castaneum
  CDS (1)..(1500)
atgggcaaaggcggcgaaaagttaaatctccaagtggagaacggcgtcgagatcagtgacaaagcagaaggaccggatacaaagcacggtttcaacggcaagctcatctttgccatcattgcgtcagcgctgggctcctccttccagcatgggtacaacacgggagtcatcaacaccccccaaaccgttttagaggaatggatttcgcaagtcgtgggcaaccgcaccggcacccccccgtcggcctcctcggtgacgctcgtctggtccctcgctgtctcaattttctgcgtggggggcatgatcgggggcgtgtgcaccggctacgtggccgacagattcggccgaaaagggggcctcctcctcaacaacatcctcgtcttccttgctaccatctgtctgggctctgctaaagccgcctcgtcccacgagctcctcatcctcggaaggttcctcatcgggataaactcggggctaaacgccggcctcgcccccatgtaccttgccgagatctcccccattaacctgcgaggagccgtcggaagcgtctaccaactggtcatcacaatctcaatccttgtggcgcaagccctagggctcaaatatgtcttggggacccccgaacactggcccgtgctgtttgccctaaccgccgttccggcactgtttcaagtcgtgacgcttccgttatgccccgaatccccaaagtatttgctggcctccaaagggaacgaaatggaagcccagaaagcgctagcttggctcaggggcagtttggccgtccaggaggagatggagcagatgaaagcggagaacgacgcggccaagttgttgccaaaggtcacagtgagggagctgttgacgaatagggcgctcagaatcccgctgattatttgcttatgcgtgatgatagcgcagcaattaagtgggatcaacgctgttattttcttctcgacttcgattttcaaggattcggggctcaaggacgacagtgcgacctttgcaacgatggggatgggggcgattaatgtccttatgacgattgtatccttggtccttgttgagaaagcggggcgaaaaacgctacttctcttcgggtttgggggcatggccattgatactcttctcctaaccatagcaatgaagctaacgaccgtcgagccaaatttgagctacttgtgcatcgtccttgtttttatttacattattatgtttgcctccggacctggttcaatcccttggtttttggtggcggagcttttcaaccaatcggcgaggccgacagccgcatccttggccgtttgtactaattggacggccaactttttggtcggtttggcctttttaccaattacgaacgagattggcccgttcgtcttcataatcttcgtcgttcttaactgcttattcttcctcttcatctacaagaaggtcccagagacgaaaaataaaaccatcgaggagatttcggctctgttcaggcagcagtcgtaccagtaa

SEQ ID NO: 97355 - protein, 499 aa, Tribolium castaneum
MGKGGEKLNLQVENGVEISDKAEGPDTKHGFNGKLIFAIIASALGSSFQHGYNTGVINTPQTVLEEWISQVVGNRTGTPPSASSVTLVWSLAVSIFCVGGMIGGVCTGYVADRFGRKGGLLLNNILVFLATICLGSAKAASSHELLILGRFLIGINSGLNAGLAPMYLAEISPINLRGAVGSVYQLVITISILVAQALGLKYVLGTPEHWPVLFALTAVPALFQVVTLPLCPESPKYLLASKGNEMEAQKALAWLRGSLAVQEEMEQMKAENDAAKLLPKVTVRELLTNRALRIPLIICLCVMIAQQLSGINAVIFFSTSIFKDSGLKDDSATFATMGMGAINVLMTIVSLVLVEKAGRKTLLLFGFGGMAIDTLLLTIAMKLTTVEPNLSYLCIVLVFIYIIMFASGPGSIPWFLVAELFNQSARPTAASLAVCTNWTANFLVGLAFLPITNEIGPFVFIIFVVLNCLFFLFIYKKVPETKNKTIEEISALFRQQSYQ

SEQ ID NO: 97356 - DNA, 1341 bp, Staphylococcus epidermidis RP62A
  CDS (1)..(1341): transl_table=11
atgaaagcaaataagtatttaatctttattttgggagcacttggtggcttattatatggttatgataatggtgtgatttccggtgctttattatttatacataaagacatacctctcaatagtacaactgagggtatcgttgtgtcttcaatgttaattggcgcaatagtcggtgcgggaagcagtgggccacttgctgataaattaggtcgtcgacgtctagtaatgctcatcgctattgtatttattattggggcactgattcttgctgcatcaaccaatttagcattattaattattggacgtttaattattggtttagcagtaggtggttcgatgtctacggtacctgtttatttaagtgaaatggcaccgacagaatatcgtggctcactaggttcacttaatcaactaatgattacaattggtattttagcagcatatttagtcaactatgcatttgcggatattgagggttggcgttggatgctaggattagcagttgttccatcggttattttacttgtgggtatttattttatgcctgagagtccaagatggttacttgaaaatagaaacgaagaagccgctcgtcaagtgatgaagattacttatgacgatagcgaaattgataaagaacttaaagagatgaaagaaattaacgctatctctgaatctacatggacagtcattaaatcaccatggttaggtagaatattaattgtaggttgtatatttgctattttccaacaatttattggtatcaatgcagtcattttctattcatcttcaatctttgctaaggctggactgggtgaagcggcgtctatattaggttcagttggtataggaactattaatgttcttgtaacaatagttgccatttttgtagtagataagattgatcgtaaaaaactacttgttggtggtaatattggtatgattgcctcattattaattatggcaatcttaatttggacaattggaattgcttcatcagcgtggattattattgtttgtttatcattatttattgtattctttgggatttcttggggacctgttctatgggttatgctacctgaattattcccgatgcgcgcacgtggcgctgctacgggcatttcagcgcttgtgctaaatatcggaacgcttatcgtgtcattgttcttcccaatattaagtgatgcattaagtacagaatgggtatttttaatctttgcattcataggtgttttagcgatgattttcgtaattaaattcttaccagaaacacgcggacgtagtttagaagaaatagaatatgaattacgtgaacgtacaggagcaagaactgaataa

SEQ ID NO: 97357 - protein, 446 aa, Staphylococcus epidermidis RP62A
MKANKYLIFILGALGGLLYGYDNGVISGALLFIHKDIPLNSTTEGIVVSSMLIGAIVGAGSSGPLADKLGRRRLVMLIAIVFIIGALILAASTNLALLIIGRLIIGLAVGGSMSTVPVYLSEMAPTEYRGSLGSLNQLMITIGILAAYLVNYAFADIEGWRWMLGLAVVPSVILLVGIYFMPESPRWLLENRNEEAARQVMKITYDDSEIDKELKEMKEINAISESTWTVIKSPWLGRILIVGCIFAIFQQFIGINAVIFYSSSIFAKAGLGEAASILGSVGIGTINVLVTIVAIFVVDKIDRKKLLVGGNIGMIASLLIMAILIWTIGIASSAWIIIVCLSLFIVFFGISWGPVLWVMLPELFPMRARGAATGISALVLNIGTLIVSLFFPILSDALSTEWVFLIFAFIGVLAMIFVIKFLPETRGRSLEEIEYELRERTGARTE

SEQ ID NO: 97358 - DNA, 1398 bp, Rhodococcus sp. RHA1
  CDS (1)..(1398): transl_table=11
atgacgcagatgtccgaaagacacaccgcgaaggtcatcggcgtcaccgtcgccgccgcggtaggtggatttctcttcggtttcgacagctcggtcatcaacggtgccgtcgactccattcagggccacttcgagctcgggtcgttcttcacgggcttcgccgtggcgatcgccctgctcggatgtgctgtgggcgcatggtttgcgggtcgtctcgcggaccgctggggccgcaagaaagtgatgctgctcggttcggtgctgttcgtcgtgtcctcactcggagcgggtctcgcgttcagcgtccccgacctgatgctgtggcgcgtcctcggcggcctcggcatcggtatcgcgtcggtcattgcgcccacgtacatctcggagatcgcgccggcccgctaccgcggcgcattggcgtcgctgcagcagttggccattactctcggcatcttcgccgcgctgctgtcggacgcggtgctgcagaacgccgccggcggcgcctccaacgagttgtggctgaacctcgaagcctggcgctggatgttcatcgtcggtgtggtccccgcggtcgtgtacggcattctcgccctgctcattcccgagtctccgcggtacctcgtgggcaagcacctcgatcaggaggcggccgacatcctcgcgaacatcaccggcgaactcgacccgcacgagcgcgtctccgagatccggctgaccctccgccacgaatcgacggcgtcgttcgacgatattcgcggcccgaagttcgggctgcagcccatcgtctgggtcggcatattcatggccatcttccagcagttcgtgggcatcaacgcgatcttctactactccaccacgctctggaagtcggtgggcttcaccgagaacgagtcgttcaccacgtcggtgatcaccgcgatcatcaacgtgggcatgacgttcgtcgccatcctgttcgtcgaccggatcggcaggcgcatcctgctcatggtcggctcgctcggcatgttcgcgagcctgctcatggccgcaatcgccttctcccaggcgagtggcagcggcgacgacgtcgtgctccccagcccgtggggggcggtcgccctgatcggcgccaacctgttcgtgatcttcttcgcctccacctggggcccggtcatgtgggtgatgctgggcgagatgttccccaacaacatgcgcgcctacgcactcggcatcagcacggcggcgaactggatcgcgaacttcaccgtcacgctggcattcccgccgctcacccgctcggtggggctgtggttcctgtacggactgttcgcgttcttcgcgttgctctccttcttcttcgtccggtcgaaggtccgggagacgaaggggatggagctcgaggagatgcacacctga

SEQ ID NO: 97359 - protein, 465 aa, Rhodococcus sp. RHA1
MTQMSERHTAKVIGVTVAAAVGGFLFGFDSSVINGAVDSIQGHFELGSFFTGFAVAIALLGCAVGAWFAGRLADRWGRKKVMLLGSVLFVVSSLGAGLAFSVPDLMLWRVLGGLGIGIASVIAPTYISEIAPARYRGALASLQQLAITLGIFAALLSDAVLQNAAGGASNELWLNLEAWRWMFIVGVVPAVVYGILALLIPESPRYLVGKHLDQEAADILANITGELDPHERVSEIRLTLRHESTASFDDIRGPKFGLQPIVWVGIFMAIFQQFVGINAIFYYSTTLWKSVGFTENESFTTSVITAIINVGMTFVAILFVDRIGRRILLMVGSLGMFASLLMAAIAFSQASGSGDDVVLPSPWGAVALIGANLFVIFFASTWGPVMWVMLGEMFPNNMRAYALGISTAANWIANFTVTLAFPPLTRSVGLWFLYGLFAFFALLSFFFVRSKVRETKGMELEEMHT

SEQ ID NO: 97360 - DNA, 1551 bp, Bifidobacterium longum DJO10A; identical to SEQ ID NO: 97052
  CDS (1)..(1551): transl_table=11

SEQ ID NO: 97361 - protein, 516 aa, Bifidobacterium longum DJO10A; identical to SEQ ID NO: 97053

SEQ ID NO: 97362 - DNA, 1596 bp, Aspergillus parasiticus
  CDS (1)..(1596)
atggcggtccttcattctggggttgtgtgtctcgatgggtggttttatcttcggttactccaccggtatgtcaacttccctgtggggtacctaccatgcttcgtgctgactttcacctcaggtcaaattgctggctttacgactatgaatgatttcaagatgcgctttgcggaacaacatgcggatggaacatacgctttcagcaacgtgcgcaatggtttgattgtcggtctgttgtccattggtactatgattggcgccctcgtcgccgctcctatcgccgatcgcattggtcgcaaatactctatctccttctggtctgtgattcacatggttggtatcatcattcagatcgccaccgacgacaactgggtccaagttgctatgggtcgttgggtggccggtctggttgtcggcgctctgtccagcatcgtccctatgtaccagagtgaatctgctcctcgtcaggtccgtggtgccatggtcagcgccttccagctgttcgttgcttcggtattttcatctcttatctcgtcaacttcggtaccgaatccatcaacggtaccgcttcctggcgtatcactatgggacatgtgtgcctggcccttgatcttgggtgttggcactctgttccttcccgagtctccccgttatgcctaccgtaacggtcgtgtcgaagaagcccgtgaggttatgtgcaagctttacggcgttggccccaaccaccggtgcatcgcccaggagatgaaggacatgaaggacaagctcgatgaggagaaagctgccggacaggcttggcatttcgaagtcttcactggtcctcgtatgttctaccgtgtagctggaattgctttacagtcactgcagcagctcactggcgccaacttcctcttctactatggtaacaccatcttcacttctaccggtctgaacaacagctacgtcacccagattattctgggtgccgttaacttcggcatgacccttcctggtctctatgttgttgagcacttcggtcgtcgtaatagtctgatggtcggtgcctcctggatgtttatctgcttcatgatctgggcctccatcggtcacttcgccttggacttggagaaccctcccaacacccctcaggcgggtactgccatgattgtcttcacttgcttcttcatcggtggcttcgccaccacctggggacctattgtgtgggctatctgtggtgagatgtaccctgctcgctaccgtgctgtctgcattggtcttgccactgccgccaactggagcctgaacttcctgatctctttcttcaaccccattcatctccagcgctatcgactttgctacggttacgtctttgcaggctgctgcttcgccgccgtgcttgtggtcttcttcttcgtcaacgagacccagggtcgcacccttgaggaagtcgacaccatgtacgtcctccacgtcaagccctggaagagtgccagctggacgccccggagggtatcgtccgtgatctccacggaccccccgcttcccccaagcaggagggtcgggctgagcacagcgagcccgccaccgagatccgcgagtaaatggtatcatgtctga

SEQ ID NO: 97363 - protein, 531 aa, Aspergillus parasiticus
MAVLHSGVVCLDGWFYLRLLHRYVNFPVGYLPCFVLTFTSGQIAGFTTMNDFKMRFAEQHADGTYAFSNVRNGLIVGLLSIGTMIGALVAAPIADRIGRKYSISFWSVIHMVGIIIQIATDDNWVQVAMGRWVAGLVVGALSSIVPMYQSESAPRQVRGAMVSAFQLFVASVFSSLISSTSVPNPSTVPLPGVSLWDMCAWPLILGVGTLFLPESPRYAYRNGRVEEAREVMCKLYGVGPNHRCIAQEMKDMKDKLDEEKAAGQAWHFEVFTGPRMFYRVAGIALQSLQQLTGANFLFYYGNTIFTSTGLNNSYVTQIILGAVNFGMTLPGLYVVEHFGRRNSLMVGASWMFICFMIWASIGHFALDLENPPNTPQAGTAMIVFTCFFIGGFATTWGPIVWAICGEMYPARYRAVCIGLATAANWSLNFLISFFNPIHLQRYRLCYGYVFAGCCFAAVLVVFFFVNETQGRTLEEVDTMYVLHVKPWKSASWTPRRVSSVISTDPPLPPSRRVGLSTASPPPRSASKWYHV

SEQ ID NO: 97364 - DNA, 1711 bp, Amanita muscaria
  CDS (38)..(1600)
ataacctgccccccccaaattttctggcccttgaaccatgcctccagctgctacggggaatggcggcatagatcccaaaaacaaatttactggcatagccatgacagcattcagtgcttttggtggtatcctctacggttacgacactggcattatcagcggtatccttgcgatggacgatttcaagcgtacctttggtcaacaggcttctgatggcacatgttcccttccgctctcaagccaatccctgtttgtctctattctctcagctggaaccttcgtcggagctctctttggtgctcccatgggtgacattatcggcagaaaatggggtatcgtcatagctgctgcgatattctcgatcggtattgccttgcaaacagcctcagtaacggcagctcccttcgtcgttggtcgtgtcttcgccggtcttggtgtcggtctggtttcttgcctggttcctatgtatcagtccgaatgctcaccaaaatggatccgcggtgccgtagtatcattgtaccaatgggccattacgattggaatcttgcttgctgccgtcatcaacaacgccacccaaggccgtagcaaccactctgcctatcaaatccccatttctattcagtttgtctgggcatttatccttgggtttggcatgatgcttttgccggaatccccccgttttctcgttaggcaaggtcgcgacgaagatgctgccctgtccttgtcccgtcttacgaggctctcgcctgatgaccccgttgtcagaaatgaattggccgagattcgcaccaattttgaggctgaactggccctcggtgaaagctcgtacttggattgcttcagaccctcgcacaacaaaattttgttgcgtaccctgactggtattttcattcaagcttggcaacaacttacgggcatcaactttattttctactatggtacacaatacttccagaacgctggcatcaatcaagcattcctcattaccattgccaccggtatcgtcaacgtattcatgacattaccgggcttgtatggtgtcgaacgctatggtcgccgttccctcctccttattggtgcactaggcatgacgatttgcgagtttattgttgctatcgttggtgtcacgatccccgcctcgaatctagcaggtcagagagtgctaattgcattcgtttgcatttacatcgctttcttcgcatctacctggggtcctatgctttgggttatcgttggtgaaatctttcctctacaagtccgtgccaagggcatttcgctttctgttgccagcaactggttgtggaacttcggtattgcctttgctacaccttaccttgtaaatacccaagcgggatcagccggtctcgggtcaaaagtgttcttcatctggggcacaacatgtgcttgctgtcttgtctttacgtacttctgcgtgcccgagaccaagggcttgtctctcgaacagattgacgagatgtatcaggaagtaatgccattaaaatcctaccaataccgccgacgcctcgcgatagaaggcggatttaggacagaaaaggctgatatcatacacgaggaaacggcagaaaaggaaagcgggtaacagtttctacccttgtatcatgtttttctccacgtaattagttcttcagacttgtgatacaaaatgtcatcgtaagttacttgaagccgcccaaaaaaaaaaaaaaaaaaa

SEQ ID NO: 97365 - protein, 520 aa, Amanita muscaria
MPPAATGNGGIDPKNKFTGIAMTAFSAFGGILYGYDTGIISGILAMDDFKRTFGQQASDGTCSLPLSSQSLFVSILSAGTFVGALFGAPMGDIIGRKWGIVIAAAIFSIGIALQTASVTAAPFVVGRVFAGLGVGLVSCLVPMYQSECSPKWIRGAVVSLYQWAITIGILLAAVINNATQGRSNHSAYQIPISIQFVWAFILGFGMMLLPESPRFLVRQGRDEDAALSLSRLTRLSPDDPVVRNELAEIRTNFEAELALGESSYLDCFRPSHNKILLRTLTGIFIQAWQQLTGINFIFYYGTQYFQNAGINQAFLITIATGIVNVFMTLPGLYGVERYGRRSLLLIGALGMTICEFIVAIVGVTIPASNLAGQRVLIAFVCIYIAFFASTWGPMLWVIVGEIFPLQVRAKGISLSVASNWLWNFGIAFATPYLVNTQAGSAGLGSKVFFIWGTTCACCLVFTYFCVPETKGLSLEQIDEMYQEVMPLKSYQYRRRLAIEGGFRTEKADIIHEETAEKESG

SEQ ID NO: 97366 - DNA, 2118 bp, Solanum lycopersicum
  CDS (93)..(1664)
aattcggcacgagttttcttatataaaaaacatatcatcttcttattgttattttaactaccacatttgaagccggaaaacttagtaacacgatggccggtggaggatttacgacctccggtaacggagcacgcatttcgaggctaaaatcacaccaattggttatcatatcttgtattatggctgctaccggaggtctcatgtttggttatgatgttggagtttctggtggtgttacatcaatggatccatttttaaaaaaattctttccaacagtttataagagaacaaaggagccaggattagacagtaattactgtaaatacgataatcaagggttacaattatttacttcatcgttatacctagctggtttaacggcgacgttttttgcttcttacactacaagaaaacttggccggagattaactatgttaatcgccggttgttttttcattattggagttgtactaaatgctgctgctcaagatttagctatgcttattattggaagaattctccttggttgtggcgttggtttcgccaatcaggctgttccattatttttatcagaaatagcacctacaagaattcgtggaggacttaacattttgttccaacttaacgtaactattggtattctttttgccaatctcgtcaactacggaacagccaagattagtggaggatggggatggagattatcattagggttagctggatttccagcagtattgttgactttgggcgcattatttgttgttgaaaccccaaacagtttgattgaaagaggttacttagaagaaggcaaagaagtacttcgaaaaatcagaggtaccgacaacattgaacctgaattcttggaacttgttgaggctagtcgtgttgctaaacaagtcaaacaccctttcagaaatttactccaacgtaaaaatagacctcaattaatcatctctgttgccctccagatattccaacaatttacaggaatcaacgctattatgttctacgcacctgttttattttcaacactagggtttggaaacagcgcagctctttactcagctgtcatcaccggagcagtcaacgttctctccaccgttgtctcagtctactccgttgacaagctcggacgacgagtcctcctcctggaagctggggtccaaatgttactatctcaaataataatcgctataatcctaggtatcaaagttactgatcattcagacaaccttagccatggttggggaatcttcgtagtagttctgatctgtacatatgtatcggctttcgcatggtcatggggcccacttggatggttaattcctagcgagacgttccctttggaaactcgttcagctggtcaaagtgtaacagtgtgtgttaacttgcttttcacgtttgttatggcacaagcatttctctcaatgctttgtcatttcaagtatgggatattcttgttcttctcggggtggatttttgtgatgtcgttgttcgttttcttcttggtgcctgagacgaagaatgttcctattgaggagatgacggagagggtgtggaagcaacattggctgtggaagaggtttatggtgaatgaagatgatgttgatatgattaaaaagaatggacatgctaacggatatgatcccacttctcggttgtaaaataaaaaataaaagaatattagcggtgttttacgttgattttatcatagtaaagatgcgtagaaataaatcaaacatgcaagagagagatcagagtctactgtctagtctagtgatatcgataagtgtttctcacaaaataggtgtgcatttggattttttttactgcttgttttcctcctttatatcgttcaatgtagtagaaattgtttagccaaagtgtaagagatgcaatatggtgataatttatgtaaccatatagcctatgtatattagagatttggtataattcattttgggaaagcactttgatatgtttaatttcttgttatgtatgtatgacaaggtgtctagttataatgataaggcccaatagaggtttgcatgttgagtattgagacacaaaaatgaaaaaaaattacgctcaatgatcttgaaaaaaaaaaaaaaaaaa

SEQ ID NO: 97367 - protein, 523 aa, Solanum lycopersicum
MAGGGFTTSGNGARISRLKSHQLVIISCIMAATGGLMFGYDVGVSGGVTSMDPFLKKFFPTVYKRTKEPGLDSNYCKYDNQGLQLFTSSLYLAGLTATFFASYTTRKLGRRLTMLIAGCFFIIGVVLNAAAQDLAMLIIGRILLGCGVGFANQAVPLFLSEIAPTRIRGGLNILFQLNVTIGILFANLVNYGTAKISGGWGWRLSLGLAGFPAVLLTLGALFVVETPNSLIERGYLEEGKEVLRKIRGTDNIEPEFLELVEASRVAKQVKHPFRNLLQRKNRPQLIISVALQIFQQFTGINAIMFYAPVLFSTLGFGNSAALYSAVITGAVNVLSTVVSVYSVDKLGRRVLLLEAGVQMLLSQIIIAIILGIKVTDHSDNLSHGWGIFVVVLICTYVSAFAWSWGPLGWLIPSETFPLETRSAGQSVTVCVNLLFTFVMAQAFLSMLCHFKYGIFLFFSGWIFVMSLFVFFLVPETKNVPIEEMTERVWKQHWLWKRFMVNEDDVDMIKKNGHANGYDPTSRL

SEQ ID NO: 97368 - DNA, 1853 bp, Nicotiana tabacum
  CDS (103)..(1674)
atttctacagtttacgattacagttctctctcaacttttttcttttttcttgatcatttcttgtgccacaagttgttcttgttttgtgatcagctcagaaagatggctggtggtggtggtattggtcccggcaacgggaaagaatatcccggcaatttaactctttatgttaccgttacgtgcattgtcgctgccatgggtggtctcattttcggttacgatattggaatttctggaggtgtgacatcaatggactcattcttgagcagatttttcccatctgtgttcaggaagcaaaaggcagatgattcaacaaatcaatactgcaaatttgacagccaaacattgacgatgttcacgtcgtcattgtacttggctgctcttttgtcgtctctggtggcatctactgtcaccagaaaacttggacggagactttctatgctctgtggaggtgtcctcttctgtgctggagctttgatcaatggctttgctcagaatgttgctatgctcattgttggtcgtattttactaggttttggtattggattcgccaatcagtctgttccactatacctatctgaaatggctccatacaagtacagaggagcactcaacctaggttttcaactgtccattacaattggtatacttgtagcaaatgtgttgaactatttctttgccaagattcattggggatggagattaagcttaggaggtgctatggtacctgcattgatcatcacaataggctcacttttccttcccgagacaccaaactccatgatcgaacgtggcaatcacgacgaagccaaagctaggcttaaaagaatcagaggcattgatgatgtagacgaagagttcaatgatttagtcgtggcgagtgaggcttctaggaaaattgagaacccttggagaaatttgttgcaaaggaaatataggccacatctcacaatggcaattatgatcccatttttccagcaacttactggaatcaatgtgattatgttctatgcaccagttttgtttaagactattggttttggtgctgatgcttcccttatgtctgctgttattactggtggagtcaatgtacttgcaactgttgtttctatttactatgttgataaattgggaagaagattcttgttccttgaaggtggcattcaaatgctcatctgccaaatagcggtgtcaatttgcatagctataaaatttggagtgaatggaactccaggggatttaccaaagtggtacgcgatagtagtggtgatattcatctgtgtttatgtagctggatttgcttggtcctggggacctctaggatggttggtacctagtgaaattttcccacttgaaattcgatcagctgctcaaagtatcaatgtttcagtgaacatgatcttcacatttatagtggcacaagtattcttgacaatgttgtgtcatttgaagtttggattgttcctcttctttgcattctttgttgtgattatgactgtcttcatttacttcttcttgcctgagacaaagaatatcccaattgaagagatggtgattgtgtggaaagagcattggttctggtctaagttcatgactgaagtggactatcctggaactaggaatggaacaagtgttgaaatgtcaaaagggagtgctggttacaaaatagtatgacctaattaaagaagatgtttggatttattttaattttatttgttgttgtataatgttttagtgggatgatattgttagatttgaactgtttctcttgtctctattgcatagaaaatacatactttactgtgttcaatttcaacctctcaacaattaatataagatttgtcagagcaaaa

SEQ ID NO: 97369 - protein, 523 aa, Nicotiana tabacum
MAGGGGIGPGNGKEYPGNLTLYVTVTCIVAAMGGLIFGYDIGISGGVTSMDSFLSRFFPSVFRKQKADDSTNQYCKFDSQTLTMFTSSLYLAALLSSLVASTVTRKLGRRLSMLCGGVLFCAGALINGFAQNVAMLIVGRILLGFGIGFANQSVPLYLSEMAPYKYRGALNLGFQLSITIGILVANVLNYFFAKIHWGWRLSLGGAMVPALIITIGSLFLPETPNSMIERGNHDEAKARLKRIRGIDDVDEEFNDLVVASEASRKIENPWRNLLQRKYRPHLTMAIMIPFFQQLTGINVIMFYAPVLFKTIGFGADASLMSAVITGGVNVLATVVSIYYVDKLGRRFLFLEGGIQMLICQIAVSICIAIKFGVNGTPGDLPKWYAIVVVIFICVYVAGFAWSWGPLGWLVPSEIFPLEIRSAAQSINVSVNMIFTFIVAQVFLTMLCHLKFGLFLFFAFFVVIMTVFIYFFLPETKNIPIEEMVIVWKEHWFWSKFMTEVDYPGTRNGTSVEMSKGSAGYKIV

SEQ ID NO: 97370 - DNA, 1620 bp, Trichoderma reesei; identical to SEQ ID NO: 97058
  CDS (1)..(1620)

SEQ ID NO: 97371 - protein, 539 aa, Trichoderma reesei; identical to SEQ ID NO: 97059

SEQ ID NO: 97372 - DNA, 1545 bp, Trichoderma reesei
  CDS (1)..(1545)
atgtatcggatttggaacatatatgtgcttgccgcctttggcaccatcggcggcatgatcttcggctttgagatcagctccatgagcgcctggattggctccgaacaatacctcgaatacttcaaccacccggactcaactgagcaaggcggcatcacggcagccatgtccgccggctctttggttggctctctcctagctggatggctcgctgatcgtctgggacgccgtttagctatacaaatcgcctctgtggactggattgtcggagcggtgctgcagtgctcttcccagaatgttgcacatctcgtcgttggtcgcatcgtctccggacttgcgattggcattacgtcctcccaatgcattgtctacctatctgaacttgcaccttctcgcatccgtggccgagtcgttggtatacagcagtggtccattgactggggcatcttgatcatgtacctgatctcgtacggctgctcggtttcaattcatcgaccggcggcattccgtattgcttggggcttgcaggctgttcccggagctgtcctgttcttctcgctcttcttcttccctgaatcaccacgttggctcgcaaccaaagatcgctgggaggaatgccacgaagtgcttgccaacctgcatgccaaaggcgatcgaaacaatatcgaggtgttggccgagctggaagaagtcagagaagcagcgaggatcgccgcggagtcaaaggagatcggctacctgggactgttcgctcccaagatgtggaaacgtacacttgtcggcgtcagtgcacagatttggcagcaactcctcggtggtaatgtgatgctttactaccttgtctacatcttcaacatggctggcatgtccggaaataccgcgctcacgtcttcaattatccaatatgtcatctttctcgtcacgactggaggagttctctttgtcgttgatcgcattggtcgccggtggttgcttattgttggggccatcatttgcggcgtcatccatttcatcgtcggtgccgtcatggcagtctacgggcaccacgtcgacagtgtggatggaaacgatattctgaggtggcagattggtggccctcctgccaaggccatcattgcgctttgttacatctttgttggagtctatggagtcacatgggcccacggtgcatggatttactgcggagaagtcttccccttgaagtaccgagccaagggcgttggcctggctgctgcaggcaattgggctttcaacctcgccttggccttttttgtccccccagcttttacgaacatccagtggaaagcgtacatgattttcgggacattctgcattgccatggtgttccatatctacttcatgtaccccgaaacggtgaagaagtcactcgaagagattgacgtgctattcgaaggagatattcccgcatggcgcagcgcgagtgccgtgagcacatttgatgagaaagtagcgcgagcaaaggaagcgggaggcttggaagagttttcaaaacaagccgacatcaagcacgaagaaaaggtctaa

SEQ ID NO: 97373 - protein, 514 aa, Trichoderma reesei
MYRIWNIYVLAAFGTIGGMIFGFEISSMSAWIGSEQYLEYFNHPDSTEQGGITAAMSAGSLVGSLLAGWLADRLGRRLAIQIASVDWIVGAVLQCSSQNVAHLVVGRIVSGLAIGITSSQCIVYLSELAPSRIRGRVVGIQQWSIDWGILIMYLISYGCSVSIHRPAAFRIAWGLQAVPGAVLFFSLFFFPESPRWLATKDRWEECHEVLANLHAKGDRNNIEVLAELEEVREAARIAAESKEIGYLGLFAPKMWKRTLVGVSAQIWQQLLGGNVMLYYLVYIFNMAGMSGNTALTSSIIQYVIFLVTTGGVLFVVDRIGRRWLLIVGAIICGVIHFIVGAVMAVYGHHVDSVDGNDILRWQIGGPPAKAIIALCYIFVGVYGVTWAHGAWIYCGEVFPLKYRAKGVGLAAAGNWAFNLALAFFVPPAFTNIQWKAYMIFGTFCIAMVFHIYFMYPETVKKSLEEIDVLFEGDIPAWRSASAVSTFDEKVARAKEAGGLEEFSKQADIKHEEKV

SEQ ID NO: 97374 - DNA, 1566 bp, Medicago truncatula; identical to SEQ ID NO: 97060
  CDS (1)..(1566)

SEQ ID NO: 97375 - protein, 521 aa, Medicago truncatula; identical to SEQ ID NO: 97061

SEQ ID NO: 97376 - DNA, 1506 bp, Medicago truncatula
  CDS (1)..(1506)
atggcgtctgatcccgaacaacccccactttcctctttctcacaggaaggaaagtcatccactgaggttagaagtgaaagggagcctctgcttaatggaattcatgtccctcaagactattccctctctgctgcaattcttccatttctcttcccagcttttggtggtctactatttggatatgatattggtgccacatctagtgcaacaatttccattcagtcatcatcactaagtggaataacttggtatgacttagacgctgttgaaattggacttcttactagtggatcattatatggtgccttaataggctctgtgttggccttcaatattgctgatttcttagggagaagaagagagctgcttgtggctgcattgatgtatcttgttggagccctcataacagcattcgctcctaattttcctttattggtaattgggagattggtatttggcataggaattggactggcaatgcatgctgctccaatgtatattgcagagacagctccaacgccaatacgtggacaactagtctctttgaaagagttctttatagtaatcggaattgttgccgggtatggactaggtagcttgttggtagacactgttgctgggtggcggtatatgtttggaattagtagtcctgttgcagtaataatgggatttggaatgtggtggcttccagcttctccaaggtggatacttttacgtgctatacagaaaaagggggatcttcagactttgaaagacactgcaattcgtagtttgtgccagcttcaaggtcgtacatttcatgattctgctcctcagcaagtagatgagattatggcagagttttcttatttaggtgaagaaaatgatgttaccttaggggaaatgtttcgtggaaaatgtcggaaggcccttgtgataagtgcaggattggtcttgtttcaacagatcacgggccaaccaagtgttctctactacgctgcatcaatcctacagagtgcaggattctccttagcagctgatgctacccgggtctctattctccttggtgtatttaagttgattatgactggagtggctgttgtcgttgttgacagacttggaaggagacctttactacttggaggagtttcaggaatagtaatctcattattcttactgggttcatattacatattcttggataatgcagcagttcttgctgtagtcggtttgctgctctatgttggttgttatcagatttcctttggtccgatgggttggcttatgatagcagagatttttcccttacgcctaagaggcaaaggacttagtatagcagttctcgtcaattttgcggcaaatgccctggttacatttgccttttccccactgaaggatttactgggagcaggaattttgttttacatattttctgcaatagctgtggcatctcttgtattcatatacttcattgtaccagaaaccaaggggcttacactagaggaaattgaggcaaaatgcctgtaa

SEQ ID NO: 97377 - protein, 501 aa, Medicago truncatula
MASDPEQPPLSSFSQEGKSSTEVRSEREPLLNGIHVPQDYSLSAAILPFLFPAFGGLLFGYDIGATSSATISIQSSSLSGITWYDLDAVEIGLLTSGSLYGALIGSVLAFNIADFLGRRRELLVAALMYLVGALITAFAPNFPLLVIGRLVFGIGIGLAMHAAPMYIAETAPTPIRGQLVSLKEFFIVIGIVAGYGLGSLLVDTVAGWRYMFGISSPVAVIMGFGMWWLPASPRWILLRAIQKKGDLQTLKDTAIRSLCQLQGRTFHDSAPQQVDEIMAEFSYLGEENDVTLGEMFRGKCRKALVISAGLVLFQQITGQPSVLYYAASILQSAGFSLAADATRVSILLGVFKLIMTGVAVVVVDRLGRRPLLLGGVSGIVISLFLLGSYYIFLDNAAVLAVVGLLLYVGCYQISFGPMGWLMIAEIFPLRLRGKGLSIAVLVNFAANALVTFAFSPLKDLLGAGILFYIFSAIAVASLVFIYFIVPETKGLTLEEIEAKCL

SEQ ID NO: 97378 - DNA, 1554 bp, Medicago truncatula
  CDS (1)..(1554)
atggctggtggaggattgacaaatggaggtccaggcaaaagagctcatctctatgagcacaaattcactgcttattttgcctttacctgtgttgttggagctcttggtggttctctttttggttatgatcttggtgtttcaggtggggtgacttcaatggatgatttcttagagaaattcttcccggacgtgtacagaaagaagcacgcacatctgaaagaaactgactattgtaaatatgacaaccaagtgctgacactttttacatcatctctttatttctcagcacttgttatgactttttttgcttcctacctaacaagaaacaaggggagaaaggccactatcatagtaggagcccttagctttcttattggagcaattctcaatgcagcggcacagaacattccaactctaatcattggtagagtcttccttggtggaggcattggctttggaaatcaagctgttccattgtatctatctgaaatggctccagctagcagccgaggagcagttaaccaactgtttcagttcacaacatgtgctggaatcttgattgcaaacttagtgaactatttcaccgacaaaattcatccccatggctggagaatatcacttggtttggcaggtattccagcagtactgatgcttttgggaggtattttttgtgcggagacacctaacagccttgtggaacaaggaaggttggatgaagcaagaaaagtgttggagaaagttagaggtacaaaaaatgttgatgctgaatttgaagatctaaaagatgcaagtgaactagcacaagctgtgaagagtccatttaaggtacttctaaagaggaagtacaggccacaactgataataggggcgttagggattccagcattccaacagttaacaggaaataactccattctcttctatgcacctgtcatcttccagagtttagggtttggatctaatgcagctcttttctcatcttttattaccaatggagctctccttgttgctactgtcatttcaatgtttttggttgacaagtttggcagaagaaagttcttcctagaagctggttttgaaatgatatgctgcatgattattactgctgtggttttggcggtagagttcggacatggcaaagaactttcaaaaggcataagtgcatttcttgttatagtgattttcttgtttgtgttggcatatggaagatcttggggtcccctaggatggttggttccaagtgagctctttccattagagataaggtcagctgcacaaagtattgtggtttgtgtcaacatgatcttcactgcccttgttgcacaattgtttctcttatcactttgtcacctcaaatatggaattttcttgctttttggaggtttgattgtcgtcatgagtgtctttgtattctttctattaccggaaacaaagcaagttccaattgaagagatttatcttctctttgaaaaccattggttttggaagaacattgtaagagaaggaacagatcaagagcaaggaaaaccgaacgggaagccaatagctccttaa

SEQ ID NO: 97379 - protein, 517 aa, Medicago truncatula
MAGGGLTNGGPGKRAHLYEHKFTAYFAFTCVVGALGGSLFGYDLGVSGGVTSMDDFLEKFFPDVYRKKHAHLKETDYCKYDNQVLTLFTSSLYFSALVMTFFASYLTRNKGRKATIIVGALSFLIGAILNAAAQNIPTLIIGRVFLGGGIGFGNQAVPLYLSEMAPASSRGAVNQLFQFTTCAGILIANLVNYFTDKIHPHGWRISLGLAGIPAVLMLLGGIFCAETPNSLVEQGRLDEARKVLEKVRGTKNVDAEFEDLKDASELAQAVKSPFKVLLKRKYRPQLIIGALGIPAFQQLTGNNSILFYAPVIFQSLGFGSNAALFSSFITNGALLVATVISMFLVDKFGRRKFFLEAGFEMICCMIITAVVLAVEFGHGKELSKGISAFLVIVIFLFVLAYGRSWGPLGWLVPSELFPLEIRSAAQSIVVCVNMIFTALVAQLFLLSLCHLKYGIFLLFGGLIVVMSVFVFFLLPETKQVPIEEIYLLFENHWFWKNIVREGTDQEQGKPNGKPIAP

SEQ ID NO: 97380 - DNA, 1605 bp, Emericella nidulans; identical to SEQ ID NO: 97062
  CDS (1)..(1605)

SEQ ID NO: 97381 - protein, 534 aa, Emericella nidulans; identical to SEQ ID NO: 97063

SEQ ID NO: 97382 - DNA, 1644 bp, Candida intermedia; identical to SEQ ID NO: 97064
  CDS (1)..(1644)

SEQ ID NO: 97383 - protein, 547 aa, Candida intermedia; identical to SEQ ID NO: 97065

SEQ ID NO: 97384 - DNA, 1569 bp, Candida intermedia; identical to SEQ ID NO: 97066
  CDS (1)..(1569)

SEQ ID NO: 97385 - protein, 522 aa, Candida intermedia; identical to SEQ ID NO: 97067

SEQ ID NO: 97386 - DNA, 1620 bp, Aspergillus oryzae
  CDS (1)..(1620)
atgggcatccttaacgtcgtcgaggatcgtcctactcctaagagtgtctataactggcgagtgtacctgctcgcaggcattgcatcatgtggttccaatatgatcggttatactagtgcctttattggtacaaccatcacactggactcctttaaagaggaattcggcttggataagatgtcatctgcgaaggtggacttgattagcgagaatattgtctcgctgttcattgccggtgccttctttggagccctcttaacctaccctgttggccatttcctgggacgcaaatggagcttggtgatcgcttcagctatctttacgttaggagctggtctccagctgggtgccaaccactcccgcggacttggaattatgtatgctggacgagtcctgaatggactcggtactggtgtcgcctcgaacattgtcccaatctatctctctgaactggcacctccggccatccgtgggcgacttgtcggtctctatgagctcggctggcagattggtggtatggtgggattctggatcaactacggtgtccaaaaaaacatggaacctggccatacgcaatggttgatcccatttgccattcagctgattccggctgggctgcttttcgctggtgccttatggacaaaggaatcccctcggtggctcttcctgaaggaccgccgacaggaagcaatggcaaacctctgctggattcgtcagttgagcgagaccgatatttatatcaccgaggaggtggccgctatcgaccaagcgcttgaagagcaggcagccaccattggtattggattctggaaacccttccagtctgttggcacacgcccaaagatcatgtggcgtctcttcctgggctgcatgttgttcttctggcagaatggatcgggtatcaacgcgatcaactactacagtcccaccatcttcaaaagtatcggtgtcaatagcgatacgatcggaatcaccacaggattgttcggcgtggtgaaagccgtcatgaccttcgtgtggcttctgttcctggtcgaccagttgggaagacggaagctcctcctcatcggtgccatcacgggctcgatctgtatgtggattatcggtgcctacatctgcgtcgtccagcccgaggaaaaccccaccgaccacttgaacggtggtggtattgcagctatcttcttcttctacctgtggacagcgatctacacgcctacatggaacggcacaccgtgggttatcaactcggaattcttcgaccccaatattcgttccttggcccaggccgcaaccaccgccagtaactggctcttcaacttccttgtttcccgtttcacggagcaaatgttcgccaagatgggctatggagtgtacttcttcttcgccgccttatccttcctcgccttcttctttaccttcttcctcattcccgagactagcggtgtcccgctggaagttgtggaccgcctgttcgaggttaagccggtgtggcgggccaacgagacggttaaggctcagatgaaggaggaggaagagcgattccgcttcgagattaaggagggcaattttgataagagcgaagaggaacatgtggaggatggcaatgagacgaggtcatag

SEQ ID NO: 97387 - protein, 539 aa, Aspergillus oryzae
MGILNVVEDRPTPKSVYNWRVYLLAGIASCGSNMIGYTSAFIGTTITLDSFKEEFGLDKMSSAKVDLISENIVSLFIAGAFFGALLTYPVGHFLGRKWSLVIASAIFTLGAGLQLGANHSRGLGIMYAGRVLNGLGTGVASNIVPIYLSELAPPAIRGRLVGLYELGWQIGGMVGFWINYGVQKNMEPGHTQWLIPFAIQLIPAGLLFAGALWTKESPRWLFLKDRRQEAMANLCWIRQLSETDIYITEEVAAIDQALEEQAATIGIGFWKPFQSVGTRPKIMWRLFLGCMLFFWQNGSGINAINYYSPTIFKSIGVNSDTIGITTGLFGVVKAVMTFVWLLFLVDQLGRRKLLLIGAITGSICMWIIGAYICVVQPEENPTDHLNGGGIAAIFFFYLWTAIYTPTWNGTPWVINSEFFDPNIRSLAQAATTASNWLFNFLVSRFTEQMFAKMGYGVYFFFAALSFLAFFFTFFLIPETSGVPLEVVDRLFEVKPVWRANETVKAQMKEEEERFRFEIKEGNFDKSEEEHVEDGNETRS

SEQ ID NO: 97388 - DNA, 1641 bp, Aspergillus oryzae; identical to SEQ ID NO: 97068
  CDS (1)..(1641)

SEQ ID NO: 97389 - protein, 546 aa, Aspergillus oryzae; identical to SEQ ID NO: 97069

SEQ ID NO: 97390 - DNA, 1614 bp, Aspergillus oryzae
  CDS (1)..(1614)
atgggacttatctcggaagcgaaaagggctatgcaagatgccccaaaggaagttttcaatgcctatgttttaatgtgtacatgcttcttcgccctttctggtgtgtcgaaagggtttgatgaaggaaacattgcctcgatcgttacgcaagctcattttaaggcccgctttggtctcgatacacagtcagaggatgagtatgccaacacaaaaggatggctagtatctatagccacagctggagcggtctttgggtgtcttgggtgctcccccatcaacgatcgatttggccgacgttggacgctccgcattgctacagtcatctacatcgctggcgtcttgggtcaagggctctgcggaggaaacctttccgggctttatgcctccagatttattgcagggttgggaattggccctttgtcaattgttcctccggtttatattactgagatctcgccgaaagctattcgtggtcttcttacagttctgttcgcggcttgccagcagctaggtgtagtgctgggctttttcgttaattacggagtcactaaacagtaccctggcgtcgacgagcaatggatgctccccactctccttcagattgtcccagctgtggtctggggtttcggaactttcttatgctcggaatctcctcgatggcttctttacaagggccaccgagaggaagcagcagcaaccatgtccaagcttcgccacttacctcgtgatcattctgtggtcctatccgaactagctggcatggacgctcaaatattgcatgaaaccgaagctgtcagcaatgcaaccgtatgggacctcctaaaggagacttttgtccccgttgagaaccgccgtcgcttcttcttgatctttatggccacgctgttctcccagtggtcgggcgccaacgcgataacacagtattcacctactatcttcggatacctgggaatcagtggggacgaggccaaatttttggcgaccggaatctatggagtggtcaagtttgtgagcacggtgtgctttgcattattcattgtagattttatcggtcgacgccgatctttgatgaccggaatcagtctccaactgatcactttgatatttgtcggggcatatctcggcgtcaccagccatctctccgctgacgagatcgaggcgactcccagtgcgtctcgggcatctactgccgccatcgttgcgatcttcctccacgcggtggcctggagtattggctggtttagtatcccttaccttgttggctcagaaatattccccattcgcatccggtcgttgaacatgtccatttccatggcgttccattgggcgttttatttcggatgttcgcgtgccatgccgagtcttctagctgccacgcataagtggggagcctttgtgttttttagctgtatttgtttgatatcattggtttatgtgttctatgccatgccggatactacgggaagatcccttgaggagttggatagcctgttccagcgaccgtggtacaccgtttaccaggtggcctacccatcacgcgatgagattcaagtagagagactggaggacaaggtgtcggccgatggaacgtctaagcacattgagcaggcttag

SEQ ID NO: 97391 - protein, 537 aa, Aspergillus oryzae
MGLISEAKRAMQDAPKEVFNAYVLMCTCFFALSGVSKGFDEGNIASIVTQAHFKARFGLDTQSEDEYANTKGWLVSIATAGAVFGCLGCSPINDRFGRRWTLRIATVIYIAGVLGQGLCGGNLSGLYASRFIAGLGIGPLSIVPPVYITEISPKAIRGLLTVLFAACQQLGVVLGFFVNYGVTKQYPGVDEQWMLPTLLQIVPAVVWGFGTFLCSESPRWLLYKGHREEAAATMSKLRHLPRDHSVVLSELAGMDAQILHETEAVSNATVWDLLKETFVPVENRRRFFLIFMATLFSQWSGANAITQYSPTIFGYLGISGDEAKFLATGIYGVVKFVSTVCFALFIVDFIGRRRSLMTGISLQLITLIFVGAYLGVTSHLSADEIEATPSASRASTAAIVAIFLHAVAWSIGWFSIPYLVGSEIFPIRIRSLNMSISMAFHWAFYFGCSRAMPSLLAATHKWGAFVFFSCICLISLVYVFYAMPDTTGRSLEELDSLFQRPWYTVYQVAYPSRDEIQVERLEDKVSADGTSKHIEQA

SEQ ID NO: 97392 - DNA, 1788 bp, Aspergillus oryzae; identical to SEQ ID NO: 97070
  CDS (1)..(1788)

SEQ ID NO: 97393 - protein, 595 aa, Aspergillus oryzae; identical to SEQ ID NO: 97071

SEQ ID NO: 97394 - DNA, 1617 bp, Aspergillus oryzae; identical to SEQ ID NO: 97072
  CDS (1)..(1617)

SEQ ID NO: 97395 - protein, 538 aa, Aspergillus oryzae; identical to SEQ ID NO: 97073

SEQ ID NO: 97396 - DNA, 1680 bp, Aspergillus oryzae; identical to SEQ ID NO: 97074
  CDS (1)..(1680)

SEQ ID NO: 97397 - protein, 559 aa, Aspergillus oryzae; identical to SEQ ID NO: 97075

SEQ ID NO: 97398 - DNA, 1719 bp, Aspergillus oryzae
  CDS (1)..(1719)
atggcgggtggaatggcctctcaaggcatctctgccaagcgcgcagagcttgctggaggcagagtcggatggcgcgggctggtcagcagcaagaaagcgtttggtattgcgctgttcgcctcgctgggtggtttggtctacggatataaccagggaatgtttgcccaaattcttaccatgcggtccttcattgatgcgacccaaggatatgcagaacacacaggtaccgctcagggtatgctcacctccattcttgagctaggtgcctggttgggaacactcgcaaatggatatttggccgacgcgttgggtcgccgtgtgaccgtggttgtggccgtggtcgtgttctgtgtgggagtcattgttcaggcgtgcactacgaacccagacttcgtttatgctggtcggttcgtcaccggtctgggagtcggtaacctgagtatgattgtcccgctttacaacgccgagctggctcctcccgaaatccgaggatctctagtcgccgttcagcaattggctattacgttcggtatcatggtcagtttctggattggatatggcacaaacttcatcggcggaacgggagagggtcaatctattgccgcctgggagattccggtgtgcatccaaattcttcccgcgctcgttctggcggttggcatgatgctgttcatgcctcagtcgccgcgtcatttaatgaatcagggccgtgaagaggagtgtctacagaccgtagcgcgtctgcgcgacgcctctgtcgatgatatgctcgtgcgcatcgaattcttggagatgaaggcgctccgcatgtttgaggaagagacagcgcggaagaagtatccgcagtatcaggatgggtcattcaagagccgtttcatgattggggtacatgattacatgtccctcattacggataaatccctgttcaagaggaccactgttgcctgtttgattatggtctttcagcagtggaatggtatcaatgccccacaaatctttaaggatctggagctcggcggtaccactacttcattgctggccactggagtagctggtatcttcgagttcgtcttcactattccagccgttctctgggtcgacaatattggtcgcaagaagatcctcattgcgggtggcattggtatggctgtttgccactttattgtggctggtattattggatcataccaacatacctttgccgagcacaaggctcctggatgggttgctgtagtatttgtgtggattttcattatcaactttgcctattcatggggtcctgttgcctggatcgtggtttctgaagtctaccccctgagtatgcgtgccaagggtgttagtatcggtggaagcagcaactggctcaacaacttcgccgtgggtctttctacctcccccttcctgagtgcatcgaactacggtacatttatcttcttcggatgtatcaccaccatcggtgtattctgggtgtggttcctggtccccgaaaccaagggccgtaccttggaagagatggacgaactctttggctctgggggtatggccgccgaagatgaggcccggaagcgacggattgagcgtgagattgggctcttggctctgttagcgggtggcggttggtccgcaggcggaaacctggggaaagcgcttcctggaacatcaatcggagtgacagcctccgagggaccgggtgctggtcacgaaatccggtgggtttga

SEQ ID NO: 97399 - protein, 572 aa, Aspergillus oryzae
MAGGMASQGISAKRAELAGGRVGWRGLVSSKKAFGIALFASLGGLVYGYNQGMFAQILTMRSFIDATQGYAEHTGTAQGMLTSILELGAWLGTLANGYLADALGRRVTVVVAVVVFCVGVIVQACTTNPDFVYAGRFVTGLGVGNLSMIVPLYNAELAPPEIRGSLVAVQQLAITFGIMVSFWIGYGTNFIGGTGEGQSIAAWEIPVCIQILPALVLAVGMMLFMPQSPRHLMNQGREEECLQTVARLRDASVDDMLVRIEFLEMKALRMFEEETARKKYPQYQDGSFKSRFMIGVHDYMSLITDKSLFKRTTVACLIMVFQQWNGINAPQIFKDLELGGTTTSLLATGVAGIFEFVFTIPAVLWVDNIGRKKILIAGGIGMAVCHFIVAGIIGSYQHTFAEHKAPGWVAVVFVWIFIINFAYSWGPVAWIVVSEVYPLSMRAKGVSIGGSSNWLNNFAVGLSTSPFLSASNYGTFIFFGCITTIGVFWVWFLVPETKGRTLEEMDELFGSGGMAAEDEARKRRIEREIGLLALLAGGGWSAGGNLGKALPGTSIGVTASEGPGAGHEIRWV

SEQ ID NO: 97400 - DNA, 1563 bp, Tuber borchii; identical to SEQ ID NO: 97084
  CDS (1)..(1563)

SEQ ID NO: 97401 - protein, 520 aa, Tuber borchii; identical to SEQ ID NO: 97085

SEQ ID NO: 97402 - DNA, 1909 bp, Vitis vinifera
  CDS (55)..(1665)
ttgaggccgaagcgacattgataaggtttttaggagtttgtaggtggtgacatcatgcctgctggaggattcgcggccccgtcggccggtggcgactttgaagccaagatcactcctatcgttatcatttcttgcatcatggccgccaccggcggcctcatgttcggctacgacgttggcgtttctgggggtgtgacgtcgatggacccattcttgaagaaattttttccggtagtatataggaagcagcatgaggagctggagagcaattactgcaagtacgacaaccaagggctacagctgttcacgtcgtctctatatcttgcgggcttgacctccactttcttcgcatcatacacaaccagaagttttggtcgtaaggcaaccatgcttattgctgggattttcttcattgtgggagtggtgcttaataccgctgcccaagatctagctatgctcatcattgggaggatccttttgggctgtggcgtcggtttcgctaatcaggctgttccactgttcttatcggagatagcacctacaagaatacgtggaggactaaacatactgttccaacttaacgtcactattggcatactttttgctaacctcgtcaattacggcactgccaaaatcaaagggggatggggatggagggtatcattggggttggctgggattcctgcggtcctcctaactgtggggtctctcttggtggtggacacccctaacagccttatcgagcgtggtcgcttggaagaaggaaaggcagttctcagaaagataaggggcactgacaagattgaaccagaatatcaggagcttcttgaggcaagtcgtgtggctaaattagtgaagcacccctttaggaatctaatgcagcgcagaaaccgaccccagctgatcattgctgtggccttgcagatcttccagcaattcacaggcatcaatgcaatcatgttttatgctccagtcctgttcgacactttgggatttggtagtgatgcgtccctctactcagctgtcataacgggggctgttaatgttctctcaaccctcgtgtccgtctactctgtcgacaaagtaggccgtcgattgctcttgctggaagctggcgtccagatgttcttctctcaagtggtaattgcaatcatactaggcatcaaagtcaaagatcactccaacaatctccacactggctatgcagtcctagtagtggtcttggtgtgcacttttgtggccggctttgcatggtcttgggggccactcggttggctcattccaagtgagaccttcccactggagacccgatcagcagggcagagtgtgactgtttgtgtgaacctgctcttcacttttgtcatagcacagtccttcctttccatgctttgccatttaaagtatggcatcttccttttcttctccggctgggtcttcatcatgtccttctttgtgctctttttgctcccggagaccaaaaacattccaattgaggaaatgacagagagggtgtggaagaagcattggttgtggaagagattcatggatgaccatgtggagggcttccctgtttttggttataatgatgaagaaactgttgttaatggaagtgacaaaaagagagatgggtacggcaatggattcgatccttcttcccaattataagattagtggtgtatggggagggaaagaaaagacatcactagataaatgaatagctaaaaatagtttgatatgccccttgttgcttaccatttgttttcactagttctatggtatttgataccttacccctatatgatgaatccccctgtatatgtgttcttgtgcccatgtcggtccatgtatgactcagaattatgaaaaaaaataaagagattattggaattcaaaaaaaaaaaaaaaaaaa

SEQ ID NO: 97403 - protein, 536 aa, Vitis vinifera
MPAGGFAAPSAGGDFEAKITPIVIISCIMAATGGLMFGYDVGVSGGVTSMDPFLKKFFPVVYRKQHEELESNYCKYDNQGLQLFTSSLYLAGLTSTFFASYTTRSFGRKATMLIAGIFFIVGVVLNTAAQDLAMLIIGRILLGCGVGFANQAVPLFLSEIAPTRIRGGLNILFQLNVTIGILFANLVNYGTAKIKGGWGWRVSLGLAGIPAVLLTVGSLLVVDTPNSLIERGRLEEGKAVLRKIRGTDKIEPEYQELLEASRVAKLVKHPFRNLMQRRNRPQLIIAVALQIFQQFTGINAIMFYAPVLFDTLGFGSDASLYSAVITGAVNVLSTLVSVYSVDKVGRRLLLLEAGVQMFFSQVVIAIILGIKVKDHSNNLHTGYAVLVVVLVCTFVAGFAWSWGPLGWLIPSETFPLETRSAGQSVTVCVNLLFTFVIAQSFLSMLCHLKYGIFLFFSGWVFIMSFFVLFLLPETKNIPIEEMTERVWKKHWLWKRFMDDHVEGFPVFGYNDEETVVNGSDKKRDGYGNGFDPSSQL

SEQ ID NO: 97404 - DNA, 1737 bp, Vitis vinifera
  CDS (72)..(1652)
aaggagaagaaggtcttagtcattttccttggtgtctcaactgtgttgggagaggaggaagaagaggaactatggaggtgggagatgggtcttttgctcctgtaggtgtgtccaagcagagggcagaccagtacaaaggcaggctcactacttatgtggtcgttgcttgccttgttgctgctgttgggggtgcaattttcggctatgacattggggtttcaggaggcgtgacatcaatggatacatttcttgaaaaattcttccacacagtctatttaaagaagaggcgggccgaagaagaccactactgcaagtacaatgaccaaggccttgcagcatttacctcttccctctaccttgctggtttggttgcgtccattgtggcatcgcctattacaaggaagtatgggcgtcgagcaagtatagtatgtggtgggatcagctttcttattggagctgccctaaatgctgcagctgtgaacttggcgatgcttctttcgggtcggatcatgcttggtattggcattggatttggcgatcaggcagtgccactatatttgtcagagatggcgccggcccatctccgaggagccctgaacatgatgtttcagttagcaactacgacggggatcttcacagcaaacatgatcaattacggaactgcaaagctcccctcatggggatggaggctgtcattgggcctggctgcattaccaactatcttaatgacagtgggaggcctatttcttcctgagactcccaacagtctaatcgaacggggatcaagggagaaagggagacgagtcctagaaagaatcagaggtaccaacgaagttgatgcagagtttgaagacattgtggatgctagtgagcctgcaaactcaatcaagcatcctttcagaaacatccttgagagaaggaacaggccacagctggttatggcaatctgcatgccagctttccagatcctcaacggcatcaattctattctcttctatgccccagttctgtttcagaccatgggatttggaaatgctactctctactcgtccgctttgacaggggccgttcttgttttatccacagtggtttcaatcggattggtggatagattgggtagaagagttttattgatttctgggggaatccaaatggtcttatgtcaggtgacagttgccataatcctgggggtcaagttcggaagcaatgacgagctctcgaaaggctactcagtattggtggtgattgtgatctgcctctttgttatagcattcggatggtcgtgggggccacttgggtggacagttccaagtgagatattcccactggagacccgatcagcaggacagagcataacagtggctgtgaacctcctgttcaccttcataatagctcagtgtttcctttccatgctttgttctttcaagcatggaattttcctcttttttgctgggtggattgttatcatgaccctcttcgtatacttcttcctacctgaaacaaagggagttcccattgaagaaatgatattcgtgtggaagaagcattggttctggaagaggatggtgcctgggactccagatgttgacgacatcgacggcctgggaagccattcaatggagtcaggtgaaaagacaaagctaggcagctgagcttaattcttccgatttcggtgaacttcaaataatccatgtagcatatggcaagccaggctcctatcatgagccaataattagt

SEQ ID NO: 97405 - protein, 526 aa, Vitis vinifera
MEVGDGSFAPVGVSKQRADQYKGRLTTYVVVACLVAAVGGAIFGYDIGVSGGVTSMDTFLEKFFHTVYLKKRRAEEDHYCKYNDQGLAAFTSSLYLAGLVASIVASPITRKYGRRASIVCGGISFLIGAALNAAAVNLAMLLSGRIMLGIGIGFGDQAVPLYLSEMAPAHLRGALNMMFQLATTTGIFTANMINYGTAKLPSWGWRLSLGLAALPTILMTVGGLFLPETPNSLIERGSREKGRRVLERIRGTNEVDAEFEDIVDASEPANSIKHPFRNILERRNRPQLVMAICMPAFQILNGINSILFYAPVLFQTMGFGNATLYSSALTGAVLVLSTVVSIGLVDRLGRRVLLISGGIQMVLCQVTVAIILGVKFGSNDELSKGYSVLVVIVICLFVIAFGWSWGPLGWTVPSEIFPLETRSAGQSITVAVNLLFTFIIAQCFLSMLCSFKHGIFLFFAGWIVIMTLFVYFFLPETKGVPIEEMIFVWKKHWFWKRMVPGTPDVDDIDGLGSHSMESGEKTKLGS

SEQ ID NO: 97406 - DNA, 1587 bp, Sclerotinia sclerotiorum
  CDS (1)..(1587)
atgcttggtgctatcgcatctatcggtggtttcatgttcggttatgaatctggtcaaatttctttcgtccaaatgtccgacttcttagatcgattcggtgaaaatggtgaactttctgctgtccgtcaaggaaccatcgtcgccattctctgcgccggtactcttgttggatgccttggatctagttacctctgcgatacaatcggtcgtcgttacactatctccagttctgcattcttctacatcatcggtgttatcatcgaaatcacttcttctactcactgggttcaattcgctatggggagattcactgctggtttgggtattggtgctttgagtactagtgttcctatgtaccaatctgagtctgtgccaaagaacatccgtggtgctgtcgtttccagttatcagttgttgattactcttggtatctggactgcttatatgatcaactacggaactcattctgcctataccaacagtgcacagtggcgtattcctaacggtctctccgcactctgggccatcatcctcggtaccgctgtcctcttcatgcccgaatcccctcgctttgcataccgtatcggacgtgaagatgaagctcgcaaaaacatggctctcctcaacggtgttgacccttactccccacttatcgattccgagatccaagaaatcgaacaaaagctcgcagccgaaagagaaggtggtgatcacccctggtacgaaatctttactggccctagaatgttgtaccgaacacttctcggaatggttcttcaagctggtcaacaattgactggtgccaatttcttcttctactatggtactaccatcttcaagtctggtggtatctccgattcttatgttacctctatcattctcggtaccgtcaatgtcgtcgctaccattggtggtctctggattgttaagaactgcggtcgtaggaaggctctcatggttggtgctgccgagatgtttgtttgcatgttgatctactctttcgtcggacacttcaagatccaaggacaagccaatgctcaagcccctggtgctgttttgatttgtttcacctgtatctacattgttggattcgctactacatggggacctttggtttgggccattgtcggagaattatacccagcacgttacagagcttcttgcatggctctcgccaccgcatcgaactggctcttcaacttccttatctctttcttcaccacatttatcaccaacgatatcgattactactatggtcttgtctttgccggatcccttttcgctctcttctggattgtatacttcttcgttatcgagaccaaggatcgctcccttgaggaaattgacaccatgtacgtcctccacgtcaacccacgaacatcctccacttgggaccccaagtccctcggtgccgaaggtgtcaaaggtgttgataccgatggaatgttcttgaccactggagggaaagatattaagaagagtgagatggctggacgaccaatgttggaacatgacgagagaaggttccctgagaccgctggaggagctgcttctcaggagcacaaacctgagattatgaatgcttaa

SEQ ID NO: 97407 - protein, 528 aa, Sclerotinia sclerotiorum
MLGAIASIGGFMFGYESGQISFVQMSDFLDRFGENGELSAVRQGTIVAILCAGTLVGCLGSSYLCDTIGRRYTISSSAFFYIIGVIIEITSSTHWVQFAMGRFTAGLGIGALSTSVPMYQSESVPKNIRGAVVSSYQLLITLGIWTAYMINYGTHSAYTNSAQWRIPNGLSALWAIILGTAVLFMPESPRFAYRIGREDEARKNMALLNGVDPYSPLIDSEIQEIEQKLAAEREGGDHPWYEIFTGPRMLYRTLLGMVLQAGQQLTGANFFFYYGTTIFKSGGISDSYVTSIILGTVNVVATIGGLWIVKNCGRRKALMVGAAEMFVCMLIYSFVGHFKIQGQANAQAPGAVLICFTCIYIVGFATTWGPLVWAIVGELYPARYRASCMALATASNWLFNFLISFFTTFITNDIDYYYGLVFAGSLFALFWIVYFFVIETKDRSLEEIDTMYVLHVNPRTSSTWDPKSLGAEGVKGVDTDGMFLTTGGKDIKKSEMAGRPMLEHDERRFPETAGGAASQEHKPEIMNA

SEQ ID NO: 97408 - DNA, 1753 bp, Medicago truncatula
  CDS (29)..(1585)
cttcttcttgctactgaggtcagaaaaaatggctggtggtggaattcccattggagggggtaacaaagagtaccccggaaacctcactccttttgtcaccataacatgcatcgttgctgccatgggtggtttgatctttggctacgatattggaatttcaggtggtgtgacgtccatggatccgtttctgaagaaattttttccggcggtgtaccggaaaaagaacaaggacaaatcgacaaaccagtactgtcaatatgacagtcaaacattgacgatgtttacatcgtcgttgtatctggctgcccttttgtcctcgttggtagcttccaccataactcgtaggtttggtcggaaactttccatgcttttcggaggattacttttccttgtcggtgctcttattaatggctttgctaatcatgtttggatgttgatcgtgggtcggatcttgctcgggtttggtatcgggtttgctaatcagcctgtgccattgtacctctctgagatggctccttacaagtatagaggagcattgaatattgggtttcaattatcaattacaattggtatacttgtggccaatgtgttgaattacttttttgccaaaatcaaaggtggatggggatggagattgagtttaggtggtgctatggtcccagcacttataataacaattggatcattagtccttcccgacacccctaactcaatgatcgaacgtggtgatcgcgatggagctaaagctcaacttaagagaattcgcggcattgaagatgttgatgaagagtttaatgacctcgtagcagctagtgaggcctcaatgcaagttgaaaacccttggagaaatttgttgcagaggaaatatagacctcagcttactatggctgtattgataccattcttccaacaatttacaggcatcaatgttatcatgttttatgcacctgtgctatttaattccattgggtttaaggacgatgcttcacttatgtcggctgtcatcaccggtgttgttaatgttgttgctacttgtgtctcaatttatggagttgataagtggggtaggagagcccttttccttgaaggtggtgctcaaatgctcatatgccaggttgcagtagcagctgcaattggggccaaatttggaacaagtggaaaccctggtaatttaccagaatggtatgctatagtagttgtgctcttcatttgcatttacgtagcaggatttgcttggtcatggggtcctcttggttggttggttcctagtgagattttcccattggagattcgttctgcagctcaaagtgtaaacgtatctgtgaacatgcttttcaccttcttagttgcacaagttttcttgataatgctttgtcacatgaagtttggtttgttcctcttctttgccttcttcgttttggtgatgtcaatctatgtattcttcttattgcctgaaactaaaggaataccaattgaagagatggacagagtttggaaatcacatcccttctggtctagatttgttgaacatggtgatcatggcaatggtgttgagatgggaaagggagctcctaaaaatgtgtaattattattattagtcttcattttattttattttcattattaattagttttattggtgaaacactaactattggtgtcaacctcaagtatcaaatgtaatgaaattgcacttcaaaattacgggattatttttctcaaaaaaaaaaaaaaaaaaaaaaaaaaaaaaaaa

SEQ ID NO: 97409 - protein, 518 aa, Medicago truncatula
MAGGGIPIGGGNKEYPGNLTPFVTITCIVAAMGGLIFGYDIGISGGVTSMDPFLKKFFPAVYRKKNKDKSTNQYCQYDSQTLTMFTSSLYLAALLSSLVASTITRRFGRKLSMLFGGLLFLVGALINGFANHVWMLIVGRILLGFGIGFANQPVPLYLSEMAPYKYRGALNIGFQLSITIGILVANVLNYFFAKIKGGWGWRLSLGGAMVPALIITIGSLVLPDTPNSMIERGDRDGAKAQLKRIRGIEDVDEEFNDLVAASEASMQVENPWRNLLQRKYRPQLTMAVLIPFFQQFTGINVIMFYAPVLFNSIGFKDDASLMSAVITGVVNVVATCVSIYGVDKWGRRALFLEGGAQMLICQVAVAAAIGAKFGTSGNPGNLPEWYAIVVVLFICIYVAGFAWSWGPLGWLVPSEIFPLEIRSAAQSVNVSVNMLFTFLVAQVFLIMLCHMKFGLFLFFAFFVLVMSIYVFFLLPETKGIPIEEMDRVWKSHPFWSRFVEHGDHGNGVEMGKGAPKNV

SEQ ID NO: 97410 - DNA, 1804 bp, Vitis vinifera
  CDS (146)..(1726)
gggccgtccccgctcggcccctggcggcgccctctctgattccccccgaataccaccctcgatatgacttctcacggccgaccaaggtcttattccttttccttggtgtctcaactgtgttgggagaggaggaagaacaggacctatggaggtgggagatgggtcttttgctcctgtaggtgtgtccaagcagagggcagaccagtacaaaggcaggctcactacttatgtggtcgttgcttgccttgttgctgctgttgggggtgcaattttcggctatgacattggggtttcaggaggcgtgacatcaatggatacatttcttgaaaaattcttccacacagtctatttaaagaagaggcgggccgaagaagaccactactgcaagtacaatgaccaaggccttgcagcatttacctcttccctctaccttgctggtttggttgcgtccattgtggcatcgcctattacaaggaagtatgggcgtcgagcaagtatagtatgtggtgggatcagctttcttattggagctgccctaaatgctgcagctgtgaacttggcgatgcttctttcgggtcggatcatgcttggtattggcattggatttggcgatcaggcagtgccactatatttgtcagagatggcgccggcccatctccgaggagccctgaacatgatgtttcagttagcaactacgacggggatcttcacagcaaacatgatcaattacggaactgcaaagctcccctcatggggatggaggctgtcattgggcctggctgcattaccagctatcttaatgacagtgggaggcctatttcttcctgagactcccaacagtctaatcgaacggggatcaagggagaaagggagacgagtcctagaaagaatcagaggtaccaacgaagttgatgcagagtttgaagacattgtggatgctagtgagcttgcaaactcaatcaagcatcctttcagaaacatccttgagagaaggaacaggccacagctggttatggcaatctgcatgccagctttccagatcctcaacggcatcaattctattctcttctatgccccagttctgtttcagaccatgggatttggaaatgctactctctactcgtccgctttgacaggggccgttcttgttttatccacagtggtttcaatcggattggtggatagattgggtagaagagttttattgatttctgggggaatccaaatggtcttatgtcaggtgacagttgccataatcctgggggtcaagttcggaagcaatgacgggctctcgaaaggctactcagtattggtggtgattgtgatctgcctctttgttatagcattcggatggtcgtgggggccacttgggtggacagttccaagtgagatattcccactggagacccgatcagcaggacagagcataacagtggttgtgaacctcctgttcaccttcataatagctcagtgtttcctttccatgctttgttctttcaagcatggaattttcctcttttttgctgggtggattgttatcatgaccctcttcgtatacttcttcctacccgaaacaaagggagttcccattgaagaaatgatattcgtgtggaagaagcattggttctggaagaggatggtgcctgggactccagatgttgacgacatcgatggcctgggaagccattcaatggagtcaggtggaaagacaaagctaggcagctgagcttaattcttctgatttcggtgaacttcaaataatccatgtagcatatggcaagccaggctcctatcatgagcaatc

SEQ ID NO: 97411 - protein, 526 aa, Vitis vinifera
MEVGDGSFAPVGVSKQRADQYKGRLTTYVVVACLVAAVGGAIFGYDIGVSGGVTSMDTFLEKFFHTVYLKKRRAEEDHYCKYNDQGLAAFTSSLYLAGLVASIVASPITRKYGRRASIVCGGISFLIGAALNAAAVNLAMLLSGRIMLGIGIGFGDQAVPLYLSEMAPAHLRGALNMMFQLATTTGIFTANMINYGTAKLPSWGWRLSLGLAALPAILMTVGGLFLPETPNSLIERGSREKGRRVLERIRGTNEVDAEFEDIVDASELANSIKHPFRNILERRNRPQLVMAICMPAFQILNGINSILFYAPVLFQTMGFGNATLYSSALTGAVLVLSTVVSIGLVDRLGRRVLLISGGIQMVLCQVTVAIILGVKFGSNDGLSKGYSVLVVIVICLFVIAFGWSWGPLGWTVPSEIFPLETRSAGQSITVVVNLLFTFIIAQCFLSMLCSFKHGIFLFFAGWIVIMTLFVYFFLPETKGVPIEEMIFVWKKHWFWKRMVPGTPDVDDIDGLGSHSMESGGKTKLGS

SEQ ID NO: 97412 - DNA, 3229 bp, Torulaspora delbrueckii; identical to SEQ ID NO: 97090
  CDS (986)..(2689)

SEQ ID NO: 97413 - protein, 567 aa, Torulaspora delbrueckii; identical to SEQ ID NO: 97091

SEQ ID NO: 97414 - DNA, 1722 bp, Saccharomyces mikatae IFO 1815; identical to SEQ ID NO: 97094
  CDS (1)..(1722)

SEQ ID NO: 97415 - protein, 573 aa, Saccharomyces mikatae IFO 1815; identical to SEQ ID NO: 97095

SEQ ID NO: 97416 - DNA, 2536 bp, Pichia angusta
  CDS (578)..(2203)
gatctctcgtgaaaactctgcgtgatggtgggacgtgtattgtttggaaattcatattcagccattattaatgggcaaacggagtaaatcctgacgtggactacctcaagtggaaattccaaaaatttttgcattgttctatttgctgcacaagcaccccatgatgtagcgtgcacaatagaccacgggctgtttttagaacaacaacaatacggtcactctcgcgactggggaaatgtggggccggccgtgcacggcgttgaaagggtctttatccgagaaatagtcttccaggcgagaaagaagagtgtagtaagacctgttgcaaacttggccatgatgaacagtacgacccacacaggaccgtaagtgaggactatcctgatgtttttacccttcccgttccaaatatttttccattgccttgctgcatgcagcacaacaaaagtccagatttttctccccaccttttctcaaaaaaacctggggggctattggacatccattgtttacccttggtataaatacgtgttgtatccccagcaatttctcccgtatccaatcaactattacaaacatggctggcgacagtattactggtgtggcaggaactgctgacgttaacagagtcgaggctcccttgactgtgagagcttatcttatgtgcgcctttggtgcgtttggaggtatccttttcggatacgactccggttacatttccggtgtcatgggtatggactactttatccatgaattcactggaaaggtgaaacacggcgacgatgactcctcttttgtcgttggatcgtctcaaaaatctcttattacttctattctttctgcaggtaccttttttggtgctgtgtgtgccggagacttggccgacatgtttggaagaagaaccattattgtgaccggctgcagtatctactcggtcggtgttgcgctccaggttgcctccaccacggtggctctgctttccgtaggaagagttatagcaggtgttggtgttggttttgtttcgtccgtggtggttttgtatctgtctgaaatttctccaaagaaaatcagaggtgccatcgtttccggttaccagttcttcgtcaccatcggattgctgctcgcgtcctgtgttgactacggcaccgagcacagaaacgactccggctcctacagaatccctattgctctgcaactcatctgggccatcattcttgctgtcggactcatcttgctcccagaatctcctagatactacgtcctcaagggcaagtttgacagggctgcaaaggtgctctccagacttaggggccagcctatcgattccgactacattcaagaagaactcgccgagatcgtggccaaccacgagtacgagaggagcgtcattccaactacgagctactggcaatcctgggcagcttgtttcaccggaggactcagaagaccatcctcgaacctcagaaagaccatcctcggaacctccatgcagatgatgcagcaatggaccggtgtcaacttcatcttctacttcggtaccaccttcttccagcagcttggcaccatccacaatgagttcctgatctcgatgatcactacgatcgtcaatgtggcctcaactcctctgtccttctacacgatcgagaaattcggtcgtcgtgcgctcatgatctacggtgcagcaggtatggttgtgtgtcagtttatcgtggccattggtggtaccgttgatggcgacaatcagaaaaccgtcagcgccatgatcgccttcatctgcatctacattttcttctttgcttcgacctggggtccgggagcttgggttattatcggagagatcttcccattgccaatcagatcgagaggtgttggtctgtcgaccgcctccaactggttgtggaactgtatcattgccgttatcactccttacatggttgacggcgataagggcaatttgggtgctaaggtgttcttcatctggggctcgctatgtggttgctgtcttctttatgccattatgctgatcccagaaaccaagggcctgactttggagcaagtcgacaagatgcttgaggagaccaccccatggacctctgccaaatggaaacctcactccaccttcgctgccgagatgggtcttgccaaggacgacaagggcgtcacccacgagctcaaggagcacgccagcgttgagagtgtataggcgtttagtatgtatactacggctaatatgacattatgagcgatccgaagagggcggggcacgagagtgccagatacactgtattgcggactctcgggaatggtgccgaatcgatggtgtatttttgtgctctgcaacggtgaattttcggtgagtagttgacctttttttacggccaaatacagattgatcttctcatctcgacatttgcatggtgttcaagcagtcgtagctgatttcaagctgcagcatgtgaggtctaaaacagttttgccaggccgtcgctgttggcctccctgtataatgtccggtcatccaaacgttaaaggttgc

SEQ ID NO: 97417 - protein, 541 aa, Pichia angusta; identical to SEQ ID NO: 97105

SEQ ID NO: 97418 - DNA, 1764 bp, Datisca glomerata
  CDS (79)..(1650)
cccttctctctttatctccttttcatcactcccctctttctctcctcgcaaaagaagtcagagataaaggacgaaaacatgccggccgtcggaggaatcgttgtcggtggcagtaaaaaggagtatcccggcaaccttactccttatgtcaccataacatgcattgttgccgctatgggtggtctgattttcggttacgatattggaatttcaggtggggtgacgtcaatggattcattcttgaagaaattcttcccggcggtttaccggaaaaaagagttggattcgacgacgaaccagtactgtcagtacgacagtcagactctgacgatgttcacgtcttctctttatttggctgctctgctcgcttcgatagtggcttccaccatcacccgtaaattcggcaggagattatccatgctcttcggcggcattctgttctgtgccggtgctatcatcaatggcttcgcccaggctgtttggatgctcattctcggtcgtatgtttctcggttttggtattgggttttccaatcagtctgtgccactctacctctcagagatggctccctacaagtacagaggagcattaaacataggcttccaattatcaatcacaattggaatattggtagcaaatgtgttaaattacttctttgccaagatcaggggcggctggggatggcggttgagcttaggtggcgcaatggtcccagcccttatcatcacggtcggatcgctactccttcccgacacacccaactcattaatcgagcgtggcaaccgagacgaagcccgcagcaaactccaaagggttcgaggcgttgatgacgtggacgaggagtttaacgatctggtggcggcaagtgaagagtcaaagcaagtggaacatccttggactaacctgttgaggaggaagtacagacctcatcttgcaatggctatactaattcctttcttccagcaacttaccggcatcaatgtgattatgttttacgcgcctgttttgtttaacaccattgggtttggaagtgatgcttcgctcatgtcggctgtgattactggctgtgttaatgtcgctgggactttggtttctatttatggggttgataagtggggaaggaggttccttttccttgagggtggatttcaaatgttgatttgccaggcggttgtagcagctgcaattggtgctaaatttggagtaaatggaaatccaggagaactgccaaaatggtatgcgatagtggtggtgctgttcatatgcatatatgtagcagggttctcttggtcatggggtcctctaggttggctagtgccaagtgaaagtttccccttagaaatacggtcagctgctcaaagtatcaatgtctctgtcaacatgatcttcacatttgctatagctcaaatcttcttgacaatgctttgccacttgaaattcggtttattcattttcttcgccttcttcgtggttgtcatgtctatcttcgtctacttcttcttgcccgagactaagggaatcccgatcgaagagatgggcagagtatggaagtcacattggtactggtcaagatttgttactgatgctgattacactattggatcaggagttgagatgggaaagggagcgcaggagcttaagaatatttaagtttaatgtttggggggagggttatttttagattatttttttctatctagtaaatagaagtttgggtcaatattaaattaagaacatatgaatgggtcaaatttgatgtatctg

SEQ ID NO: 97419 - protein, 523 aa, Datisca glomerata
MPAVGGIVVGGSKKEYPGNLTPYVTITCIVAAMGGLIFGYDIGISGGVTSMDSFLKKFFPAVYRKKELDSTTNQYCQYDSQTLTMFTSSLYLAALLASIVASTITRKFGRRLSMLFGGILFCAGAIINGFAQAVWMLILGRMFLGFGIGFSNQSVPLYLSEMAPYKYRGALNIGFQLSITIGILVANVLNYFFAKIRGGWGWRLSLGGAMVPALIITVGSLLLPDTPNSLIERGNRDEARSKLQRVRGVDDVDEEFNDLVAASEESKQVEHPWTNLLRRKYRPHLAMAILIPFFQQLTGINVIMFYAPVLFNTIGFGSDASLMSAVITGCVNVAGTLVSIYGVDKWGRRFLFLEGGFQMLICQAVVAAAIGAKFGVNGNPGELPKWYAIVVVLFICIYVAGFSWSWGPLGWLVPSESFPLEIRSAAQSINVSVNMIFTFAIAQIFLTMLCHLKFGLFIFFAFFVVVMSIFVYFFLPETKGIPIEEMGRVWKSHWYWSRFVTDADYTIGSGVEMGKGAQELKNI

SEQ ID NO: 97420 - DNA, 1545 bp, Aspergillus niger; identical to SEQ ID NO: 97106
  CDS (1)..(1545)

SEQ ID NO: 97421 - protein, 514 aa, Aspergillus niger; identical to SEQ ID NO: 97107

SEQ ID NO: 97422 - DNA, 1752 bp, Aspergillus niger; identical to SEQ ID NO: 97108
  CDS (1)..(1752)

SEQ ID NO: 97423 - protein, 583 aa, Aspergillus niger; identical to SEQ ID NO: 97109

SEQ ID NO: 97424 - DNA, 1593 bp, Aspergillus niger; identical to SEQ ID NO: 97110
  CDS (1)..(1593)

SEQ ID NO: 97425 - protein, 530 aa, Aspergillus niger; identical to SEQ ID NO: 97111

SEQ ID NO: 97426 - DNA, 1569 bp, Uromyces fabae
  CDS (1)..(1569)
atgcctgcggttatggccggcccggtctctttcgccccgccggagggtaaatctagtaaggtcgcgattgtcattgctgtatttgccgcctttggtggcttcttatatggatatgacactggttacattgccggagttaaagccatgcccttttggctacgctctgctggacagcgcggacctgatggtaaatacatgatcactacaagccaagactcaatggttactagtattctttcagttgggactttcgtgggagctcttttagcctatcctatcggtgacaggttcggacgaagaattggcataatgattgcctgtgcaattttttctgttggtgttgctctgcaaactgcctcaaccaagataccaatgttcgtcgtcggcagagtttttgctggcttaggagttggggtagcttcttgtcttgtgccaatgtatcaatcagaatgtgcaccaaaatggatacgtggagggattgtcgcgtgctaccaatgggctattaccattggtttattagttgcctcaattacggtcaacgcaacgaaagatttcgacagtgccaactcataccgcattcccattggtattcagtttatttgggctgcaatccttactatcggtttgcttgtgttacccgaatcgccgagatacttactactcaagggcagggaagacgaggcttggaaatctttaagtcgcctctacagcgctccatacgatgacccagatgtacaagcagaattctcagaaatcatggctagtttggaaaaagagagatcgttcggaaaaaccacgttactagactgcttcaaaacagacaaaagaaaaaatctccaaaggactttgacaggtttgggcgttcagggatggcaacaagcgtcgggaattaattttttcttttattacggtacaacgttcttcaaaaatgcgggaatcgaaaacgcgtttctagtgacggtcgcaactaatgtagtcaatgtggttatgactataccaggaatttgggccgtagacaaagtaggtcgcagaacgatgatgatttgtggggcagcgatgatgttcacatgtgaacttatcctggcttgcgttggtactttcactgcaactagcaacctagcctcgcagaaagttctcgtggccttctcttgtatcttcatcggtctttttgcggccacttggggcccgattccctgggttgtgacaagcgagatttatccgctcgcgacccgtggtaagcaaatggcaatgtcaaccgcctcaaattgggcagtgaattttttcattggtttcattacgccatacttggtcgattcgggtgccggtcaagccggcttgggtgttaaagtcttctggctttgggctgctttgtgctttggagccatggtgttctcattcttacttatccctgagacgaaaggactttcgctggagcaagttgacctcctttacactaattctaccgtccttaagagcaatacctacaggagccagttgatcgcaaacaacttgcacgagggtatgacacctgcagaaaaggcataccaagagaaattggaacatatttga

SEQ ID NO: 97427 - protein, 522 aa, Uromyces fabae
MPAVMAGPVSFAPPEGKSSKVAIVIAVFAAFGGFLYGYDTGYIAGVKAMPFWLRSAGQRGPDGKYMITTSQDSMVTSILSVGTFVGALLAYPIGDRFGRRIGIMIACAIFSVGVALQTASTKIPMFVVGRVFAGLGVGVASCLVPMYQSECAPKWIRGGIVACYQWAITIGLLVASITVNATKDFDSANSYRIPIGIQFIWAAILTIGLLVLPESPRYLLLKGREDEAWKSLSRLYSAPYDDPDVQAEFSEIMASLEKERSFGKTTLLDCFKTDKRKNLQRTLTGLGVQGWQQASGINFFFYYGTTFFKNAGIENAFLVTVATNVVNVVMTIPGIWAVDKVGRRTMMICGAAMMFTCELILACVGTFTATSNLASQKVLVAFSCIFIGLFAATWGPIPWVVTSEIYPLATRGKQMAMSTASNWAVNFFIGFITPYLVDSGAGQAGLGVKVFWLWAALCFGAMVFSFLLIPETKGLSLEQVDLLYTNSTVLKSNTYRSQLIANNLHEGMTPAEKAYQEKLEHI

SEQ ID NO: 97428 - DNA, 1956 bp, Solanum lycopersicum
  CDS (61)..(1632)
tatcatcttcttattgttattttaactaccacatttgaagccggaaaacttagtaacacgatggccggtggaggatttacgacctccggtaacggaggcacgcatttcgaggctaaaatcacaccaattgttatcatatcttgtattatggctgctaccggaggtctcatgtttggttatgatgttggagtttctggtggtgttacatcaatggatccatttttaaaaaaattctttccaacagtttataagagaacaaaggagccaggattagacagtaattactgtaaatacgataatcaagggttacaattatttacttcatcgttatacctagctggtttaacggcgacgttttttgcttcttacactacaagaaaacttggccggagattaactatgttaatcgccggttgttttttcattattggagttgtactaaatgctgctgctcaagatttagctatgcttattattggaagaattctccttggttgtggcgttggtttcgccaatcaggctgttccattatttttatcagaaatagcacctacaagaattcgtggaggacttaacattttgttccaacttaacgtaactattggtattctttttgccaatctcgtcaactacggaacagccaagattagtggaggatggggatggagattatcattagggttagctggatttccagcagtattgttgactttgggcgcattatttgttgttgaaaccccaaacagtttgattgaaagaggttacttagaagaaggcaaagaagtacttcgaaaaatcagaggtaccgacaacattgaacctgaattcttggaacttgttgaggctagtcgtgttgctaaacaagtcaaacaccctttcagaaatttactccaacgtaaaaatagacctcaattaatcatctctgttgccctccagatattccaacaatttacaggaatcaacgctattatgttctacgcacctgttttattttcaacactagggtttggaaacagcgcagctctttactcagctgtcatcaccggagcagtcaacgttctctccaccgttgtctcagtctactccgttgacaagctcggacgacgagtcctcctcctggaagctggggtccaaatgttactatctcaaataataatcgctataatcctaggtatcaaagttactgatcattcagacaaccttagccatggttggggaatcttcgtagtagttctgatctgtacatatgtatcggctttcgcatggtcatggggcccacttggatggttaattcctagcgagacgttccctttggaaactcgttcagctggtcaaagtgtaacagtgtgtgttaacttgcttttcacgtttgttatggcacaagcatttctctcaatgctttgtcatttcaagtatgggatattcttgttcttctcggggtggatttttgtgatgtcgttgttcgttttcttcttgttgcctgagacgaagaatgttcctattgaggagatgacggagagggtgtggaagcaacattggctgtggaagaggtttatggtggatgaagatgatgttgatatgattaaaaagaatggacatgctaacggatatgatcccacttctcggttgtaaaataaaaaataaaagaatattagcggtgttttacgttgattttatcatagtaaagatgcgtagaaataaatcaaacatgcaagagagagatcagagtctactgtctagtctagtgatatcgataagtgtttctcacaaaataggtgtgcatttggattttttttactgcttgttttcctcctttatatcgttcaatgtagtagaaattgtttagccaaagtgtaagagatgcaatatggtgataatttatgtaaccatatagcctatgtatattagagatttggtataatacattttgggaaagcactttgataaaaaaaaaaa

SEQ ID NO: 97429 - protein, 523 aa, Solanum lycopersicum
MAGGGFTTSGNGGTHFEAKITPIVIISCIMAATGGLMFGYDVGVSGGVTSMDPFLKKFFPTVYKRTKEPGLDSNYCKYDNQGLQLFTSSLYLAGLTATFFASYTTRKLGRRLTMLIAGCFFIIGVVLNAAAQDLAMLIIGRILLGCGVGFANQAVPLFLSEIAPTRIRGGLNILFQLNVTIGILFANLVNYGTAKISGGWGWRLSLGLAGFPAVLLTLGALFVVETPNSLIERGYLEEGKEVLRKIRGTDNIEPEFLELVEASRVAKQVKHPFRNLLQRKNRPQLIISVALQIFQQFTGINAIMFYAPVLFSTLGFGNSAALYSAVITGAVNVLSTVVSVYSVDKLGRRVLLLEAGVQMLLSQIIIAIILGIKVTDHSDNLSHGWGIFVVVLICTYVSAFAWSWGPLGWLIPSETFPLETRSAGQSVTVCVNLLFTFVMAQAFLSMLCHFKYGIFLFFSGWIFVMSLFVFFLLPETKNVPIEEMTERVWKQHWLWKRFMVDEDDVDMIKKNGHANGYDPTSRL

SEQ ID NO: 97430 - DNA, 1560 bp, Vitis vinifera
  CDS (1)..(1560)
atgccggctgtcggaggctttgataagggtaccgggaaggcctatcccggtaaccttactccttacgtgactgtgacatgtgttgttgcagccatgggtggtttgatctttggttacgatattggaatttctggtggggtcacgtccatggctccgttcttgcagaagttcttcccttctgtgtaccggaaggaggctttggacaagtccacgaatcagtactgtaagtttgatagtgagacactgacgttgttcacatcgtcgctttatctggctgctcttctctcgtcgctggtggccgcgacggtgacccgaaagttcgggagaaagctgtcaatgctattcggaggactgctcttttgtgccggtgccatcatcaatggcgctgctaaagctgtttggatgttgattgtcggtcgtatactgctgggttttggtattgggtttgccaatcagtctgtgccgctctacctctctgagatggctccatacaaatacagaggagccctcaacattggcttccaattatccatcacaattggtattcttgtggccaatatattgaactacttctttgcaaagatcaaggggggttggggatggaggttgagcttgggtggcgctgtggtccctgcgctcatcatcaccgtcgggtcccttgtcctcccggacacacccaactccatgatcgagcgtgggcagcacgagggagcgaaaacaaaactgagaagaatccggggtgtcgatgatgttgaagaggaattcaatgaccttgttgtagccagtgaagcctccaagcttgttgagcacccctggagaaatctcttgcagaggaagtacaggccacacctcacaatggccatcctcattcccttcttccagcagcttaccgggattaatgtcattatgttttatgcccctgttctcttcaaaaccattggctttgcggatgatgcttccctgatgtctgctgtgataaccggcggggttaatgttcttgcaaccatagtttcaatctacggtgttgataagtggggaagaaggtttcttttccttgagggtggcactcaaatgctcatatgtcaggttattgtggcaacgtgcattggtgttaaattcggagtggatggagaacctggtgctttgcccaagtggtatgccatagttgtggtgctgttcatttgcgtctatgtttcagggtttgcatggtcctggggtcctctaggttggttggtccctagtgaaattttccccctggaaatccgatctgctgcacagagtgtaaacgtctccgttaacatgtttttcacattcatcatagcccaaatcttcttaaatatgctgtgtcacatgaagtttggtttgttcctcttctttgccttctttgtggtggtgatgtccttcttcatttacttcttcttgcctgagaccaagggcatcccaattgaagagatggctgaagtatggaaaagtcactggttctggtcccggtatgtcaacgatggttcttacagcggcgtcgaactggtcaaggaaaactaccctgttaagaatgtatga

SEQ ID NO: 97431 - protein, 519 aa, Vitis vinifera
MPAVGGFDKGTGKAYPGNLTPYVTVTCVVAAMGGLIFGYDIGISGGVTSMAPFLQKFFPSVYRKEALDKSTNQYCKFDSETLTLFTSSLYLAALLSSLVAATVTRKFGRKLSMLFGGLLFCAGAIINGAAKAVWMLIVGRILLGFGIGFANQSVPLYLSEMAPYKYRGALNIGFQLSITIGILVANILNYFFAKIKGGWGWRLSLGGAVVPALIITVGSLVLPDTPNSMIERGQHEGAKTKLRRIRGVDDVEEEFNDLVVASEASKLVEHPWRNLLQRKYRPHLTMAILIPFFQQLTGINVIMFYAPVLFKTIGFADDASLMSAVITGGVNVLATIVSIYGVDKWGRRFLFLEGGTQMLICQVIVATCIGVKFGVDGEPGALPKWYAIVVVLFICVYVSGFAWSWGPLGWLVPSEIFPLEIRSAAQSVNVSVNMFFTFIIAQIFLNMLCHMKFGLFLFFAFFVVVMSFFIYFFLPETKGIPIEEMAEVWKSHWFWSRYVNDGSYSGVELVKENYPVKNV

SEQ ID NO: 97432 - DNA, 1395 bp, Bacillus subtilis
  CDS (1)..(1395): transl_table=11
atgaagaatactccaactcaattagaaccaaatgttcctgtaacaagaagccattcaatgggatttgtcattttgatctcatgtgcggcggggcttggcggcttattgtatggctatgacacggcagtgatttctggcgccatcggttttctgaaagatttatacagcctgagtccgtttatggagggacttgtcatttcaagcattatgattggaggagttgtgggcgtcgggatatccggatttttaagtgacagattcggccggagaaaaattttaatgacagccgctttgttatttgcgatatcagcaatcgtttcagcgctttctcaagacgtgtccaccttaatcattgcaaggattatcggggggctgggaatcgggatgggctcatcgctctctgttacgtatattacagaagcggcaccgcccgctatacgcggaagtttatcttcgttatatcagctctttacgatactgggtatttccgcaacatactttattaatctagctgtgcagcggtccggaacatacgaatggggcgtgcacaccggctggagatggatgcttgcttatggaatggtgccatccgtcatttttttccttgtcctgctcgtcgtcccggaaagtccgagatggctggcgaaagcgggcaaaacaaatgaagctttaaagatcctgacacgtattaatggagaaactgttgcaaaagaagaattaaagaacattgagaactctttaaaaatagaacaaatggggtcgctctcccagctgtttaagccgggtctcagaaaggcgcttgtcattggaatcctgctggcgctgtttaaccaagtcatcggcatgaacgcgattacttactacgggccggaaatctttaaaatgatgggattcgggcaaaacgccggatttgtgacgacttgtatcgtcggggttgtagaagttatttttaccgttattgcggtgttgctgattgataaagtcggacgaaaaaaactgatgtccatcggttctgcttttatggctatttttatgattttaatcgggacgtcgttttattttgagttaacaagcgggatcatgatgatcgtccttatattaggttttgtcgctgctttctgtgtctcggtcggaccgatcacatggattatgatttctgaaatcttcccgaaccatctgcgtgcgcgggccgcgggcattgcgaccatctttttatggggagcaaactgggcgatcggacagtttgtgccaatgatgatcgattctttcgggctcgcctatacattttggatctttgcggtgattaacatcctttgtttcctgtttgtcgttacgatctgtccagaaacgaagaacaaatcgctcgaggaaattgaaaagctttggataaaatga

SEQ ID NO: 97433 - protein, 464 aa, Bacillus subtilis
MKNTPTQLEPNVPVTRSHSMGFVILISCAAGLGGLLYGYDTAVISGAIGFLKDLYSLSPFMEGLVISSIMIGGVVGVGISGFLSDRFGRRKILMTAALLFAISAIVSALSQDVSTLIIARIIGGLGIGMGSSLSVTYITEAAPPAIRGSLSSLYQLFTILGISATYFINLAVQRSGTYEWGVHTGWRWMLAYGMVPSVIFFLVLLVVPESPRWLAKAGKTNEALKILTRINGETVAKEELKNIENSLKIEQMGSLSQLFKPGLRKALVIGILLALFNQVIGMNAITYYGPEIFKMMGFGQNAGFVTTCIVGVVEVIFTVIAVLLIDKVGRKKLMSIGSAFMAIFMILIGTSFYFELTSGIMMIVLILGFVAAFCVSVGPITWIMISEIFPNHLRARAAGIATIFLWGANWAIGQFVPMMIDSFGLAYTFWIFAVINILCFLFVVTICPETKNKSLEEIEKLWIK

SEQ ID NO: 97434 - DNA, 1725 bp, Saccharomyces cerevisiae; identical to SEQ ID NO: 97114
  CDS (1)..(1725)

SEQ ID NO: 97435 - protein, 574 aa, Saccharomyces cerevisiae; identical to SEQ ID NO: 97115

SEQ ID NO: 97436 - DNA, 1674 bp, Schizosaccharomyces pombe; identical to SEQ ID NO: 97116
  CDS (1)..(1674)

SEQ ID NO: 97437 - protein, 557 aa, Schizosaccharomyces pombe; identical to SEQ ID NO: 97117

SEQ ID NO: 97438 - DNA, 1596 bp, Schizosaccharomyces pombe; identical to SEQ ID NO: 97118
  CDS (1)..(1596)

SEQ ID NO: 97439 - protein, 531 aa, Schizosaccharomyces pombe; identical to SEQ ID NO: 97119

SEQ ID NO: 97440 - DNA, 1668 bp, Schizosaccharomyces pombe; identical to SEQ ID NO: 97120
  CDS (1)..(1668)

SEQ ID NO: 97441 - protein, 555 aa, Schizosaccharomyces pombe; identical to SEQ ID NO: 97121

SEQ ID NO: 97442 - DNA, 1674 bp, Schizosaccharomyces pombe; identical to SEQ ID NO: 97122
  CDS (1)..(1674)

SEQ ID NO: 97443 - protein, 557 aa, Schizosaccharomyces pombe; identical to SEQ ID NO: 97123

SEQ ID NO: 97444 - DNA, 1641 bp, Schizosaccharomyces pombe; identical to SEQ ID NO: 97124
  CDS (1)..(1641)

SEQ ID NO: 97445 - protein, 546 aa, Schizosaccharomyces pombe; identical to SEQ ID NO: 97125

SEQ ID NO: 97446 - DNA, 1608 bp, Schizosaccharomyces pombe; identical to SEQ ID NO: 97126
  CDS (1)..(1608)

SEQ ID NO: 97447 - protein, 535 aa, Schizosaccharomyces pombe; identical to SEQ ID NO: 97127

SEQ ID NO: 97448 - DNA, 1605 bp, Chlorella kessleri
  CDS (1)..(1605)
atggccggcggtggtgtagttgttgtctcgggccgcggcctcagcacaggagactaccgtggaggcctcactgtctatgttgtgatggtggccttcatggcagcctgcggtggcctgctcctgggctatgacaacggtgtgactggtggcgtcgtctccctggaggcctttgagaagaagttcttcccagatgtgtgggccaagaagcaagaagtgcacgaggacagcccctactgcacctacgacaacgccaagctgcagctctttgtgtcctctctcttcctggcgggtctggtgtcatgcctgttcgcctcctggatcacccgcaactggggccgcaaggtcaccatgggcattggtggcgccttctttgttgccggtggcctagtcaacgcctttgcccaggacatggccatgctgattgtcggccgcgtgctgcttggttttggcgtcggccttggcagccaggtggtaccccagtacctgtctgaggttgcccccttctcccaccgcggcatgctcaacatcggctaccagctctttgtcaccatcggcatcctcatcgccggcctagtcaactatgccgtgagggactgggagaacgggtggcgtctgtccctgggtcctgctgccgcccctggtgccatcctgttcctaggctccctggtgctgccagagtcccccaacttccttgtagagaagggcaagaccgagaagggccgtgaggtgctgcaaaagctctgcggcaccagcgaggttgacgctgagtttgcagacattgtggccgctgtcgagattgcccgtcccatcaccatgcgccagagctgggcctcattgttcacccgccgctacatgccccagctactgaccagctttgtcatccagttcttccagcagttcaccggcatcaacgccatcatcttctacgtgcctgtcctcttctcatctctgggaagtgccaactctgccgccctgctcaacaccgtggtggtgggcgctgtcaacgtgggcagcaccttgattgccgtcatgttctcggacaagtttggccgccgcttcctgctcattgagggtggcatccagtgctgcctggccatgcttacaactggcgttgtcctagccatcgagtttgccaagtatggcactgaccccctgcccaaggccgtggcctctggcatcctggctgtgatctgcatcttcatctccggctttgcgtggtcctggggccccatgggctggctcatcccctccgagatcttcaccctggagacccgccctgccggcactgccgtggccgtggtcggcaacttcctgttctctttcgtcattggccaggccttcgtgtccatgctctgcgccatggagtatggagtcttcctcttctttgctggctggttggtgatcatggtgctgtgtgccatcttcctgctgcctgagaccaagggggtgcccatcgagcgcgtccaggcactctatgcccgccactggttctggaacagggtgatgggtcccgctgccgctgaggtcattgctgaggacgagaagcgtgtggcagccgcaagcgccatcatcaaggaggaggagctgtcaaaggcgatgaagtaa

SEQ ID NO: 97449 - protein, 534 aa, Chlorella kessleri
MAGGGVVVVSGRGLSTGDYRGGLTVYVVMVAFMAACGGLLLGYDNGVTGGVVSLEAFEKKFFPDVWAKKQEVHEDSPYCTYDNAKLQLFVSSLFLAGLVSCLFASWITRNWGRKVTMGIGGAFFVAGGLVNAFAQDMAMLIVGRVLLGFGVGLGSQVVPQYLSEVAPFSHRGMLNIGYQLFVTIGILIAGLVNYAVRDWENGWRLSLGPAAAPGAILFLGSLVLPESPNFLVEKGKTEKGREVLQKLCGTSEVDAEFADIVAAVEIARPITMRQSWASLFTRRYMPQLLTSFVIQFFQQFTGINAIIFYVPVLFSSLGSANSAALLNTVVVGAVNVGSTLIAVMFSDKFGRRFLLIEGGIQCCLAMLTTGVVLAIEFAKYGTDPLPKAVASGILAVICIFISGFAWSWGPMGWLIPSEIFTLETRPAGTAVAVVGNFLFSFVIGQAFVSMLCAMEYGVFLFFAGWLVIMVLCAIFLLPETKGVPIERVQALYARHWFWNRVMGPAAAEVIAEDEKRVAAASAIIKEEELSKAMK

SEQ ID NO: 97450 - DNA, 1605 bp, Chlorella kessleri
  CDS (1)..(1605)
atggccggcggcgcaatagtagcttcaggaggggcttcccgcagttcagagtatcaaggcggtcttacagcctatgtcttgctggtagccttggttgccgcctgcggtgggatgctgttgggctatgacaatggcgtcaccggaggtgtagcctccatggagcagtttgagaggaagttcttccctgatgtgtatgagaagaagcagcagattgtggagaccagcccatactgcacctacgacaacccgaagctgcagctctttgtgtcctcgctgttcctggcgggtctcatctcctgcatcttctctgcctggatcacccgcaactggggccgcaaggccagcatgggtattggcggtatcttcttcatcgctgctggtggcctggtcaatgcattcgcccaggacattgccatgctcatcgtcggccgcgtcctgctgggttttggcgttggccttggcagccaggtggttccccagtacttgtctgaggttgcccccttctcccaccgcggcatgctcaacatcggctaccagctgtttgtcaccatcggcatcctcatcgcaggactcgtcaactacggcgtgaggaactgggacaatggctggcgcctgtccctgggtctggctgccgtccccggcctcatcctgctgctgggagctattgtcctgcccgagtcccccaacttcctggtggagaagggccgcactgaccagggtcgtcgcatcctggagaagctgcggggcacctcccatgtagaagctgagtttgccgacatcgtggcagcagtcgagattgctcgtcccattaccatgcgtcagagctggaggtcactctttacccgccgctacatgccccagctgttgaccagctttgtcatccagttcttccagcagttcaccggcatcaacgccatcatcttctacgtgcctgtgctcttctcctccctgggaagtgccagctccgcagccctgctcaacactgtcgtggtgggcgctgtcaacgtgggcagcaccatgattgccgtcctcttgtccgacaagtttggccgccgcttcctgctcattgagggcggcattacgtgctgcctggccatgcttgcggccggtattacccttggtgtggagtttggacagtacggcactgaggacctgccccaccccgtctctgctggtgtcctggctgtcatctgtatcttcattgctggatttgcgtggtcctggggccccatgggctggctcatcccctctgagatcttcaccctggagacccgccctgccggcactgccgtggctgtcatgggcaacttcctgttctccttcgtcattggccaggccttcgtgtccatgctttgcgccatgaagtttggcgtcttcctcttcttcgctggctggttggtgattatggttctgtgtgccatcttcctgttgcccgagaccaagggtgtgcccatcgagcgtgtccaggcactctacgcccgccactggttctggaagaaggtaatgggtcctgctgcccaggagatcattgctgaggatgagaagcgtgtggctgcctcccaggctatcatgaaggaggagaggatctctcagaccatgaagtaa

SEQ ID NO: 97451 - protein, 534 aa, Chlorella kessleri
MAGGAIVASGGASRSSEYQGGLTAYVLLVALVAACGGMLLGYDNGVTGGVASMEQFERKFFPDVYEKKQQIVETSPYCTYDNPKLQLFVSSLFLAGLISCIFSAWITRNWGRKASMGIGGIFFIAAGGLVNAFAQDIAMLIVGRVLLGFGVGLGSQVVPQYLSEVAPFSHRGMLNIGYQLFVTIGILIAGLVNYGVRNWDNGWRLSLGLAAVPGLILLLGAIVLPESPNFLVEKGRTDQGRRILEKLRGTSHVEAEFADIVAAVEIARPITMRQSWRSLFTRRYMPQLLTSFVIQFFQQFTGINAIIFYVPVLFSSLGSASSAALLNTVVVGAVNVGSTMIAVLLSDKFGRRFLLIEGGITCCLAMLAAGITLGVEFGQYGTEDLPHPVSAGVLAVICIFIAGFAWSWGPMGWLIPSEIFTLETRPAGTAVAVMGNFLFSFVIGQAFVSMLCAMKFGVFLFFAGWLVIMVLCAIFLLPETKGVPIERVQALYARHWFWKKVMGPAAQEIIAEDEKRVAASQAIMKEERISQTMK

SEQ ID NO: 97452 - DNA, 1641 bp, Saccharomyces cerevisiae; identical to SEQ ID NO: 97130
  CDS (1)..(1641)

SEQ ID NO: 97453 - protein, 546 aa, Saccharomyces cerevisiae; identical to SEQ ID NO: 97131

SEQ ID NO: 97454 - DNA, 1704 bp, Saccharomyces cerevisiae; identical to SEQ ID NO: 97132
  CDS (1)..(1704)

SEQ ID NO: 97455 - protein, 567 aa, Saccharomyces cerevisiae; identical to SEQ ID NO: 97133

SEQ ID NO: 97456 - DNA, 1623 bp, Saccharomyces cerevisiae; identical to SEQ ID NO: 97136
  CDS (1)..(1623)

SEQ ID NO: 97457 - protein, 540 aa, Saccharomyces cerevisiae; identical to SEQ ID NO: 97137

SEQ ID NO: 97458 - DNA, 1704 bp, Saccharomyces cerevisiae; identical to SEQ ID NO: 97138
  CDS (1)..(1704)

SEQ ID NO: 97459 - protein, 567 aa, Saccharomyces cerevisiae; identical to SEQ ID NO: 97139

SEQ ID NO: 97460 - DNA, 1704 bp, Saccharomyces cerevisiae; identical to SEQ ID NO: 97140
  CDS (1)..(1704)

SEQ ID NO: 97461 - protein, 567 aa, Saccharomyces cerevisiae; identical to SEQ ID NO: 97141

SEQ ID NO: 97462 - DNA, 1695 bp, Saccharomyces cerevisiae; identical to SEQ ID NO: 97142
  CDS (1)..(1695)

SEQ ID NO: 97463 - protein, 564 aa, Saccharomyces cerevisiae; identical to SEQ ID NO: 97143

SEQ ID NO: 97464 - DNA, 1713 bp, Saccharomyces cerevisiae; identical to SEQ ID NO: 97144
  CDS (1)..(1713)

SEQ ID NO: 97465 - protein, 570 aa, Saccharomyces cerevisiae; identical to SEQ ID NO: 97145

SEQ ID NO: 97466 - DNA, 1626 bp, Saccharomyces cerevisiae; identical to SEQ ID NO: 97146
  CDS (1)..(1626)

SEQ ID NO: 97467 - protein, 541 aa, Saccharomyces cerevisiae; identical to SEQ ID NO: 97147

SEQ ID NO: 97468 - DNA, 1731 bp, Saccharomyces cerevisiae; identical to SEQ ID NO: 97150
  CDS (1)..(1731)

SEQ ID NO: 97469 - protein, 576 aa, Saccharomyces cerevisiae; identical to SEQ ID NO: 97151

SEQ ID NO: 97470 - DNA, 1779 bp, Saccharomyces cerevisiae; identical to SEQ ID NO: 97152
  CDS (1)..(1779)

SEQ ID NO: 97471 - protein, 592 aa, Saccharomyces cerevisiae; identical to SEQ ID NO: 97153

SEQ ID NO: 97472 - DNA, 1713 bp, Saccharomyces cerevisiae; identical to SEQ ID NO: 96986
  CDS (1)..(1713)

SEQ ID NO: 97473 - protein, 570 aa, Saccharomyces cerevisiae; identical to SEQ ID NO: 96987

SEQ ID NO: 97474 - DNA, 1710 bp, Saccharomyces cerevisiae; identical to SEQ ID NO: 97154
  CDS (1)..(1710)

SEQ ID NO: 97475 - protein, 569 aa, Saccharomyces cerevisiae; identical to SEQ ID NO: 97155

SEQ ID NO: 97476 - DNA, 1704 bp, Saccharomyces cerevisiae; identical to SEQ ID NO: 97156
  CDS (1)..(1704)

SEQ ID NO: 97477 - protein, 567 aa, Saccharomyces cerevisiae; identical to SEQ ID NO: 97157

SEQ ID NO: 97478 - DNA, 1701 bp, Kluyveromyces lactis; identical to SEQ ID NO: 97158
  CDS (1)..(1701)

SEQ ID NO: 97479 - protein, 566 aa, Kluyveromyces lactis; identical to SEQ ID NO: 97159

SEQ ID NO: 97480 - DNA, 1704 bp, Kluyveromyces lactis; identical to SEQ ID NO: 97160
  CDS (1)..(1704)

SEQ ID NO: 97481 - protein, 567 aa, Kluyveromyces lactis; identical to SEQ ID NO: 97161

SEQ ID NO: 97482 - DNA, 1785 bp, Neurospora crassa; identical to SEQ ID NO: 97162
  CDS (1)..(1785)

SEQ ID NO: 97483 - protein, 594 aa, Neurospora crassa; identical to SEQ ID NO: 97163

SEQ ID NO: 97484 - DNA, 1861 bp, Ricinus communis
  CDS (102)..(1670)
tttagccctcaagacttgaggaatttgtacgtatttctattttgctctgctttttggttgagttttctgaggaacagaagggaacagcaggagctttaaagatggcaggagggtccttggcaccggccggtgtggccaaggaaagagcagaacaatatcaagggaaggtcacctttgctgtgttcgttgcctgtatggttgctgctgttggagggtcgatttttggatacgatattggaatctcaggaggagtgatctcaatggatgcatttcttgaaaaatttttccgtagtgtatatttaaagaagaagcatgcacatgaaaacaactactgcaaatacgacgaccaaaggctggcagcttttacctcttctctctaccttgctggattggctgcatctctagtggcaggtcctattactagaatatatggtcgccgtgcaagtataatttctggaggcattagctttcttattggtgcagccttgaatgccacagctattaatctggcaatgctcctcctaggacggatcatgctaggtgttggcataggatttgggaatcaggctgttccactatatttatcagagatggcgcctactcatcttcgaggaggactgaacattatgtttcagttagcaacaaccagtggaatctttacagcaaatatggtaaattatggtactcataagcttgaatcatggggatggagactctcactgggactagcagcagccccagctctcctaatgacaataggaggattacttctgcccgagacaccaaacagtttaattgaacaaggattgcatgagaaagggagaaatgtcctggagaaaatcagaggaaccaagcatgtagatgcagaatttcaggacatgctagatgcgagtgaattggctaactcaatcaagcatcccttcagaaacattcttgagaaaaggaacagaccgcaattggttatggcaattttcatgccaacgttccagattcttacaggcattaatattatcctcttctatgctcccccactgtttcaaagcatgggatttggaggaaatgccgcactctactcctcagctgtgactggagcagttctttgttcctctaccttcatttccatagcaacagttgacagactaggtagaagatttttacttatcagtggaggaatacaaatgataacatgccaggtaatagtggctataatcttgggagtaaaatttggggacaaccagcaactgtctaaaagcttctcagtgttggtggtaattatgatttgcctctttgttttagcttttggatggtcatggggtccattaggctggacagtaccaagtgagatatttccactcgaaacgcgatcagctggacagagcattacagtagctgtaaaccttttcttcactttcgtcatagcacagtctttcccttcacttctttgtgcattcaagtttgggatattcctcttctttgctggttgggttactgtcatgaccgccttcgtttacatcttcctgcctgaaaccaaaggagttcccattgaagagatgatattcctatggagaaagcactggttctggaagaaaatagtgccaggacaaccagaagttgatgatagtagggaaagcatggaaatgggtgaagctgttgcaagcagaattaagtagccccccttccataagaatttctcacctcaagaagaatttcccattcacagagatgcttttctttcatgccagaaatcagaaatgacttggccagatagccaattgattatgcaaatattttcctgtatgtgaaagggcaaaaccttttatgcaatgatgccctcagcatcctgtctagctttccagactcg

SEQ ID NO: 97485 - protein, 522 aa, Ricinus communis
MAGGSLAPAGVAKERAEQYQGKVTFAVFVACMVAAVGGSIFGYDIGISGGVISMDAFLEKFFRSVYLKKKHAHENNYCKYDDQRLAAFTSSLYLAGLAASLVAGPITRIYGRRASIISGGISFLIGAALNATAINLAMLLLGRIMLGVGIGFGNQAVPLYLSEMAPTHLRGGLNIMFQLATTSGIFTANMVNYGTHKLESWGWRLSLGLAAAPALLMTIGGLLLPETPNSLIEQGLHEKGRNVLEKIRGTKHVDAEFQDMLDASELANSIKHPFRNILEKRNRPQLVMAIFMPTFQILTGINIILFYAPPLFQSMGFGGNAALYSSAVTGAVLCSSTFISIATVDRLGRRFLLISGGIQMITCQVIVAIILGVKFGDNQQLSKSFSVLVVIMICLFVLAFGWSWGPLGWTVPSEIFPLETRSAGQSITVAVNLFFTFVIAQSFPSLLCAFKFGIFLFFAGWVTVMTAFVYIFLPETKGVPIEEMIFLWRKHWFWKKIVPGQPEVDDSRESMEMGEAVASRIK

SEQ ID NO: 97486 - DNA, 1569 bp, Arabidopsis thaliana
  CDS (1)..(1569)
atgcctgccggtggattcgtcgtcggggatggccaaaaggcttatcccggcaaactcactccctttgttctcttcacttgcgttgttgctgccatgggcggtctcatcttcggatacgatatcggaatctccggtggtgtgacgtctatgccgtctttcctcaagcgattcttcccgtcggtgtatcggaaacaacaagaggacgcgtcaacgaaccagtactgtcagtacgatagcccgacgctaacgatgttcacatcgtctctatatctagcggcgctaatttcgtcgctggtggcttccaccgtgacaagaaagttcggacggcggctctcgatgctcttcggcggcatactcttctgcgccggagctctcatcaatggtttcgccaaacatgtttggatgctcatcgtcggtcgtatcttgcttggtttcggtatcggtttcgctaatcaggctgtgccactgtacctctctgagatggctccatacaaatacagaggagctttaaacattggtttccagctctcaattacaatcggaatcctcgtcgccgaagtgctaaactacttcttcgccaagatcaaaggcggttggggatggcggctcagtctcggaggcgcggtggttcctgccttgatcataaccatcggctccctcgtcctccctgacactcccaattcaatgatcgagcgtggccaacacgaagaagccaaaaccaagctcagacgaatccgtggtgtcgatgacgtcagccaagagtttgacgatttggtcgccgctagtaaagagtcgcagtcgatagagcacccgtggagaaacctcctccgccgcaagtaccgaccacatctcacaatggccgttatgattccgttctttcaacagctaaccggaatcaatgtgattatgttttacgctccggttttgttcaacaccattggtttcacgaccgatgcttctctcatgtccgctgtggtcactggctcggttaacgtggccgctacgcttgtttctatctacggtgttgacagatggggacgtcggtttctctttcttgaaggtggtacacaaatgcttatatgccaggctgtggttgcagcttgcataggggccaagtttggggtagacgggacccctggtgagctaccaaagtggtatgctatagtggttgtaacgttcatttgcatctatgtggcgggttttgcgtggtcgtggggcccactagggtggttagtaccgagtgaaatcttcccgttggagataaggtcggcggcgcagagtatcaccgtgtccgtgaacatgatcttcacgttcattatcgcgcaaatcttcttgacgatgctttgtcatttgaagtttgggttattccttgttttcgcctttttcgtggtggtgatgtcgatctttgtatacattttcttgccggagacgaaagggattccgatagaggagatgggtcaagtgtggaggtcacactggtattggtcaaggtttgtggaggatggtgagtatgggaatgcgcttgagatgggcaagaacagtaaccaagctggaacgaagcatgtttga

SEQ ID NO: 97487 - protein, 522 aa, Arabidopsis thaliana
MPAGGFVVGDGQKAYPGKLTPFVLFTCVVAAMGGLIFGYDIGISGGVTSMPSFLKRFFPSVYRKQQEDASTNQYCQYDSPTLTMFTSSLYLAALISSLVASTVTRKFGRRLSMLFGGILFCAGALINGFAKHVWMLIVGRILLGFGIGFANQAVPLYLSEMAPYKYRGALNIGFQLSITIGILVAEVLNYFFAKIKGGWGWRLSLGGAVVPALIITIGSLVLPDTPNSMIERGQHEEAKTKLRRIRGVDDVSQEFDDLVAASKESQSIEHPWRNLLRRKYRPHLTMAVMIPFFQQLTGINVIMFYAPVLFNTIGFTTDASLMSAVVTGSVNVAATLVSIYGVDRWGRRFLFLEGGTQMLICQAVVAACIGAKFGVDGTPGELPKWYAIVVVTFICIYVAGFAWSWGPLGWLVPSEIFPLEIRSAAQSITVSVNMIFTFIIAQIFLTMLCHLKFGLFLVFAFFVVVMSIFVYIFLPETKGIPIEEMGQVWRSHWYWSRFVEDGEYGNALEMGKNSNQAGTKHV

SEQ ID NO: 97488 - DNA, 1542 bp, Arabidopsis thaliana
  CDS (1)..(1542)
atggcaggagggtcgtttggtccgaccggtgtggctaaggagagagcagaacaataccaagggaaagtcactagttatgttataatcgcttgccttgttgcagctattggtggatccatctttggatatgacattggaatctcaggaggagttacatcgatggatgagtttcttgaggagtttttccacacggtttatgagaagaagaagcaagctcatgaaagtaattactgcaaatatgataatcaaggcttagctgctttcacttcttcactctacttagctggtttggtttcgactctcgtggcttcacccatcactaggaactacggtaggcgtgcgagtattgtttgtggtggaatcagctttcttattggatctggtttgaatgctggagctgtgaacttagctatgcttcttgccggacggatcatgcttggtgttggtattgggtttggaaatcaggcggttcctttgtatttatcagaagtggcaccaactcatctacgaggtggtttaaacatgatgtttcagctagctacaactatcgggatctttacagcgaacatggttaattacggtactcaacagcttaagccttggggatggagactctctcttggtttagctgcttttccagctctgcttatgacgcttggcgggtatttcttacccgagacaccaaacagtttggtcgaaagaggattaacagagagaggtcgacgagtcttagtgaagctaagaggaacagaaaacgtcaacgccgagcttcaagacatggtagatgcgagtgagcttgcgaattccatcaaacatccattcagaaacatcttgcagaaacgacacaggcctcagctagttatggctatttgcatgccaatgtttcagatactcacagggataaactccattctcttctacgcacctgttctgttccagacaatggggtttggaggaaacgcatctctctattcatcagctttaacaggagctgttcttgtcctatcaacatttatttccataggattagtagacagattgggacgaagagctcttctcataactggaggaatacaaatgataatctgtcaagtcatagtagcagtgatcttaggagtgaaatttggagacaaccaagagctatcaaaagggtactcagtgatcgtagtcatcttcatctgcctctttgttgtagcgttcggatggtcatggggtcctctaggttggaccatacctagcgaaatctttccgttagagactcgttcagcggggcagagtatcacagtagctgtaaatctcctcttcactttcatcatagctcaagctttccttggtctcctctgtgcattcaagtttggaatcttcctcttctttgctggttgggtgacagtaatgactatctttgtgtatttcctgttgcctgaaaccaaaggagttccaatagaagagatgacactcttatggagtaaacattggttctggaaaaaagtattacctgatgcaacaaatcttgaagatgagagcaagaatgtatctgtttaa

SEQ ID NO: 97489 - protein, 513 aa, Arabidopsis thaliana
MAGGSFGPTGVAKERAEQYQGKVTSYVIIACLVAAIGGSIFGYDIGISGGVTSMDEFLEEFFHTVYEKKKQAHESNYCKYDNQGLAAFTSSLYLAGLVSTLVASPITRNYGRRASIVCGGISFLIGSGLNAGAVNLAMLLAGRIMLGVGIGFGNQAVPLYLSEVAPTHLRGGLNMMFQLATTIGIFTANMVNYGTQQLKPWGWRLSLGLAAFPALLMTLGGYFLPETPNSLVERGLTERGRRVLVKLRGTENVNAELQDMVDASELANSIKHPFRNILQKRHRPQLVMAICMPMFQILTGINSILFYAPVLFQTMGFGGNASLYSSALTGAVLVLSTFISIGLVDRLGRRALLITGGIQMIICQVIVAVILGVKFGDNQELSKGYSVIVVIFICLFVVAFGWSWGPLGWTIPSEIFPLETRSAGQSITVAVNLLFTFIIAQAFLGLLCAFKFGIFLFFAGWVTVMTIFVYFLLPETKGVPIEEMTLLWSKHWFWKKVLPDATNLEDESKNVSV

SEQ ID NO: 97490 - DNA, 1593 bp, Oryza sativa
  CDS (1)..(1593)
atggccggcggcgtggtggtgaacaacggaggggggaaggactaccccgggaagctcaccatgttcgtcctcttcgcctgcatcgtcgcagccaccggcggcctcatcttcggatatgacatcggcatctccgggggtgtgacgtcgatgaacccgttcctgatcaagttcttcccgtcggtgtaccggaaggagcaggcggcggagaagaaccagagcaaccagtactgcaagttcgacagcccgctgctgaccatgttcacctcgtcgctctacctcgccgcgctcgtcgcctccttcttcgcgtccaccgtcacccgcgtcgcggggcgcaagtggtccatgttcggcggcggcgtcaccttcctcgtcggcgccgcgctcaacggcgccgccaagaacgtgctcatgctcatcctcggccgcgtcctcctcggtgtcggcgtcggcttcgccaaccagtctgtgccgctgtacctgtcggagatggcgccggcgaggctgcgcgggatgctcaacatcgggttccagctgatgatcaccattggcatcctgtgcgccaacctgatcaactacgggactgccaagatcaagggcgggtgggggtggcgcgtgagcctggcgctggcggcggtgccggcggcgatcatcgccgtgggcgcgctcttcctccctgacacgcccaactccctcatcgaccgcggccacaccgacgccgccaagcgcatgctccggcgcgtgcgcggcaccgacgacatcgaggaggagtacaacgacctggtggccgccagcgaggagtccaagctcgtggcgcacccgtggcggaacatcctccagcgccggtacaggccgcagctgaccatggccatcgccatcccgctgttccagcagctgacggggatcaacgtcatcatgttctacgcgccggtgctgttcaagacgctgggattcgccgacgacgcgtccctcatgtccgccgtgatcaccggcctcgtgaacgtcttcgccaccttcgtgtccatcgtgaccgtcgaccgcctcggccgccggaagctgttcctccagggcgggacgcagatgctggcgtgccagatcgtcgtcggaagcctcatcggcgccaagttcgggttctccggcgtggccgacatccccaaggcgtacgcggcgttcgtggtgctcttcatctgcgcctacgtcgccgggttcgcgtggtcgtgggggcccctgggctggctcgtccccagcgagatcttcccgctggagatcaggtcggcggggcagagcatcaacgtgtcggtgaacatgctcttcaccttcatcatcgcgcaggcgttcctccccatgctctgccgcttcaagttcatcctcttcttcttcttcggcgcgtgggtggtgatcatgacgctgttcgtcgccttcttcctgccggagaccaagaacgtgcccatcgaggagatggtgctcgtctggaagtcgcactggtactggggcaggttcatccgcgacgaggacgtgcacgtcggcgccgacgtcgagatgcccgccgccggcaaccgcaacggcaaggtcgacccggccaagctcgccaactga

SEQ ID NO: 97491 - protein, 530 aa, Oryza sativa
MAGGVVVNNGGGKDYPGKLTMFVLFACIVAATGGLIFGYDIGISGGVTSMNPFLIKFFPSVYRKEQAAEKNQSNQYCKFDSPLLTMFTSSLYLAALVASFFASTVTRVAGRKWSMFGGGVTFLVGAALNGAAKNVLMLILGRVLLGVGVGFANQSVPLYLSEMAPARLRGMLNIGFQLMITIGILCANLINYGTAKIKGGWGWRVSLALAAVPAAIIAVGALFLPDTPNSLIDRGHTDAAKRMLRRVRGTDDIEEEYNDLVAASEESKLVAHPWRNILQRRYRPQLTMAIAIPLFQQLTGINVIMFYAPVLFKTLGFADDASLMSAVITGLVNVFATFVSIVTVDRLGRRKLFLQGGTQMLACQIVVGSLIGAKFGFSGVADIPKAYAAFVVLFICAYVAGFAWSWGPLGWLVPSEIFPLEIRSAGQSINVSVNMLFTFIIAQAFLPMLCRFKFILFFFFGAWVVIMTLFVAFFLPETKNVPIEEMVLVWKSHWYWGRFIRDEDVHVGADVEMPAAGNRNGKVDPAKLAN

SEQ ID NO: 97492 - DNA, 1644 bp, Oryza sativa
  CDS (1)..(1644)
atgcagccgccgccgccgccgccccatcccgccgcgctgctgccgctgccgctgccgctgccgttctgcctccccgccgcgccgcgggtgcgggggcgcggcggcacggccgtggcggcgctcggggcgctctggccgccgcggctcgtcgccgtcgagagcaggccgccgccgccgtccagcccggcctcagcgtcggccccgccgccgctcccggagagcgccgccgcaggattggatgcggggattgggggaggcggtggtggagatggaggcggcggtgctgatctcgggtggctgcgggtgttcccgcacgtgctcacggcgtccatggccaacttcctcttcggctaccacatcggggtcatgaatggtccaatagaggatatagcacgggagcttggttttcaggggaatccatttctccaaggtcttgtggtcagcatattcattgttggagcatttttcggaagcttaggctcatctgcactagtcgacaattttggatgtaaaaggactcttcaaattgatagcattccgctgattcttggtgcacttctcagtgcacaggcagattcgttggatgagatgctcttgggaagattccttgttggcattggaattggcataaatacagtgctcgttccactatatgtctccgaggttgctccaacaaaatacaggggttctttggggactctatgtcagatcggaacatgtttgggaataatcgctgcattctcattgggaataccatctgaaagtgacccacattggtggcggacaatgctttatgctgcatgtgtacctggtgttcttattgttgctggaatgcaatttgctgttgagagtccccgctggcttgccaaggttggaagaatagatgatgccagaaatgttgtagaacatgtttggggaccttctgaagttgagaagtccatggaagagatccaatctgttgttgcaaatgatgattcgcaggctagctggtcagaacttctggaagaaccccacaatagagttgcactgattggagggtcccttttctttctgcaacagtttgctggcataaatggcgttctgtacttctcatcattaacattccgtgatgttggtattaccagtggtatcttggcaagcctatatgttggaataactaattttgcaggggcaattgttgcttcaattttgatggataagcaaggtcgaaagaaactcttgacaggaagctatcttggaatggcacttgcaatgttcctaatagtatatgccattagcttcccccttgatgaaggagttagccatggcctgtcaattactggaactctgttgtacatatttacattcgccattggagccggaccagttacaggaatcatcataccagagctgagtggtgctcggacacgctcgaaagttatgggcttcagcttcactgtacattggatatgcaattttctggtgggactgtatttcctggagcttgcgaagaagttaggcgttggagccgtctatgcaggttttggtggagtatccttgttgtcagcacttttcgcctacaatttcattgtcgagacgaaaggacgttctcttgaggaaatcgaaatgtctctgagccctgctgcccctggcaagcgagagtga

SEQ ID NO: 97493 - protein, 547 aa, Oryza sativa
MQPPPPPPHPAALLPLPLPLPFCLPAAPRVRGRGGTAVAALGALWPPRLVAVESRPPPPSSPASASAPPPLPESAAAGLDAGIGGGGGGDGGGGADLGWLRVFPHVLTASMANFLFGYHIGVMNGPIEDIARELGFQGNPFLQGLVVSIFIVGAFFGSLGSSALVDNFGCKRTLQIDSIPLILGALLSAQADSLDEMLLGRFLVGIGIGINTVLVPLYVSEVAPTKYRGSLGTLCQIGTCLGIIAAFSLGIPSESDPHWWRTMLYAACVPGVLIVAGMQFAVESPRWLAKVGRIDDARNVVEHVWGPSEVEKSMEEIQSVVANDDSQASWSELLEEPHNRVALIGGSLFFLQQFAGINGVLYFSSLTFRDVGITSGILASLYVGITNFAGAIVASILMDKQGRKKLLTGSYLGMALAMFLIVYAISFPLDEGVSHGLSITGTLLYIFTFAIGAGPVTGIIIPELSGARTRSKVMGFSFTVHWICNFLVGLYFLELAKKLGVGAVYAGFGGVSLLSALFAYNFIVETKGRSLEEIEMSLSPAAPGKRE

SEQ ID NO: 97494 - DNA, 1413 bp, Brassica napus; identical to SEQ ID NO: 97170
  CDS (1)..(1413)

SEQ ID NO: 97495 - protein, 470 aa, Brassica napus; identical to SEQ ID NO: 97171

SEQ ID NO: 97496 - DNA, 1599 bp, Brassica napus; identical to SEQ ID NO: 97172
  CDS (1)..(1599)

SEQ ID NO: 97497 - protein, 532 aa, Brassica napus; identical to SEQ ID NO: 97173

SEQ ID NO: 97498 - DNA, 1551 bp, Brassica napus; identical to SEQ ID NO: 97174
  CDS (1)..(1551)

SEQ ID NO: 97499 - protein, 516 aa, Brassica napus; identical to SEQ ID NO: 97175

SEQ ID NO: 97500 - DNA, 1527 bp, Brassica napus; identical to SEQ ID NO: 97176
  CDS (1)..(1527)

SEQ ID NO: 97501 - protein, 508 aa, Brassica napus; identical to SEQ ID NO: 97177

SEQ ID NO: 97502 - DNA, 1524 bp, Brassica napus; identical to SEQ ID NO: 97178
  CDS (1)..(1524)

SEQ ID NO: 97503 - protein, 507 aa, Brassica napus; identical to SEQ ID NO: 97179

SEQ ID NO: 97504 - DNA, 1569 bp, Brassica napus; identical to SEQ ID NO: 97180
  CDS (1)..(1569)

SEQ ID NO: 97505 - protein, 522 aa, Brassica napus; identical to SEQ ID NO: 97181

SEQ ID NO: 97506 - DNA, 1596 bp, Brassica napus; identical to SEQ ID NO: 97182
  CDS (1)..(1596)

SEQ ID NO: 97507 - protein, 531 aa, Brassica napus; identical to SEQ ID NO: 97183

SEQ ID NO: 97508 - DNA, 1635 bp, Brassica napus; identical to SEQ ID NO: 97184
  CDS (1)..(1635)

SEQ ID NO: 97509 - protein, 544 aa, Brassica napus; identical to SEQ ID NO: 97185

SEQ ID NO: 97510 - DNA, 1494 bp, Brassica napus; identical to SEQ ID NO: 97186
  CDS (1)..(1494)

SEQ ID NO: 97511 - protein, 497 aa, Brassica napus; identical to SEQ ID NO: 97187

SEQ ID NO: 97512 - DNA, 1428 bp, Brassica napus; identical to SEQ ID NO: 97188
  CDS (1)..(1428)

SEQ ID NO: 97513 - protein, 475 aa, Brassica napus; identical to SEQ ID NO: 97189

SEQ ID NO: 97514 - DNA, 1428 bp, Brassica napus; identical to SEQ ID NO: 97190
  CDS (1)..(1428)

SEQ ID NO: 97515 - protein, 475 aa, Brassica napus; identical to SEQ ID NO: 97191

SEQ ID NO: 97516 - DNA, 1413 bp, Triticum aestivum
  CDS (1)..(1413)
atgacaaggggtggtgatgcggcggcggaggcgagcgagcacctccttggcccgccgccggcgaggggtggcgacgggtcgtcgctggggatggtcatggccagcacaggcgtcgccgtgctcggctctttcgccttcggcgtcgcgattggctactcggcaccagctgaggccgggatcagccgggacctccagctgaccctctccgagtactctgttttcgggtcggtaataacagtcggggccatgatcggagcggtcgcgagcgggcagattgcggatgttgctggacgaaaaggggcgatgagggcttctgctctcgtttccattgtcggatggctggcaatcttctctgcacagagtgcttactcgcttgattttgggagattttgcaccggactcggcgtcggagtgttttcatacgtggtgccggttttcattgcagaaattgctccgaaggctcttcgtgggggacttacagctctgaatccattgatgataggcactggattatccatgacgtatatcgtcggcacagttgtgtcctggcggatgctggccatggctggacttgctccatgcataattctcatagttggtctcttcttcattcctgaatctcctcgatggctggcaaaggttggccggaaaaaggagtttgaaatagcactccagcgcctccgtggcagagacgcggatgtgtcccttgaagctgcagaaatcaaggacttcgtcgaaactattgacaatcttccaaagcctggaattaaggatctcttcagcaggccatacatccgtcctgtcattatcggcgccggtctaatggttttccagcagtttgcagggataaacgggatcctgttctacgccagtgaaacatttgtctcagctgggttcgattcaggaaacctaggaacaatcttgatggcgtgtatccagttaccactcacaacacttggagctctactgatggacaggagtgggagaaagccgttattactgatttccacatctggactcctcgtggggactcttatgtcagcagtatcattctaccttaaggttcacggtatattcccgaagcaagtcccaatcatcacactcaccagcatattggtctacattgcaagttattcactagggatgggttccgttccttgggtcataatgtcagagatattcccaattaatatgaaaggaatcggcgggagcttcgtgactctggtgaactggttggcttcgttagcagtttctttcgccttcaacttcctcatgagctggagtgcttcaggaacattcttcttcttcgccttcgtttgcgcaatggctattctcttcattgtgaagatcgtgccggagacaaaaggcaagaccttggaagagattcaggcttcgataaactgcggcacatga

SEQ ID NO: 97517 - protein, 470 aa, Triticum aestivum
MTRGGDAAAEASEHLLGPPPARGGDGSSLGMVMASTGVAVLGSFAFGVAIGYSAPAEAGISRDLQLTLSEYSVFGSVITVGAMIGAVASGQIADVAGRKGAMRASALVSIVGWLAIFSAQSAYSLDFGRFCTGLGVGVFSYVVPVFIAEIAPKALRGGLTALNPLMIGTGLSMTYIVGTVVSWRMLAMAGLAPCIILIVGLFFIPESPRWLAKVGRKKEFEIALQRLRGRDADVSLEAAEIKDFVETIDNLPKPGIKDLFSRPYIRPVIIGAGLMVFQQFAGINGILFYASETFVSAGFDSGNLGTILMACIQLPLTTLGALLMDRSGRKPLLLISTSGLLVGTLMSAVSFYLKVHGIFPKQVPIITLTSILVYIASYSLGMGSVPWVIMSEIFPINMKGIGGSFVTLVNWLASLAVSFAFNFLMSWSASGTFFFFAFVCAMAILFIVKIVPETKGKTLEEIQASINCGT

SEQ ID NO: 97518 - DNA, 1488 bp, Triticum aestivum; identical to SEQ ID NO: 97192
  CDS (1)..(1488)

SEQ ID NO: 97519 - protein, 495 aa, Triticum aestivum; identical to SEQ ID NO: 97193

SEQ ID NO: 97520 - DNA, 1530 bp, Triticum aestivum; identical to SEQ ID NO: 97194
  CDS (1)..(1530)

SEQ ID NO: 97521 - protein, 509 aa, Triticum aestivum; identical to SEQ ID NO: 97195

SEQ ID NO: 97522 - DNA, 1524 bp, Glycine max; identical to SEQ ID NO: 97196
  CDS (1)..(1524)

SEQ ID NO: 97523 - protein, 507 aa, Glycine max; identical to SEQ ID NO: 97197

SEQ ID NO: 97524 - DNA, 1524 bp, Glycine max; identical to SEQ ID NO: 97198
  CDS (1)..(1524)

SEQ ID NO: 97525 - protein, 507 aa, Glycine max; identical to SEQ ID NO: 97199

SEQ ID NO: 97526 - DNA, 1659 bp, Glycine max; identical to SEQ ID NO: 97200
  CDS (1)..(1659)

SEQ ID NO: 97527 - protein, 552 aa, Glycine max; identical to SEQ ID NO: 97201

SEQ ID NO: 97528 - DNA, 1452 bp, Glycine max; identical to SEQ ID NO: 97202
  CDS (1)..(1452)

SEQ ID NO: 97529 - protein, 483 aa, Glycine max; identical to SEQ ID NO: 97203

SEQ ID NO: 97530 - DNA, 1524 bp, Triticum aestivum; identical to SEQ ID NO: 97204
  CDS (1)..(1524)

SEQ ID NO: 97531 - protein, 507 aa, Triticum aestivum; identical to SEQ ID NO: 97205

SEQ ID NO: 97532 - DNA, 1488 bp, Hordeum vulgare; identical to SEQ ID NO: 97206
  CDS (1)..(1488)

SEQ ID NO: 97533 - protein, 495 aa, Hordeum vulgare; identical to SEQ ID NO: 97207

SEQ ID NO: 97534 - DNA, 1512 bp, Brassica napus; identical to SEQ ID NO: 97208
  CDS (1)..(1512)

SEQ ID NO: 97535 - protein, 503 aa, Brassica napus; identical to SEQ ID NO: 97209

SEQ ID NO: 97536 - DNA, 1389 bp, Brassica napus; identical to SEQ ID NO: 97210
  CDS (1)..(1389)

SEQ ID NO: 97537 - protein, 462 aa, Brassica napus; identical to SEQ ID NO: 97211

SEQ ID NO: 97538 - DNA, 1644 bp, Brassica napus; identical to SEQ ID NO: 97212
  CDS (1)..(1644)

SEQ ID NO: 97539 - protein, 547 aa, Brassica napus; identical to SEQ ID NO: 97213

SEQ ID NO: 97540 - DNA, 1524 bp, Brassica napus; identical to SEQ ID NO: 97214
  CDS (1)..(1524)

SEQ ID NO: 97541 - protein, 507 aa, Brassica napus; identical to SEQ ID NO: 97215

SEQ ID NO: 97542 - DNA, 1569 bp, Brassica napus; identical to SEQ ID NO: 97216
  CDS (1)..(1569)

SEQ ID NO: 97543 - protein, 522 aa, Brassica napus; identical to SEQ ID NO: 97217

SEQ ID NO: 97544 - DNA, 1428 bp, Brassica napus; identical to SEQ ID NO: 97218
  CDS (1)..(1428)

SEQ ID NO: 97545 - protein, 475 aa, Brassica napus; identical to SEQ ID NO: 97219

SEQ ID NO: 97546 - DNA, 1527 bp, Brassica napus; identical to SEQ ID NO: 97220
  CDS (1)..(1527)

SEQ ID NO: 97547 - protein, 508 aa, Brassica napus; identical to SEQ ID NO: 97221

SEQ ID NO: 97548 - DNA, 1635 bp, Brassica napus; identical to SEQ ID NO: 97222
  CDS (1)..(1635)

SEQ ID NO: 97549 - protein, 544 aa, Brassica napus; identical to SEQ ID NO: 97223

SEQ ID NO: 97550 - DNA, 1524 bp, Brassica napus; identical to SEQ ID NO: 97224
  CDS (1)..(1524)

SEQ ID NO: 97551 - protein, 507 aa, Brassica napus; identical to SEQ ID NO: 97225

SEQ ID NO: 97552 - DNA, 1683 bp, Glycine max; identical to SEQ ID NO: 97226
  CDS (1)..(1683)

SEQ ID NO: 97553 - protein, 560 aa, Glycine max; identical to SEQ ID NO: 97227

SEQ ID NO: 97554 - DNA, 1467 bp, Glycine max; identical to SEQ ID NO: 97228
  CDS (1)..(1467)

SEQ ID NO: 97555 - protein, 488 aa, Glycine max; identical to SEQ ID NO: 97229

SEQ ID NO: 97556 - DNA, 1518 bp, Glycine max; identical to SEQ ID NO: 97230
  CDS (1)..(1518)

SEQ ID NO: 97557 - protein, 505 aa, Glycine max; identical to SEQ ID NO: 97231

SEQ ID NO: 97558 - DNA, 1494 bp, Glycine max; identical to SEQ ID NO: 97232
  CDS (1)..(1494)

SEQ ID NO: 97559 - protein, 497 aa, Glycine max; identical to SEQ ID NO: 97233

SEQ ID NO: 97560 - DNA, 1569 bp, Glycine max; identical to SEQ ID NO: 97234
  CDS (1)..(1569)

SEQ ID NO: 97561 - protein, 522 aa, Glycine max; identical to SEQ ID NO: 97235

SEQ ID NO: 97562 - DNA, 1536 bp, Glycine max; identical to SEQ ID NO: 97236
  CDS (1)..(1536)

SEQ ID NO: 97563 - protein, 511 aa, Glycine max; identical to SEQ ID NO: 97237

SEQ ID NO: 97564 - DNA, 1557 bp, Glycine max; identical to SEQ ID NO: 97238
  CDS (1)..(1557)

SEQ ID NO: 97565 - protein, 518 aa, Glycine max; identical to SEQ ID NO: 97239

SEQ ID NO: 97566 - DNA, 1461 bp, Glycine max; identical to SEQ ID NO: 97240
  CDS (1)..(1461)

SEQ ID NO: 97567 - protein, 486 aa, Glycine max; identical to SEQ ID NO: 97241

SEQ ID NO: 97568 - DNA, 1506 bp, Glycine max; identical to SEQ ID NO: 97242
  CDS (1)..(1506)

SEQ ID NO: 97569 - protein, 501 aa, Glycine max; identical to SEQ ID NO: 97243

SEQ ID NO: 97570 - DNA, 1467 bp, Glycine max; identical to SEQ ID NO: 97244
  CDS (1)..(1467)

SEQ ID NO: 97571 - protein, 488 aa, Glycine max; identical to SEQ ID NO: 97245

SEQ ID NO: 97572 - DNA, 1572 bp, Glycine max; identical to SEQ ID NO: 97246
  CDS (1)..(1572)

SEQ ID NO: 97573 - protein, 523 aa, Glycine max; identical to SEQ ID NO: 97247

SEQ ID NO: 97574 - DNA, 1542 bp, Zea mays; identical to SEQ ID NO: 97248
  CDS (1)..(1542)

SEQ ID NO: 97575 - protein, 513 aa, Zea mays; identical to SEQ ID NO: 97249

SEQ ID NO: 97576 - DNA, 1557 bp, Glycine max; identical to SEQ ID NO: 97250
  CDS (1)..(1557)

SEQ ID NO: 97577 - protein, 518 aa, Glycine max; identical to SEQ ID NO: 97251

SEQ ID NO: 97578 - DNA, 1533 bp, Zea mays; identical to SEQ ID NO: 97252
  CDS (1)..(1533)

SEQ ID NO: 97579 - protein, 510 aa, Zea mays; identical to SEQ ID NO: 97253

SEQ ID NO: 97580 - DNA, 1503 bp, Zea mays; identical to SEQ ID NO: 97254
  CDS (1)..(1503)

SEQ ID NO: 97581 - protein, 500 aa, Zea mays; identical to SEQ ID NO: 97255

SEQ ID NO: 97582 - DNA, 1611 bp, Zea mays; identical to SEQ ID NO: 97256
  CDS (1)..(1611)

SEQ ID NO: 97583 - protein, 536 aa, Zea mays; identical to SEQ ID NO: 97257

SEQ ID NO: 97584 - DNA, 1596 bp, Zea mays; identical to SEQ ID NO: 97258
  CDS (1)..(1596)

SEQ ID NO: 97585 - protein, 531 aa, Zea mays; identical to SEQ ID NO: 97259

SEQ ID NO: 97586 - DNA, 1521 bp, Zea mays; identical to SEQ ID NO: 97260
  CDS (1)..(1521)

SEQ ID NO: 97587 - protein, 506 aa, Zea mays; identical to SEQ ID NO: 97261

SEQ ID NO: 97588 - DNA, 1572 bp, Zea mays; identical to SEQ ID NO: 97262
  CDS (1)..(1572)

SEQ ID NO: 97589 - protein, 523 aa, Zea mays; identical to SEQ ID NO: 97263

SEQ ID NO: 97590 - DNA, 1509 bp, Zea mays; identical to SEQ ID NO: 97264
  CDS (1)..(1509)

SEQ ID NO: 97591 - protein, 502 aa, Zea mays; identical to SEQ ID NO: 97265

SEQ ID NO: 97592 - DNA, 1458 bp, Zea mays; identical to SEQ ID NO: 97266
  CDS (1)..(1458)

SEQ ID NO: 97593 - protein, 485 aa, Zea mays; identical to SEQ ID NO: 97267

SEQ ID NO: 97594 - DNA, 1458 bp, Zea mays; identical to SEQ ID NO: 97268
  CDS (1)..(1458)

SEQ ID NO: 97595 - protein, 485 aa, Zea mays; identical to SEQ ID NO: 97269

SEQ ID NO: 97596 - DNA, 1572 bp, Zea mays; identical to SEQ ID NO: 97270
  CDS (1)..(1572)

SEQ ID NO: 97597 - protein, 523 aa, Zea mays; identical to SEQ ID NO: 97271

SEQ ID NO: 97598 - DNA, 1602 bp, Zea mays; identical to SEQ ID NO: 97272
  CDS (1)..(1602)

SEQ ID NO: 97599 - protein, 533 aa, Zea mays; identical to SEQ ID NO: 97273

SEQ ID NO: 97600 - DNA, 1545 bp, Zea mays; identical to SEQ ID NO: 97274
  CDS (1)..(1545)

SEQ ID NO: 97601 - protein, 514 aa, Zea mays; identical to SEQ ID NO: 97275

SEQ ID NO: 97602 - DNA, 1509 bp, Zea mays; identical to SEQ ID NO: 97276
  CDS (1)..(1509)

SEQ ID NO: 97603 - protein, 502 aa, Zea mays; identical to SEQ ID NO: 97277

SEQ ID NO: 97604 - DNA, 1620 bp, Zea mays; identical to SEQ ID NO: 97278
  CDS (1)..(1620)

SEQ ID NO: 97605 - protein, 539 aa, Zea mays; identical to SEQ ID NO: 97279

SEQ ID NO: 97606 - DNA, 1575 bp, Zea mays; identical to SEQ ID NO: 97280
  CDS (1)..(1575)

SEQ ID NO: 97607 - protein, 524 aa, Zea mays; identical to SEQ ID NO: 97281

SEQ ID NO: 97608 - DNA, 1602 bp, Zea mays; identical to SEQ ID NO: 97282
  CDS (1)..(1602)

SEQ ID NO: 97609 - protein, 533 aa, Zea mays; identical to SEQ ID NO: 97283

SEQ ID NO: 97610 - DNA, 1458 bp, Zea mays; identical to SEQ ID NO: 97284
  CDS (1)..(1458)

SEQ ID NO: 97611 - protein, 485 aa, Zea mays; identical to SEQ ID NO: 97285

SEQ ID NO: 97612 - DNA, 1533 bp, Zea mays; identical to SEQ ID NO: 97286
  CDS (1)..(1533)

SEQ ID NO: 97613 - protein, 510 aa, Zea mays; identical to SEQ ID NO: 97287

SEQ ID NO: 97614 - DNA, 1563 bp, Zea mays; identical to SEQ ID NO: 97288
  CDS (1)..(1563)

SEQ ID NO: 97615 - protein, 520 aa, Zea mays; identical to SEQ ID NO: 97289

SEQ ID NO: 97616 - DNA, 24 bp, Artificial sequence
  primer
atgtctagtgcgcaatcctctatt

SEQ ID NO: 97617 - DNA, 26 bp, Artificial sequence
  primer
tcaatcagaattctttgagaacttca

SEQ ID NO: 97618 - protein, 521 aa, Artificial sequence
  consensus sequence
  Variant (2)..(4): Xaa in position 2 to 4 is any amino acid
  Variant (7)..(9): Xaa in position 7 to 9 is any amino acid
  Variant (11)..(13): Xaa in position 11 to 13 is any amino acid
  Variant (15)..(55): Xaa in position 15 to 55 is any amino acid
  Variant (56)..(77): Xaa in position 56 to 77 is any or no amino acid
  Variant (80)..(108): Xaa in position 80 to 108 is any amino acid
  Variant (109)..(111): Xaa in position 109 to 111 is any or no amino acid
  Variant (114)..(116): Xaa in position 114 to 116 is any amino acid
  Variant (118)..(118): Xaa in position 118 is any amino acid
  Variant (120)..(120): Xaa in position 120 is any amino acid
  Variant (122)..(127): Xaa in position 122 to 127 is any amino acid
  Variant (129)..(132): Xaa in position 129 to 132 is any amino acid
  Variant (134)..(135): Xaa in position 134 to 135 is any amino acid
  Variant (137)..(139): Xaa in position 137 to 139 is any amino acid
  Variant (142)..(147): Xaa in position 142 to 147 is any amino acid
  Variant (149)..(153): Xaa in position 149 to 153 is any amino acid
  Variant (155)..(166): Xaa in position 155 to 166 is any amino acid
  Variant (167)..(188): Xaa in position 167 to 188 is any or no amino acid
  Variant (191)..(205): Xaa in position 191 to 205 is any amino acid
  Variant (207)..(210): Xaa in position 207 to 210 is any amino acid
  Variant (211)..(211): Xaa in position 211 is any or no amino acid
  Variant (213)..(214): Xaa in position 213 to 214 is any amino acid
  Variant (216)..(217): Xaa in position 216 to 217 is any amino acid
  Variant (219)..(269): Xaa in position 219 to 269 is any amino acid
  Variant (270)..(307): Xaa in position 270 to 307 is any or no amino acid
  Variant (310)..(311): Xaa in position 310 to 311 is any amino acid
  Variant (313)..(313): Xaa in position 313 is any amino acid
  Variant (315)..(318): Xaa in position 315 to 318 is any amino acid
  Variant (320)..(323): Xaa in position 320 to 323 is any amino acid
  Variant (325)..(338): Xaa in position 325 to 338 is any amino acid
  Variant (339)..(342): Xaa in position 339 to 342 is any or no amino acid
  Variant (344)..(349): Xaa in position 344 to 349 is any amino acid
  Variant (350)..(350): Xaa in position 350 is any or no amino acid
  Variant (352)..(361): Xaa in position 352 to 361 is any amino acid
  Variant (365)..(373): Xaa in position 365 to 373 is any amino acid
  Variant (375)..(405): Xaa in position 375 to 405 is any amino acid
  Variant (406)..(423): Xaa in position 406 to 423 is any or no amino acid
  Variant (425)..(429): Xaa in position 425 to 429 is any amino acid
  Variant (431)..(437): Xaa in position 431 to 437 is any amino acid
  Variant (439)..(440): Xaa in position 439 to 440 is any amino acid
  Variant (442)..(455): Xaa in position 442 to 455 is any amino acid
  Variant (457)..(465): Xaa in position 457 to 465 is any amino acid
  Variant (466)..(470): Xaa in position 466 to 470 is any or no amino acid
  Variant (472)..(485): Xaa in position 472 to 485 is any amino acid
  Variant (486)..(496): Xaa in position 486 to 496 is any or no amino acid
  Variant (498)..(513): Xaa in position 498 to 513 is any amino acid
  Variant (518)..(520): Xaa in position 518 to 520 is any amino acid
GXXXFGXXXGXXXGXXXXXXXXXXXXXXXXXXXXXXXXXXXXXXXXXXXXXXXXXXXXXXXXXXXXXXXXXXXXXXXGRXXXXXXXXXXXXXXXXXXXXXXXXXXXXXXXXGRXXXGXGXGXXXXXXPXXXXEXXPXXXRGXXXXXXQXXXXXGXXXXXXXXXXXXXXXXXXXXXXXXXXXXXXXXXXWRXXXXXXXXXXXXXXXGXXXXXPXXPXXLXXXXXXXXXXXXXXXXXXXXXXXXXXXXXXXXXXXXXXXXXXXXXXXXXXXXXXXXXXXXXXXXXXXXXXXXXXXXXXXXXXXXXXXXXQQXXGXNXXXXYXXXXFXXXXXXXXXXXXXXXXXXGXXXXXXXTXXXXXXXXXXGRRXXXXXXXXXMXXXXXXXXXXXXXXXXXXXXXXXXXXXXXXXXXXXXXXXXXXXXXXXXXFXXXXXPXXXXXXXEXXPXXXXXXXXXXXXXXNXXXXXXXXXXXXXXFXXXXXXXXXXXXXXXXXXXXXXXXXFXXXXXXXXXXXXXXXXETKGXXXE

SEQ ID NO: 97619 - protein, 42 aa, Artificial sequence
  protein pattern
  Variant (2)..(2): Xaa in position 2 is any amino acid
  Variant (3)..(4): Xaa in position 3 to 4 is any or no amino acid
  Variant (6)..(10): Xaa in position 6 to 10 is any amino acid
  Variant (11)..(11): Xaa in position 11 is Ala, Cys, Ser, Thr or Val
  Variant (13)..(15): Xaa in position 13 to 15 is any amino acid
  Variant (16)..(16): Xaa in position 16 is Ala, Gly or Ser
  Variant (18)..(18): Xaa in position 18 is any amino acid
  Variant (19)..(19): Xaa in position 19 is Ala, Gly, Ser, Thr or Val
  Variant (21)..(23): Xaa in position 21 to 23 is any amino acid
  Variant (26)..(35): Xaa in position 26 to 35 is any amino acid
  Variant (36)..(36): Xaa in position 36 is Ala, Cys, Gly, Asn, Ser, Thr or Val
  Variant (37)..(37): Xaa in position 37 is any amino acid
  Variant (39)..(41): Xaa in position 39 to 41 is any amino acid
  Variant (42)..(42): Xaa in position 42 is Ala, Gly, Ser, Thr or Val
GXXXGXXXXXXPXXXXEXXPXXXRGXXXXXXXXXXXXGXXXX

SEQ ID NO: 97620 - DNA, 2523 bp, Saccharomyces cerevisiae
  CDS (1)..(2523)
atggcaaataataggatcgaaaggttaaaatcaccctcgtcttcatcaacatgctcaatggacgaggttctcattacttcaagcaataacagcagctctatatgtttagagaccatgcgtcaacttcctcgggaaggtgtttctggtcagataaatattatcaaggaaactgcagcttcgtcctcttctcacgctgctctcttcatcaagcaagatctttacgagcatatagatcccctccctgcttatccaccgagctatgatctagtaaatcccaataaagaggtccgctttcctatatttggtgacacggcaccatgcccaaagtcttctctccctcctttgtatgcacctgcagtatatgaattgacgttgatatccttaaaattggaaaggctttcaccttatgaaatttctagtaacaggagctggaggaatttcatcattgaaattaattcgactcaactaaatttttaccatattgacgaatctttgacgaaacacattaggaattattcaagcggggaaacaaaatctgaaaaagaggatagaattcatagtgacttggtccatcgcagtgatcaatcacaacatctgcatcaccgtctcttcactctaccgacgagatcagcttcggagtttaaaaaagcagatcaagaacggatctcttatagagtgaaacgtgatcgatcgcggtatttaaccgatgaagctctttacaagtctttcactttacaaaatgcaagatttgggataccaacggattataccaagaagagttttgtgttaagaatgtcttgtgaaagcgaacagtttttattacggttctctcatatagatgatatgattgactggtctatgtacctatcaatcgggatatctgtgtctttggacttggaagtcagggagtatccagattatcgaattgttcccagaagaaggagaaggagaaggaggagaaggaggagaagaagacacactcatagaagtgagagttcgatggggtctttttcgcagagattcattcgttcgaattccagaccggacttaatccaaagatatagtaccgggtctagcactaataacaatacaactatcagggaacgctcgaatactttcacagctggtctactagatcattactgcactggcctctcaaagacgcctacagaggcattgatatcttcggctgcatcaggagaatccagtgataacagtaccctgggatcaacaaggtcattatctggttgctcagcttcccgttcgattgcatctagaagtttaaaatttaaaattaagaactttttcaggcctaaaaattcttcacgcacagaaaagcttcacagactcaggtccaactcaagtaacttaaatagtgttattgaaacggaagaagatgatgaacaccatgaatcaagcgggggagatcatccagagcctggtgttccagtaaataccaccattaaagtagagcgtccaatgcacagaaatagagctatttccatgccccaaagacagtcattgaggcgtgcaattagcgaggaggttgtccccatcaaatttccaaatagcacagtgggtgaatcagttcattcaccctctcctattgagcatctttccgttgatggctgcgagattatgctgcaatcacaaaatgcggttatgaaagaggaattacggagtgttgcgtcgaatttggtagccaatgaaagggatgaggcatctattagacctaaacctcaaagctcttcgatatacctatcaggattagctcctaatggggaatccgccacagatttatcccaaagcagtaggtcgttatgtctcacaaaccgtgacgctgaaatcaatgacgatgaaagcgctactgagaccgatgaggacgaaaatgacggtgaaaccgatgaatatgctggcgatgatactaatgatgatactgatgacagtaatattggttatgcttatggcagtgaaagtgattattcatgtttaattgaagaacgaataagaaatcgaaggcgagcatcttctactctaagttgcttctccaatataccttacggaacggatgatattaaatggaaaccagctattaaggaaatttcaagaaggcgttatttgagggattctctgaagtgcatcaaaccatttctagatagtaacgactgtttgggtaaggttatctatattccagtttcgggaccaacctttgaaacaagtaataaaattcactttagcaaccgccagagcttacagaagcagaagaatcattttttaaaaggcttcatcgtgggacctacggcgttgatagaacttaattgtaaaaataagaatgcaattgttggaacaacaaaggacgctgaagatcatggggaggacgacggtgacggtgatgatggtgaggatgatgatgacgacgacgacgatgatgatgatgatgacgacgacgaagacgacgacgatgatgatgatgatgatgatgacgacgacgatgacgatgatgatggacagattactgcataa

SEQ ID NO: 97621 - protein, 840 aa, Saccharomyces cerevisiae
MANNRIERLKSPSSSSTCSMDEVLITSSNNSSSICLETMRQLPREGVSGQINIIKETAASSSSHAALFIKQDLYEHIDPLPAYPPSYDLVNPNKEVRFPIFGDTAPCPKSSLPPLYAPAVYELTLISLKLERLSPYEISSNRSWRNFIIEINSTQLNFYHIDESLTKHIRNYSSGETKSEKEDRIHSDLVHRSDQSQHLHHRLFTLPTRSASEFKKADQERISYRVKRDRSRYLTDEALYKSFTLQNARFGIPTDYTKKSFVLRMSCESEQFLLRFSHIDDMIDWSMYLSIGISVSLDLEVREYPDYRIVPRRRRRRRRRRRRRRHTHRSESSMGSFSQRFIRSNSRPDLIQRYSTGSSTNNNTTIRERSNTFTAGLLDHYCTGLSKTPTEALISSAASGESSDNSTLGSTRSLSGCSASRSIASRSLKFKIKNFFRPKNSSRTEKLHRLRSNSSNLNSVIETEEDDEHHESSGGDHPEPGVPVNTTIKVERPMHRNRAISMPQRQSLRRAISEEVVPIKFPNSTVGESVHSPSPIEHLSVDGCEIMLQSQNAVMKEELRSVASNLVANERDEASIRPKPQSSSIYLSGLAPNGESATDLSQSSRSLCLTNRDAEINDDESATETDEDENDGETDEYAGDDTNDDTDDSNIGYAYGSESDYSCLIEERIRNRRRASSTLSCFSNIPYGTDDIKWKPAIKEISRRRYLRDSLKCIKPFLDSNDCLGKVIYIPVSGPTFETSNKIHFSNRQSLQKQKNHFLKGFIVGPTALIELNCKNKNAIVGTTKDAEDHGEDDGDGDDGEDDDDDDDDDDDDDDDEDDDDDDDDDDDDDDDDDDGQITA

SEQ ID NO: 97622 - DNA, 2046 bp, Candida glabrata CBS 138
  CDS (1)..(2046)
atggataatagagatgtccattacttggacaaaagtggtgatttcaagtctcctacgtcgactatagcttctggtaactctctcgatgacttgacgagtagttcgacgagcactcgctcgcatacgccagaggaacctgtcacgagcacatatttggagattatagatggtgagccagcaagtccgccggattacgacgaagttaactacaatagacacgttacgttcccgatatgggaggatcttacgccctgctctatgacagagaagcctccagcgtaccatcccacagtttacaatgtcgctatagtgtcggtgaagttggagtggttatcaccattcgagccatccccaaataggagttggaggacatttatcatggagataaactcaacgcagataaacttttacgctctcgagccagagtttcacagacttgtaaagaactactacaatttgaagtatgacgatggcgccaaatctctagcaaagggtatactttccctaggtaactccaagaagaagaacgataacaagattgtggacacggaaccacattggaaacggctgaacgctaagctggaacgcaactattccaaatacctgtcggatgcccgcctttacagatcctttacgcttcaatatgcaagaatgggtatacccacagattacaggaaaagtgcgcatgccctccggcttagatgcgaagcagagcaatttcttgttgcttttgataacgttgacgacctcattaactggtcgatgtacattaatatgggtattagtgttgcacttgatttagactgtagacagttgccaaactatagggtggttccaaggcgaagaagaccccatcacactcggagacaaaaacgtacaccgttgcattctttagttgataactcaagctcatctttcttcagcaaagagttctttttggcttcaccaagaggtctttatcttcatggtgcaacggccatgtcttcacctccaccaagaactagaagtagcagttcggcaacggtgcaaagtacagtccctaaacgtgttgcatctcaaccgatttcaagaaattcctctagtggccgcatagtgagcaatggaaataacagctcatttggtaagtttttcgatatgtttaagagcaagcggtcaaagcaggactttaaatcgctgcagtccgctaatgtgactggattaaaagtgactctagagtcaaaacgtgaccaatcagctaaatttgagttaggatcagacttagaagtaatgaataatagtatagccgaggaacctgtcaaggaattcccatcagacaggtgtgaagaaatgttgaaaagacacgttaatatgatggaacgagaacttttatgttacagtacacaagagccagaattctctgaagccggcagagaagtcaataatcctggttctagttctcatagtaatagaaactttgcagaggcagagcacgttgactctaatgaagatgaggatgaggatgacgattatacgttagacgacgattatgaagatggacaacgattagatccagttgtttctatttatgcggaagaaggtttggtacatgaaagtgaaagcgattactactatgagcaaagaagacttactcgcagccgtgctgcctcaactgcaagtaacatgatatcacatgcagatgccgacgatgtaaaatggatgcctcctcaaaagattttatcgagaagaagatacgttaaggatagtcttagatgtatcaagggttttgtggagcattctagttggatgggtagagtagtctgttgtcctactggaccaccttcatttaaaactaacaatgatctggtattgttgaatggtaagaaaattgatgagaaaactgttggtaacagtaggaacaaaattgtgaattcaagtggggataagagttattggaagaccaaaaatcatttccttcaactttacatcattgagccaaccggatatattccaattactgctctcgaagcaaatgaagcaaggaagaagattaagactgtattatgttaa

SEQ ID NO: 97623 - protein, 681 aa, Candida glabrata CBS 138
MDNRDVHYLDKSGDFKSPTSTIASGNSLDDLTSSSTSTRSHTPEEPVTSTYLEIIDGEPASPPDYDEVNYNRHVTFPIWEDLTPCSMTEKPPAYHPTVYNVAIVSVKLEWLSPFEPSPNRSWRTFIMEINSTQINFYALEPEFHRLVKNYYNLKYDDGAKSLAKGILSLGNSKKKNDNKIVDTEPHWKRLNAKLERNYSKYLSDARLYRSFTLQYARMGIPTDYRKSAHALRLRCEAEQFLVAFDNVDDLINWSMYINMGISVALDLDCRQLPNYRVVPRRRRPHHTRRQKRTPLHSLVDNSSSSFFSKEFFLASPRGLYLHGATAMSSPPPRTRSSSSATVQSTVPKRVASQPISRNSSSGRIVSNGNNSSFGKFFDMFKSKRSKQDFKSLQSANVTGLKVTLESKRDQSAKFELGSDLEVMNNSIAEEPVKEFPSDRCEEMLKRHVNMMERELLCYSTQEPEFSEAGREVNNPGSSSHSNRNFAEAEHVDSNEDEDEDDDYTLDDDYEDGQRLDPVVSIYAEEGLVHESESDYYYEQRRLTRSRAASTASNMISHADADDVKWMPPQKILSRRRYVKDSLRCIKGFVEHSSWMGRVVCCPTGPPSFKTNNDLVLLNGKKIDEKTVGNSRNKIVNSSGDKSYWKTKNHFLQLYIIEPTGYIPITALEANEARKKIKTVLC

SEQ ID NO: 97624 - DNA, 2457 bp, Kluyveromyces lactis NRRL Y-1140
  CDS (1)..(2457)
atgagttcagttagcgtgccactacgtccgtcgcacggccaatggagctcatcaccaaatagcacttgtataccgagttgcaagaaagaatcaggtatgaaaaggatgaatcacgtgaagtcgttatcttctgatacatcttctgataacactggagaagatatatctttgttggattgccattgtacttccctcggagcaagtgatatctcattaacaacaaattcgggatccgttcaggaatttaccggtacgaatacctcgtcttccactccatcgacgactcaaacagcgaaaaaaaagctaaataacgttaaaagtacttctcgtgttgtaccgaggcccaagcctaactatgaaaaaagtttggaatatttccagtgggtagacaatgctccaagacgtccaccatcttataagtcagttaattcaaacaggagaatcacctatccaatttatgaaactcttgatgataatgtattgcctggttactctcctgcagttaaagcaatcactgtgatttcactgaaacaagaatggcttaacccatacgaattgtcttcatctagggcctggaagaattttatcatggagattaattctactcaactaaatttttaccatatccatgagtcactaacaagtaatatcaagaattattacggggggcctacaaatttccctaatgatttgaattcttccaagcaatccacaagatttttgccttctttacactcaaagagcacctatcagttcaataggtcagaccagcaatggataaccaaaatgattcaaagcaatgaaaaaaagtacttgtctaatgacatgcttttcaaatctttcagtttgcaatacggaaagtttggcatacccacagattacactaagaagacctttgtgctcaggttaagatgtgaattacaacaatttttgataaattttgcacacgtcgatgatatgatagattggagcgtttccctttcaattggtatagatgtttcgttggatttggcttatagagaaatgcctacatatcggaccgtcccaagaagaagacgtcgtggtcatcgcaggagaagaagaagaaataaatctaatggaggtacctcacttggtttgcaacggatgcttcaagtggggaccggacaatcatccagggcacaatctccaatggaaagcagacgcctgtccgcctcatcaatcggagctcgagcggaagcccatgtaagaccggttttagcctccactagaagtactgggtttgtgttagaagcgctaacaaaccgaccaaaggaggcagattcttcccgttctatcaaaacaatctcagccaaacccacttaccaaagaagatcaagtgaatcttccatcaaaggaatcaaatcaaaactggctaccatgttccatcacggaaagaagcctgttcaaactcataagagacaaggaagcgttgcaagcgcgttaaattgcgtgatagaagacgatgatgattctgacattgaccctcttactgataccaatccgaaatcgaacattgacgataagaataaagactctcctataactccgcttaaaagagtcgcaggtaagcctctcttctccacttctgctggtaatacaccagagaagcgcttgggatctattgcttctacggaattggaattctcaaaacagacagaactcccttcacaacaaacacctgaatttgataaaggcgatctgggatcaattcccattattccacatttggatgaagatttctcgactgagaacgacctctcagcacaaactggttatcaaaatgctatatgttctcgtcttgagctcaatgagctacaaactattcttaacgaacataacgaagaggatagcgaggaacaggatcaagaccaggaagaagaggaagaagaggaagaagaagaggaagatgaagacgacggtactgaaactgctgctagctctaacgagcttcctacaagacatgcacgttcagcagcttcctccatttatcatgaagaggggattttccatgacagcgatgatgactatatatacgttccaactgaaatccatcgccggagaacatcttcaatcactagtaatttgtcaaatactccttacggaggcgatgaaatgaaatggaatccgcctcgaaaggaaattactcgcagacggtacattcgcgattccttacgttgcattaaacctttaggatttgatgaatcgtgggtcaacaaaatcgcattagcgccctccatgggaccaaaatatgaaaccaataacccaccagtatctgggtttatatcaaattctgatttatcatctaagaacaagttttctctcaaaaaactatacaatactcaacccgcattgctgttaagcagatgtaaaaaccattacttgacaccatacatcattactccttcaggacttgtacgagccattcctaaggagtga

SEQ ID NO: 97625 - protein, 818 aa, Kluyveromyces lactis NRRL Y-1140
MSSVSVPLRPSHGQWSSSPNSTCIPSCKKESGMKRMNHVKSLSSDTSSDNTGEDISLLDCHCTSLGASDISLTTNSGSVQEFTGTNTSSSTPSTTQTAKKKLNNVKSTSRVVPRPKPNYEKSLEYFQWVDNAPRRPPSYKSVNSNRRITYPIYETLDDNVLPGYSPAVKAITVISLKQEWLNPYELSSSRAWKNFIMEINSTQLNFYHIHESLTSNIKNYYGGPTNFPNDLNSSKQSTRFLPSLHSKSTYQFNRSDQQWITKMIQSNEKKYLSNDMLFKSFSLQYGKFGIPTDYTKKTFVLRLRCELQQFLINFAHVDDMIDWSVSLSIGIDVSLDLAYREMPTYRTVPRRRRRGHRRRRRRNKSNGGTSLGLQRMLQVGTGQSSRAQSPMESRRLSASSIGARAEAHVRPVLASTRSTGFVLEALTNRPKEADSSRSIKTISAKPTYQRRSSESSIKGIKSKLATMFHHGKKPVQTHKRQGSVASALNCVIEDDDDSDIDPLTDTNPKSNIDDKNKDSPITPLKRVAGKPLFSTSAGNTPEKRLGSIASTELEFSKQTELPSQQTPEFDKGDLGSIPIIPHLDEDFSTENDLSAQTGYQNAICSRLELNELQTILNEHNEEDSEEQDQDQEEEEEEEEEEEDEDDGTETAASSNELPTRHARSAASSIYHEEGIFHDSDDDYIYVPTEIHRRRTSSITSNLSNTPYGGDEMKWNPPRKEITRRRYIRDSLRCIKPLGFDESWVNKIALAPSMGPKYETNNPPVSGFISNSDLSSKNKFSLKKLYNTQPALLLSRCKNHYLTPYIITPSGLVRAIPKE

SEQ ID NO: 97626 - DNA, 4263 bp, Saccharomyces cerevisiae
  CDS (1752)..(3974)
ccaggcagcctataaaatgaagttgacaaccgagtaggctatcacgtatgcatggaacgtatattttagcgtgaccaatgctgaatgatgatagtctatagctgaaaatattatccaataatatcagaaaaagaaaactcaccagcaccagtgcatccaatctgtattctgttagtattcctgatacagttatttccctcgttatggctcattcagacgccaaaaagagcatagagttagacaacattggagggagtagctcagttactgttgacagtggctttcactaataaaagccattgcaatatgataatgactagcagaaatttaaatattaacaggattcttcttggatgagaaacgtacataatttcgcaaaaaagaaaaaaatatttactgctataaatcctgtcatcaacaatagttttcttccttgccaacgtcctttagcacaaatctcgtaggttctatgcttaacagagcgtcaacagaagcgggtatcggctcgacgtgaataatggagattgttacatccatgtgccgctctacccatttcatttctacgcctcaataaaatgtatgaaaaatgaaaagatgtaaaacaaaacaacagttccgtaaccgcggaaagttgcgtctcgtaaaaggaatgaaaaactcatatacattcaccagatatgttctatgaaactcgaaagcttccatcaattcacactaagctacacggctcctaataagcactgtaattccatcaaatgacagcgtgacttcttgagtagtgtagaaccactcgtcccactaaatcacagcccttaatccgtgcacagtgagttaaaatatgactttattcatgtaaaacgaaatttcatcatatactcgatctttgttctgctgttcttgagatgtaaattacgtgaattcctccggttaacaccttcagagtcgcatggtcagtcaaaaattccacgtcttatcaccgtggtctattccaaccttgtaatataaccaacacatcgattttcggtacatgggtgtttgagatttatcctcatttgacacatgtacctgaaactaatcttttctatccggggctccgtgggaaacgtaacccgaattcaaattccgccgaggccccttttttattttagctcactcactgggtacggaagcagatagagctctggatacccggaaatcagcaacacccagagaccttggcacgggaataagatgcagtaccgaatgatccgggtcccacaactaagtcaaaagaaaaaaagagagaattattttgctgcggtttttcgttacctatgctaactgtttcctccatacccctccacgccgttttctctaatactgtccccattatctttttgcgaactttctttcggctgcttccggccagtttctcccccatgcaaccccctgcgcaaaggaacagatctgctcttgatcaagtaagaaaatgtggggggcaggcatcttgaaaaattctctaaaatttgcatgtattctgttttccgccaagggatagagcaagtggaagacgtagttgaaggacttttcgtaatatatacaggcatgctatttatttattttgttggtgctttcttggtaaattgcaaaaactgttagtgaagtttctttgtaactttggcactagttgttacacaggcagtaacactaagcactatttttttacgttgttttcgcagacagcagaagagataaacggacctattcagaaaatgtcctccagcatctttgaaatgacaatagaccacgacggtatggatagtacggggctgaagctttcacagacagcctcatccatatccatgggcgacgagtttctttgttccagtactactagtaattctattctggattctccgcttccgaaagtgacttttaaccatatcgatagcataacagacattaacacaaacatcatgaacgaaatagtggagccacaatccggagtagatgttgatgttgctgacaaaaacgtgctttactgcatagatccgtacccagtggaacctccgtgttatgattttgcgaatccgtctaaagtcattaggtaccctatatatgagcattgtcgtccgtgcctcacttctgtgaaacctcccagttatacaccgtctgtagaacactatactgtggtttctatgaagatggaaaaactatcgccctttgaaaatgcttcttctcgattatggaacaactttattcttcaaataaactctacgcagataaacttttattctattgacgattcattaaccaggcatattaaaaactatcgtggtggtgacatgtttgaccattcccaccattccaaaactgctagcgatcgccatcattcggctcggtcgttattaaatgcgttcacgacgaaatccacttaccaattcgataaatatgacaaggaaaggatatgcggggaaatagcacgagacgagcacaaatttttatcagatgagcgcctctttaagagttactccctgcaatgtgccaaagttggtctgcctatagattattcctctagagattttgttttaagaatgcgttgtgagggacaacagtttctagtgcagttttctcatgtagacgaattgatctattgggctatgtatttgaacatgggtatatccctgtccttggatctggaattgagggaaatgcccacctatagaagcgttcccagaaggagacatccgagggcaagaagatttaagcaacacaataagaacaaaaacaaaaacaagagcagacaaaatagtgatagaaatgattctcgctcccactctttacttttaagaagatcacacacctcttctgttgtaacaaaagtggccaccggcaacgaacgtccgacaaacaaatcaagatcaagaagtttaagcttgctacctccctctgtatccgatgcgagtcatgactccaatgggcccaatgactctggttcattggcaggggagagttctcaaactgatttttgtggcttatttacatcaaaactaagaaatttctttaaaacagattccagttcgagaaaaaactctaatatggacattggacaaaaaatgagatcgaaggaactgaatagtgttcaagaagaaatcgatgacaatggtagtactactaataccaatacttctgttctatcttccactttttctcccacagcacattctgttttaacggcacaaacatccatccatgaaaacttcagaagtagatcgaattccaaccctatagatcctttgcgctgtgatcggtcagtgttgaaaattaataattttgaaccggtatacgagggaacaggaaggtcaactatttcgaattctgctgagcgtacgaatcgtgaagaaaagttaaaccgtggcaatgaagatgtaaatggagatgaagatgatgacgaagacgaagacgatgctaattacgaagaggatgatgaagatggatatgttgaggatgatgacatcaatagattggtatatttggatgaaagagaatctcgctatgagaatgcggacgttgagtacggtacaatattcagtacgaaaagcttttccgtgactggttgtttaaatcatgattttccaaagaaattgtcactaaaatgtggaaataagaatcaatccagtaacgattcgaagtgggcaccggcgacacaactagtttcaaggaaaagatatatcaaagactcattaagatgcatcaaaccgttaacggaagaccacccatgggtaggtaagattattttcaaaccggcactgccaccagcattcgaaacgaataatccacctataagagtttatagtggtgaagatagtacggacttgatgcacgtgaaaaaccattatttaaagccatacatagtgggatcctgcgggtttttgaaaactggctcaaaactttttcacttttacgatagaactaacgaccttacgaatttatgaaatatatgtgtttttaatgattaaataatagtcaaaaatataattaaaaaaaaaatcgaatgtaatgggtggttcatctttcatttcctgcggagggaaaggcgtatcagaaaagaaaaacatgaaaaaatctgttaaagtgataactacaaatacatatgtataaaagtatgaaaaagtatggaaagggtgagctaatgatgagagaattggaataaattagtttgccagcaacacgtaataaatgaaagggtagatattgatttgacctcttggttgtcgtcaaaaa

SEQ ID NO: 97627 - protein, 740 aa, Saccharomyces cerevisiae
MSSSIFEMTIDHDGMDSTGLKLSQTASSISMGDEFLCSSTTSNSILDSPLPKVTFNHIDSITDINTNIMNEIVEPQSGVDVDVADKNVLYCIDPYPVEPPCYDFANPSKVIRYPIYEHCRPCLTSVKPPSYTPSVEHYTVVSMKMEKLSPFENASSRLWNNFILQINSTQINFYSIDDSLTRHIKNYRGGDMFDHSHHSKTASDRHHSARSLLNAFTTKSTYQFDKYDKERICGEIARDEHKFLSDERLFKSYSLQCAKVGLPIDYSSRDFVLRMRCEGQQFLVQFSHVDELIYWAMYLNMGISLSLDLELREMPTYRSVPRRRHPRARRFKQHNKNKNKNKSRQNSDRNDSRSHSLLLRRSHTSSVVTKVATGNERPTNKSRSRSLSLLPPSVSDASHDSNGPNDSGSLAGESSQTDFCGLFTSKLRNFFKTDSSSRKNSNMDIGQKMRSKELNSVQEEIDDNGSTTNTNTSVLSSTFSPTAHSVLTAQTSIHENFRSRSNSNPIDPLRCDRSVLKINNFEPVYEGTGRSTISNSAERTNREEKLNRGNEDVNGDEDDDEDEDDANYEEDDEDGYVEDDDINRLVYLDERESRYENADVEYGTIFSTKSFSVTGCLNHDFPKKLSLKCGNKNQSSNDSKWAPATQLVSRKRYIKDSLRCIKPLTEDHPWVGKIIFKPALPPAFETNNPPIRVYSGEDSTDLMHVKNHYLKPYIVGSCGFLKTGSKLFHFYDRTNDLTNL

SEQ ID NO: 97628 - DNA, 25 bp, Artificial sequence
  primer
atggcaaataataggatcgaaaggt

SEQ ID NO: 97629 - DNA, 25 bp, Artificial sequence
  primer
ttatgcagtaatctgtccatcatca

SEQ ID NO: 97630 - protein, 720 aa, Artificial sequence
  consensus sequence
  Variant (2)..(3): Xaa in position 2 to 3 is any amino acid
  Variant (5)..(6): Xaa in position 5 to 6 is any amino acid
  Variant (9)..(9): Xaa in position 9 is any amino acid
  Variant (11)..(13): Xaa in position 11 to 13 is any amino acid
  Variant (15)..(21): Xaa in position 15 to 21 is any amino acid
  Variant (24)..(32): Xaa in position 24 to 32 is any amino acid
  Variant (33)..(36): Xaa in position 33 to 36 is any or no amino acid
  Variant (38)..(38): Xaa in position 38 is any amino acid
  Variant (40)..(40): Xaa in position 40 is any amino acid
  Variant (42)..(42): Xaa in position 42 is any amino acid
  Variant (44)..(49): Xaa in position 44 to 49 is any amino acid
  Variant (51)..(51): Xaa in position 51 is any amino acid
  Variant (53)..(53): Xaa in position 53 is any amino acid
  Variant (55)..(55): Xaa in position 55 is any amino acid
  Variant (57)..(57): Xaa in position 57 is any amino acid
  Variant (59)..(59): Xaa in position 59 is any amino acid
  Variant (61)..(64): Xaa in position 61 to 64 is any amino acid
  Variant (66)..(66): Xaa in position 66 is any amino acid
  Variant (68)..(69): Xaa in position 68 to 69 is any amino acid
  Variant (72)..(73): Xaa in position 72 to 73 is any amino acid
  Variant (79)..(79): Xaa in position 79 is any amino acid
  Variant (83)..(93): Xaa in position 83 to 93 is any amino acid
  Variant (96)..(146): Xaa in position 96 to 146 is any amino acid
  Variant (147)..(156): Xaa in position 147 to 156 is any or no amino acid
  Variant (158)..(161): Xaa in position 158 to 161 is any amino acid
  Variant (163)..(164): Xaa in position 163 to 164 is any amino acid
  Variant (166)..(167): Xaa in position 166 to 167 is any amino acid
  Variant (170)..(173): Xaa in position 170 to 173 is any amino acid
  Variant (175)..(175): Xaa in position 175 is any amino acid
  Variant (177)..(177): Xaa in position 177 is any amino acid
  Variant (180)..(185): Xaa in position 180 to 185 is any amino acid
  Variant (188)..(189): Xaa in position 188 to 189 is any amino acid
  Variant (192)..(193): Xaa in position 192 to 193 is any amino acid
  Variant (197)..(198): Xaa in position 197 to 198 is any amino acid
  Variant (200)..(202): Xaa in position 200 to 202 is any amino acid
  Variant (204)..(205): Xaa in position 204 to 205 is any amino acid
  Variant (207)..(207): Xaa in position 207 is any amino acid
  Variant (209)..(214): Xaa in position 209 to 214 is any amino acid
  Variant (217)..(219): Xaa in position 217 to 219 is any amino acid
  Variant (223)..(224): Xaa in position 223 to 224 is any amino acid
  Variant (226)..(227): Xaa in position 226 to 227 is any amino acid
  Variant (229)..(229): Xaa in position 229 is any amino acid
  Variant (232)..(232): Xaa in position 232 is any amino acid
  Variant (238)..(242): Xaa in position 238 to 242 is any amino acid
  Variant (244)..(518): Xaa in position 244 to 518 is any amino acid
  Variant (519)..(615): Xaa in position 519 to 615 is any or no amino acid
  Variant (618)..(618): Xaa in position 618 is any amino acid
  Variant (620)..(625): Xaa in position 620 to 625 is any amino acid
  Variant (627)..(627): Xaa in position 627 is any amino acid
  Variant (630)..(631): Xaa in position 630 to 631 is any amino acid
  Variant (635)..(635): Xaa in position 635 is any amino acid
  Variant (639)..(653): Xaa in position 639 to 653 is any amino acid
  Variant (655)..(657): Xaa in position 655 to 657 is any amino acid
  Variant (659)..(661): Xaa in position 659 to 661 is any amino acid
  Variant (663)..(694): Xaa in position 663 to 694 is any amino acid
  Variant (695)..(719): Xaa in position 695 to 719 is any or no amino acid
DXXPXXPPXYXXXNXXXXXXXPIXXXXXXXXXXXXXPXYXPXVXXXXXXSXKXEXLXPXEXXXXRXWXXFIXXINSTQXNFYXXXXXXXXXXXNYXXXXXXXXXXXXXXXXXXXXXXXXXXXXXXXXXXXXXXXXXXXXXXXXXXXXXXXXXXXXXLXXXXLXXSXXLQXXXXGXPXDYXXXXXXLRXXCEXXQFLXXFXXXDXXIXWXXXXXXGIXXXLDLXXRXXPXYRXVPRRRXXXXXRXXXXXXXXXXXXXXXXXXXXXXXXXXXXXXXXXXXXXXXXXXXXXXXXXXXXXXXXXXXXXXXXXXXXXXXXXXXXXXXXXXXXXXXXXXXXXXXXXXXXXXXXXXXXXXXXXXXXXXXXXXXXXXXXXXXXXXXXXXXXXXXXXXXXXXXXXXXXXXXXXXXXXXXXXXXXXXXXXXXXXXXXXXXXXXXXXXXXXXXXXXXXXXXXXXXXXXXXXXXXXXXXXXXXXXXXXXXXXXXXXXXXXXXXXXXXXXXXXXXXXXXXXXXXXXXXXXXXXXXXXXXXXXXXXXXXXXXXXXXXXXXXXXXXXXXXXXXXXXXXXXXXXXXXXXXXXXXXXXXXXXXXXXXXXXXXXXXXXXXXXXXXXXXXXXXXKWXPXXXXXXRXRYXXDSLXCIKXXXXXXXXXXXXXXXPXXXPXXXTXXXXXXXXXXXXXXXXXXXXXXXXXXXXXXXXXXXXXXXXXXXXXXXXXXXXXXXXXG

SEQ ID NO: 97631 - DNA, 117 bp, Saccharomyces cerevisiae
  CDS (1)..(117)
atgacgttgatgtctggagaaggacaaggaaaaagtagttctgtgaaacgtgtacccacaatagcagctacccttgtcttcttttttagtaattcttttcttccggcaagcaggtaa

SEQ ID NO: 97632 - protein, 38 aa, Saccharomyces cerevisiae
MTLMSGEGQGKSSSVKRVPTIAATLVFFFSNSFLPASR

SEQ ID NO: 97633 - DNA, 24 bp, Artificial sequence
  primer
atgacgttgatgtctggagaagga

SEQ ID NO: 97634 - DNA, 25 bp, Artificial sequence
  primer
ttacctgcttgccggaagaaaagaa

SEQ ID NO: 97635 - DNA, 1704 bp, Saccharomyces cerevisiae; identical to SEQ ID NO: 97156
  CDS (1)..(1704)

SEQ ID NO: 97636 - protein, 567 aa, Saccharomyces cerevisiae; identical to SEQ ID NO: 97157

SEQ ID NO: 97637 - DNA, 1461 bp, Kineococcus radiotolerans SRS30216; identical to SEQ ID NO: 97054
  CDS (1)..(1461): transl_table=11

SEQ ID NO: 97638 - protein, 486 aa, Kineococcus radiotolerans SRS30216; identical to SEQ ID NO: 97055

SEQ ID NO: 97639 - DNA, 1371 bp, Xanthobacter autotrophicus Py2
  CDS (1)..(1371): transl_table=11
atgatgtatctcatcgccgctatagccggcatcgccggggcgctgttcggcttcgacgaaggcgtcatcgccggcgccttggcaccgctgcgccgcgacctcggtatcgaccccgtcgccgagggcatgatgacggccgccgtgccgttcggcgcgttcctcggcgccattgtcggcggccgcctcgccctggccctgggtcggcgccggctgctgctggccgccgccgtcctgttcgtggtcggcgcgctcctgagcgccttcgccttcgggttgtggaccctcaccttcgcccggctcatcatcggcctcggcgtcggcgtcgccgccatgatggcgccgctctacatttccgaatgcgcgccggctgcgcagcgcggcatgctggtctccatctaccagctcgccatcacgctcggcatcctcggcgcctatgtggtgggctacgccttccacgaatcctggcgctggatgttcgcggtgggcgcggtgccggccatcgccctgttcgtgggcatcttcggcctgtcggacacgccgcgctggctcgccgtgcgcggccgggaagccgaggcccgggcggcgctggcccgcgtgcgcgagaagtccgagagcgacccggcggtgaaggccgagttcgccgagatcctcaccggcgccacccaggacgagaaccgcaaggcgcgcctgtccgacctgctcaccccgcgggtgcggccggcgctcatcgtcgccatggggctgttcctgttgcagcagctttcgggcatcaacgcggtgatctattacgcccccaccgtgttcgagctgtccggcttcagctccaccaccacccagatcctggccaccgccggcatcggcgtggtcaacgtgctgatgaccctcgtcggcatggccctcatcgaccggctgggccggcgactgctgctgctgatcggctttgccggcacggcggtggcgctgagcgtcatcgccatcggcgcggccaccggcagcgagatgatgggcaagctcgcccttggcgggctggtgctttacatcgcctccttcgccatcgccatcggcccgctgccttgggtgatgatgtccgaggtgttcccgctcgacgtgcgggcgctgggcatgagcatcgcctcgctggtcaactggggcttcaacttcctggtggtgttcagcttcccggtgctggtggcggagttcggcctggccggcgtgttcggcctctatgcggtggtctgcgtggtcggcctcgccttcacccaatggctggtgcccgaaacctccggcgtgagcctggaggagatcgagcgccatctcgacagcggccgccccctgcgggacctcggccgcttcacgccccgtgccgcctga

SEQ ID NO: 97640 - protein, 456 aa, Xanthobacter autotrophicus Py2
MMYLIAAIAGIAGALFGFDEGVIAGALAPLRRDLGIDPVAEGMMTAAVPFGAFLGAIVGGRLALALGRRRLLLAAAVLFVVGALLSAFAFGLWTLTFARLIIGLGVGVAAMMAPLYISECAPAAQRGMLVSIYQLAITLGILGAYVVGYAFHESWRWMFAVGAVPAIALFVGIFGLSDTPRWLAVRGREAEARAALARVREKSESDPAVKAEFAEILTGATQDENRKARLSDLLTPRVRPALIVAMGLFLLQQLSGINAVIYYAPTVFELSGFSSTTTQILATAGIGVVNVLMTLVGMALIDRLGRRLLLLIGFAGTAVALSVIAIGAATGSEMMGKLALGGLVLYIASFAIAIGPLPWVMMSEVFPLDVRALGMSIASLVNWGFNFLVVFSFPVLVAEFGLAGVFGLYAVVCVVGLAFTQWLVPETSGVSLEEIERHLDSGRPLRDLGRFTPRAA

SEQ ID NO: 97641 - DNA, 1683 bp, Saccharomyces cerevisiae; identical to SEQ ID NO: 96992
  CDS (1)..(1683)

SEQ ID NO: 97642 - protein, 560 aa, Saccharomyces cerevisiae; identical to SEQ ID NO: 96993

SEQ ID NO: 97643 - DNA, 1560 bp, Caulobacter crescentus CB15
  CDS (1)..(1560): transl_table=11
gtggtcgtcagaaccaccgcttgcgcgctgataccggtaacactaatgtcgccggcaaccaaaggtccgacaaggaccagtagggcatcaacgggccggtacggccccatggggaggacacctgtggcttcagtatccaacgccggtcccagcgccggcatgagcgcggacggcgggaaggtcaacatgaccttcgtcgccgcgatcgtcgccgtcgccacgatcggcggcttcatgttcggctacgacagcggcgtcatcaacggcacgcaagagggcctggaaagcgccttcaatctcagcaagctgggcaccggcctgaatgtcggcgccatcctgatcggctgcgccatcggcgccttcgccgccggccgcctggccgacgtgtggggccgccgcacggtgatgatcatctcggccctgctgttcgtgatcagcgccatcggcaccggcgcggccgagagctcgatcgtgttcatcatcttccgcctgatcggcggtctgggcgtcggcgccgccagcgtgctgtgcccggtctacatctcggaagtcacgcccgcgaacatccgcggccgcctgtcgtccgtgcagcagatcatgatcatcaccggcctgaccggcgccttcgtggccaactacgccctggcccacaccgccggcagctcgacggccgagttctggctgggcctgcccgcctggcgctggatgttctggatgcagatcattcccgccggcgtgttcttcctctgcctgctgggcattcccgaaagcccccgctacctcgtggccaagggcaaggacgcccaggccgaagcgatcctctcgcgcctgttcggcgcgggccagggcgccaagaaggtcgaggaaatccgcgcctcgctgtcggccgatcacaagcccacgttctcggaccttctggatccgacgaccaagaagctgcgcgtcatcctgtgggcgggcctcgtcttggccgtgttccagcagctggtgggcatcaacatcgtcttctactacggctcggtgctgtggcagtcggtgggcttcaccgaggacgacagcctgaagatcaacatcctgtcgggcacgctgtcgatcctggcctgtctgctggccatcggcctgatcgacaagatcggccgcaagccgctgctgctgatcggttcggccggcatggccgtgacgcttggcgtgctgacctggtgcttctcgaccgccaccacggtcaacggcgccctgaccctgggcgaccagatcggcctgaccgcccttatcgccgccaacctctacgtgatcttcttcaacctctcgtggggtccggtcatgtgggtgatgctgggcgagatgttccccaaccagatgcgcggctcggccctggccgtctgcggcttcgcccagtggatcgccaacttcgccatctcggtcagcttcccggccctggccgcggccagcctgccgatgacctacggcttctatgcgctgagcgctgtcgtctcgttcttcctggtccagaagctggtccacgaaacgcgcggcaaggaactggaagcgatgcaggggtga

SEQ ID NO: 97644 - protein, 519 aa, Caulobacter crescentus CB15
MVVRTTACALIPVTLMSPATKGPTRTSRASTGRYGPMGRTPVASVSNAGPSAGMSADGGKVNMTFVAAIVAVATIGGFMFGYDSGVINGTQEGLESAFNLSKLGTGLNVGAILIGCAIGAFAAGRLADVWGRRTVMIISALLFVISAIGTGAAESSIVFIIFRLIGGLGVGAASVLCPVYISEVTPANIRGRLSSVQQIMIITGLTGAFVANYALAHTAGSSTAEFWLGLPAWRWMFWMQIIPAGVFFLCLLGIPESPRYLVAKGKDAQAEAILSRLFGAGQGAKKVEEIRASLSADHKPTFSDLLDPTTKKLRVILWAGLVLAVFQQLVGINIVFYYGSVLWQSVGFTEDDSLKINILSGTLSILACLLAIGLIDKIGRKPLLLIGSAGMAVTLGVLTWCFSTATTVNGALTLGDQIGLTALIAANLYVIFFNLSWGPVMWVMLGEMFPNQMRGSALAVCGFAQWIANFAISVSFPALAAASLPMTYGFYALSAVVSFFLVQKLVHETRGKELEAMQG

SEQ ID NO: 97645 - DNA, 1434 bp, Salmonella typhimurium LT2
  CDS (1)..(1434): transl_table=11
atgtccacatcagatagttgttataatacgggttacatattacgcatctgcgcgattgccgcactgggcggaatattatttggctacgatactgctgttatttcaggtgcgattggttcactgaccagctactttcatctatctcctgctgagaccggctgggcggtttcctgcgttgtggtggggtgcgttattggttcgtttagcgccggatatttatccaaacgttttggacgcaagaaatcattgatggtttcagcgctgttattcactatttccgcagtgggcacctccctctcctacacgttcacccattttgtgatttatcgcattatcggtggactggcagtcggcctggcggcaacagtatcaccgatgtatatgtctgaagtctcaccgaaaaacatgcgcggcagagcattaagtatgcagcagttcgctatcgttttcggtcagattctgatcttctacgttaactacaaaatagcatcgattgcagcggatacctggctcattgaacttggctggcgctatatgtttgctgcgggtattattccctgcattttgttctgtattttagtctttttaatcccggaatctccccgctggatgatgatgattggtcgcgaggaggagacgctaaaaatactgaccaaaatatccaacgaagaacatgccagacatcttcttgccgatataaaaacctcactgcaaaatgaccaactaaacgcccatcaaaaactcaattaccgcgacgggaacgtgcgtttcatcctgatcctgggctgcatgatcgctatgctgcaacaggtaacaggggttaacgtcatgatgtattacgcgccaatcgtccttaaggatgtgaccggtagcgcccaggaggccctgttccagacaatctggatcggcgtgattcagcttatcggttccattattggcgcaatgattatggataagatggggcgtttgtcgctgatgcgtaaaggcactatcggcagcatcatcggcttgttgctcacctcatgggcgctgtacagccaggcaaccggttatttcgcgctattcggtatgctgttctttatgattttctacgcgctttcctggggcgtgggcgcatgggtgcttatttctgaaatattccctaaccggatgaggtcgcagggaatgagtatttcggtcggatttatgtggatggcaaactttttagtttcgcaattcttcccgatgattaatgaaaacccgtatttactttcgcatttccacggcgcatttccaatgtggatatttgccatctgctgcatcttcagttacttctttatctgccgttacctgccggaaacaaaaggcatttcgctggagaaaatggagagcgtagtgttagcaaaacgcagaaaaaaactgcagccaattcaaaccgaacgttattctgattaa

SEQ ID NO: 97646 - protein, 477 aa, Salmonella typhimurium LT2
MSTSDSCYNTGYILRICAIAALGGILFGYDTAVISGAIGSLTSYFHLSPAETGWAVSCVVVGCVIGSFSAGYLSKRFGRKKSLMVSALLFTISAVGTSLSYTFTHFVIYRIIGGLAVGLAATVSPMYMSEVSPKNMRGRALSMQQFAIVFGQILIFYVNYKIASIAADTWLIELGWRYMFAAGIIPCILFCILVFLIPESPRWMMMIGREEETLKILTKISNEEHARHLLADIKTSLQNDQLNAHQKLNYRDGNVRFILILGCMIAMLQQVTGVNVMMYYAPIVLKDVTGSAQEALFQTIWIGVIQLIGSIIGAMIMDKMGRLSLMRKGTIGSIIGLLLTSWALYSQATGYFALFGMLFFMIFYALSWGVGAWVLISEIFPNRMRSQGMSISVGFMWMANFLVSQFFPMINENPYLLSHFHGAFPMWIFAICCIFSYFFICRYLPETKGISLEKMESVVLAKRRKKLQPIQTERYSD

SEQ ID NO: 97647 - DNA, 1644 bp, Schizosaccharomyces pombe 972h-; identical to SEQ ID NO: 97308
  CDS (1)..(1644)

SEQ ID NO: 97648 - protein, 547 aa, Schizosaccharomyces pombe 972h-; identical to SEQ ID NO: 97309

SEQ ID NO: 97649 - DNA, 1554 bp, Bifidobacterium longum NCC2705; identical to SEQ ID NO: 96994
  CDS (1)..(1554): transl_table=11

SEQ ID NO: 97650 - protein, 517 aa, Bifidobacterium longum NCC2705; identical to SEQ ID NO: 96995

SEQ ID NO: 97651 - DNA, 1476 bp, Shigella flexneri 2a str. 301
  CDS (1)..(1476): transl_table=11
atgaatacccagtataattccagttatatattttcgattaccttagtcgctacattaggtggtttattatttggctacgacaccgccgttatttccggtactgttgagtcactcaataccgtctttgttgctccacaaaacttaagtgaatccgctgccaactccctgttaggattttgcgtagccagcgctctgattggttgcatcatcggcggtgccctcggtggttattgcagtaaccgcttcggccgtcgtgattcacttaagatttctgctgtcctgttttttatttctggtgtaggttctgcctggccagaacttggttttacctctataaacccggacaacacagtacctatttatctggcaggttatgtcccggaatttgttatttatcgtattattggcggtattggcgttggtttagcctcaatgctttcaccaatgtatattgcggaactggctccagctcatattcgcggaaaactggtttcatttaaccagtttgcgattattttcgggcaacttttagtttactgcgtaaactattttattgcccgttccggtgatgccagctggctgaatactgacggcaggcgttatatgtttgcctcggaatgtatccctgcactgctgttcttaatgctgctgtataccgtgccagaaagtcctcgctggctgatgtcacgcggcaagcaagaacagacggaaagtatcctgcgcaaaattatgggcaacacgcttgcaactcaggcagtacaggaaattaaacactccctggatcatggccgcaaaaccggtggtcgtctgctgatgtttggcgtgggcgtgattgtaatcggcgttatgctctccatcttccagcaatttgtcggcatcaatgtggtgctgtactacgcgccggaagtgttcaaaacgctgggggccagcacggatatcgcgctgttgcagaccattattgtcggagttatcaacctcacctttaccgtactggcaattatgactgtggataaatttggtcgtaagccactgcaaattatcggcgcactcggaatggcaatcggtatgtttagcctcggtaccgcgttttacactcaggcatcgggtattgtggcgctactgtcgatgctgttctatgttgccgcctttgccatgtcctggggtccggtatgctgggtactgctgtcggaaatcttcccgaatgctattcgtggtaaagcgctggcaatcgcggtggcggcccagtggctggcgaactacttcgtctcctggaccttcccgatgatggacaaaaactcctggctggtggcccatttccacaacggtttctcctactggatttacggttgtatgggcgttctggcagcactgtttatgtggaaatttgtcccggaaaccaaaggtaaaacccttgaggagctggaagcgctctgggaaccggaaacgaagaaaacacaacaaactgctacgctgtaa

SEQ ID NO: 97652 - protein, 491 aa, Shigella flexneri 2a str. 301
MNTQYNSSYIFSITLVATLGGLLFGYDTAVISGTVESLNTVFVAPQNLSESAANSLLGFCVASALIGCIIGGALGGYCSNRFGRRDSLKISAVLFFISGVGSAWPELGFTSINPDNTVPIYLAGYVPEFVIYRIIGGIGVGLASMLSPMYIAELAPAHIRGKLVSFNQFAIIFGQLLVYCVNYFIARSGDASWLNTDGRRYMFASECIPALLFLMLLYTVPESPRWLMSRGKQEQTESILRKIMGNTLATQAVQEIKHSLDHGRKTGGRLLMFGVGVIVIGVMLSIFQQFVGINVVLYYAPEVFKTLGASTDIALLQTIIVGVINLTFTVLAIMTVDKFGRKPLQIIGALGMAIGMFSLGTAFYTQASGIVALLSMLFYVAAFAMSWGPVCWVLLSEIFPNAIRGKALAIAVAAQWLANYFVSWTFPMMDKNSWLVAHFHNGFSYWIYGCMGVLAALFMWKFVPETKGKTLEELEALWEPETKKTQQTATL

SEQ ID NO: 97653 - DNA, 1407 bp, Bacillus cereus ATCC 10987; identical to SEQ ID NO: 96996
  CDS (1)..(1407): transl_table=11

SEQ ID NO: 97654 - protein, 468 aa, Bacillus cereus ATCC 10987; identical to SEQ ID NO: 96997

SEQ ID NO: 97655 - DNA, 1713 bp, Magnaporthe grisea 70-15; identical to SEQ ID NO: 96998
  CDS (1)..(1713)

SEQ ID NO: 97656 - protein, 570 aa, Magnaporthe grisea 70-15; identical to SEQ ID NO: 96999

SEQ ID NO: 97657 - DNA, 1539 bp, Magnaporthe grisea 70-15
  CDS (1)..(1539)
atggctccctcaactctcgtcggccgtcccctgaactgggccatcacggccgcagctggtgcaggcttcctgcttttcggatatgaccaaggcgtcatgagcggtctccttaccggagcagcttttaccaagacattcccagagatggacaccctcaatggcgggagtgcttctcttcaaggcacagtagtcgccatatacgaaataggttgtttctttggagcgattgcagctctgttcatcggagagccccttggaagacgcaagatgatcatgttagggtgcatcattcttgccatcggtggtgcgcttcaggcgtcggcgagcacgattccccacctgatcgttggtcgaatagtggctggattggggaacggtctgaataccagcacaatccccgtctggcactcggagctgatgaaagccaccaagcgcggaaagggactgtgcgtcgaattggccatcaacatctttggagtaatgttatcctactgggtcgactacggcatgtcctttgagaagagcgacgcccaattccggttcccgctggccctacagtgcgcatttgccatcgtcaccttcttgggcgtgctcttcctccccgagtcgccccgctggctcgtcgccaacgaccgccacgaagaggcccaggacgttctgtggtccgtcgaagagaatgccagaagcatttcacgcgacgatgagcgtgtgactaagcatttggtcgagatccagacggcgatccgcgaggagcgcgaggccgcgggcaacaacggctacagcgccctattccacaacggcgagcaaaagttcctctacagaactttgctggggataggtgggcagttttgccagcaactatctggtatcaatttaattacatactatgctcccgtcatctttcaacagagcgttgggttgagccgggacctttcgctgcttctcgcgggcttcaacggcgtagcctacttcttttcctcgctggtaccgatctggctcatcgaccgcctgggccgccgcaagctcatgctctttgctgcagccggccagggctgctgtatggcaatccttgccgggacggttgccaacgggagcaagagcgcgggcattgtcgccattgtcatgctcttcctcttcaacttcttcttctccgtcggtctgctggccatcccatggctactccccgccgagtacgcacccctggctattcggtctcgggccgcagcactggcaactgcttccaactggatctttaccttcctcgtcgtcgaaatcacccccgtcagcatcaccaacatccagtggcgcacctacatttactttggcgtcttcaacttttgcttcctaccactcatctacttcttctaccccgagacccgcaacctgaccctggagcagatcgacaagctctttacgggcgatcgcgtaaagatgcactgggatcccagcatgggctccgtcgagggcctgaccaccggaagccccgagggcgagaaggaggctgctgtccagaccgagattgccgagaggcgggattaa

SEQ ID NO: 97658 - protein, 512 aa, Magnaporthe grisea 70-15
MAPSTLVGRPLNWAITAAAGAGFLLFGYDQGVMSGLLTGAAFTKTFPEMDTLNGGSASLQGTVVAIYEIGCFFGAIAALFIGEPLGRRKMIMLGCIILAIGGALQASASTIPHLIVGRIVAGLGNGLNTSTIPVWHSELMKATKRGKGLCVELAINIFGVMLSYWVDYGMSFEKSDAQFRFPLALQCAFAIVTFLGVLFLPESPRWLVANDRHEEAQDVLWSVEENARSISRDDERVTKHLVEIQTAIREEREAAGNNGYSALFHNGEQKFLYRTLLGIGGQFCQQLSGINLITYYAPVIFQQSVGLSRDLSLLLAGFNGVAYFFSSLVPIWLIDRLGRRKLMLFAAAGQGCCMAILAGTVANGSKSAGIVAIVMLFLFNFFFSVGLLAIPWLLPAEYAPLAIRSRAAALATASNWIFTFLVVEITPVSITNIQWRTYIYFGVFNFCFLPLIYFFYPETRNLTLEQIDKLFTGDRVKMHWDPSMGSVEGLTTGSPEGEKEAAVQTEIAERRD

SEQ ID NO: 97659 - DNA, 1623 bp, Gibberella zeae PH-1
  CDS (1)..(1623)
atgaacactcttcgaagggcatcgctcagcaagcccgaggaggctggcaagacatggcctgctatcgccatcggtgccttcgtcgcctttggtggtgttctctacggttatgataccggtaccatctctggtattctggccatgccatactggcagagcctcttcagcaccggctacagagacgccaagggccacctgaacattacaacagctcaggaatcgggaattgtctcgattctttccgccggtacctttttcggtgctctgtcgtcaccctttatgactgactacatcggtcgtcgccctggtcttatgattgctacatgggttttcaacctcggtgtctgtcttcaagttgctgctacatctattcccctgttcttggctggccgattctttgctggtttcggtgttggtcagatctctgctattattcctctataccagtccgaaacagctcctaaatggattcgaggtgccattgtcggatcatatcaatgggccatcacaatcggtcttttactagcagctatcgtcaacaacgcaacaggtggccgcaacgacacaggctcttaccgtatccccgtcgccgttcagttcgcatactctctcatccttttcggtggaatgattatcctccccgagactcctcgattcctcatcaagaaggatcgtcatgaagccgcagccaaggccctctccagaatccgtcgtctcactcccgatcatcccgctatccaggctgagctcgccgaggtcagggccaaccacgagtacgagacgagcattggaaagtcctcttacctcgactgcttcaagcctcctattctgaagcgtcagttcactggttgtgctctccaggctctgcagcagcttactggtatcaacttcattttctactatggtaccaagtacttccagaattctggtatctcaagcggttttgttatttccatgatcacttcagccatcaacgtcgcttccacaatccctggaatgtacgccatcgacaaatggggtcgacgacctcttctcctctggggtgctgtcggcatgtgtgtctcgcagttcatcgtggccatggctggtacattttccactggtcagaatgctgatggaaccatctttgtcaagagtctggctggccaaaaggctgctgtctctttcgtctgtatctacatcttcttcttcgcctctacctggggtcctctggcttgggtcgttactggcgagatcttccctctcaagacccgtgccaagtctctcagtatgaccactgccactaactggcttttcaactgggctatcgcttattctactccctacctcgtcgattacggctctggaaaggccaacctccagtccaaaatcttcttcatctggttcggctgctgtttcctgtgtattgctttcgtttacttcttcatctacgagaccaagggtctgtcccttgaggaggttgatcagctgtacgatgaagtcagtgttgctagcaagtccaagcagtggaagcctagcgagtcctgggagcaccgccagagtgtttcgggggcggatggtaagatgtttggtggaaacgatcaccagggagaagttactcacaacgagaagaacgaggcttaa

SEQ ID NO: 97660 - protein, 540 aa, Gibberella zeae PH-1
MNTLRRASLSKPEEAGKTWPAIAIGAFVAFGGVLYGYDTGTISGILAMPYWQSLFSTGYRDAKGHLNITTAQESGIVSILSAGTFFGALSSPFMTDYIGRRPGLMIATWVFNLGVCLQVAATSIPLFLAGRFFAGFGVGQISAIIPLYQSETAPKWIRGAIVGSYQWAITIGLLLAAIVNNATGGRNDTGSYRIPVAVQFAYSLILFGGMIILPETPRFLIKKDRHEAAAKALSRIRRLTPDHPAIQAELAEVRANHEYETSIGKSSYLDCFKPPILKRQFTGCALQALQQLTGINFIFYYGTKYFQNSGISSGFVISMITSAINVASTIPGMYAIDKWGRRPLLLWGAVGMCVSQFIVAMAGTFSTGQNADGTIFVKSLAGQKAAVSFVCIYIFFFASTWGPLAWVVTGEIFPLKTRAKSLSMTTATNWLFNWAIAYSTPYLVDYGSGKANLQSKIFFIWFGCCFLCIAFVYFFIYETKGLSLEEVDQLYDEVSVASKSKQWKPSESWEHRQSVSGADGKMFGGNDHQGEVTHNEKNEA

SEQ ID NO: 97661 - DNA, 1584 bp, Gibberella zeae PH-1; identical to SEQ ID NO: 97000
  CDS (1)..(1584)

SEQ ID NO: 97662 - protein, 527 aa, Gibberella zeae PH-1; identical to SEQ ID NO: 97001

SEQ ID NO: 97663 - DNA, 1605 bp, Gibberella zeae PH-1
  CDS (1)..(1605)
atgttgggtcaaaagtccatcaaggtcaatggcgccgactgcggtgtcgaagccatcctcctgggtgtgattacgtccattggaggctttctctttggctacgatacaggtcaaattagttctatgctcctgttctcagacttcaaggagcgatttgcccaaggccctgcgggtgataaagaatggaacccttacatccagtctattcttgttagtctcatgagtattggaagtttgattggtgctctctctggtgcttataccgctgattggtggggtcgacgaaagagtatgacattcggagtcgccgttttcattatcggtaatatcattcagatttcggcgatggagtcgtgggttcatatgatgatgggtcgattcatcgctggtctcggtgtcggtaacctttccgtcggtgttcccatgttccagtccgaatgcgcccctcgagagatccgtggtgccgttgtcgcctcgtaccagctcatgatcaccatcggtatccttatttccaacatcgcatgttttggtttcaagaagatggataccagcagcgcctcgtggagaatcgtcatcggcctcggtatccttttctctcttcctcttggcatcggtatcctcatcgtccccgagtctcctagatggcttgcttctcgaggcgactgggagggcgcccaaatagcactgggtcgactccgtggcatgaagcacaacctcgaccaccccctcgtccaggacgacctgaaggaaatgaaggacattcttgagaaggagcgacaagttggccagggtagctgggccgagtgcttcaaccccaagagcggaattcccaagctcgtctggcgaacattcctcggcttcttcatccacttcctccagcagtggaccggtgtcaactacttcttctactatggtgcctccatcttcgagtccgccggtatcgaggaccctatccagacccagcttatcctgggtgctgtcaacgtcgccactacctttatgggtctctggttcgttgagcgattcggtcgtcgctggcctctattcatcggtgctctctggcaagctggttggctcgctgtctttgccgctattggtaccgctatgaacccctcagagagcaaggccgtcggtatcgtcctcattgtctgcgcctgcatgttcatcgcttctttcgccagtacttggggtcccatggcttgggtcgttatcggcgaaagtttccctctccgtactcgtgcgaagcaagcttctattgctacagccggcaactggcttggaaacttcatgattgctttccttactcctattgccaccgctggtatcagttacggttatggtttcgtctttgtcggaaccaacttggctgccgctgcccttgtttggttcttccttttcgaatctcgcgccctcagtctggagaacgtcgacctcatgtacggccaggagggtctcaagccttggaacagtcacaagtgggttcctcctggatacatcacccgcgagcagcgagacgaagtccacttccaacgtggcaacgagaagcccaggaacagcgagtctcactctggagaagactcgagagtcgagtcggttatggcttaa

SEQ ID NO: 97664 - protein, 534 aa, Gibberella zeae PH-1
MLGQKSIKVNGADCGVEAILLGVITSIGGFLFGYDTGQISSMLLFSDFKERFAQGPAGDKEWNPYIQSILVSLMSIGSLIGALSGAYTADWWGRRKSMTFGVAVFIIGNIIQISAMESWVHMMMGRFIAGLGVGNLSVGVPMFQSECAPREIRGAVVASYQLMITIGILISNIACFGFKKMDTSSASWRIVIGLGILFSLPLGIGILIVPESPRWLASRGDWEGAQIALGRLRGMKHNLDHPLVQDDLKEMKDILEKERQVGQGSWAECFNPKSGIPKLVWRTFLGFFIHFLQQWTGVNYFFYYGASIFESAGIEDPIQTQLILGAVNVATTFMGLWFVERFGRRWPLFIGALWQAGWLAVFAAIGTAMNPSESKAVGIVLIVCACMFIASFASTWGPMAWVVIGESFPLRTRAKQASIATAGNWLGNFMIAFLTPIATAGISYGYGFVFVGTNLAAAALVWFFLFESRALSLENVDLMYGQEGLKPWNSHKWVPPGYITREQRDEVHFQRGNEKPRNSESHSGEDSRVESVMA

SEQ ID NO: 97665 - DNA, 1638 bp, Gibberella zeae PH-1
  CDS (1)..(1638)
atgggtatcttgactctcaaggaggatcggcctacgccaaaggccgtctacaactggcgcgtctacgcatgcgccgccattgcgtcaatggctgcttgtacgattggttatgattctgcttttatcggaaccaccctggctttgccctcgtttgttcaagagttcaactttgagagctacgatcctgctgctttggctctgaccaagcagaacattgtttctgtctaccaagccggtgcctttttcggttcccttttcgcctacgtcagcagttactttctcggtcgtcgatggtctcttatcatattctctgccgtcttcatggtcggagccggtatgatgttgggtgccaatggtgaccggggtctcggtcttattatcggcggtcgtgtcttggccggtatcggtgtcggcggatgctccaacatgacaccaatttacatctctgagctggcgccacctgctattcgtggtcgccttgtcggtctctacgaactcggctggcaggctggtggtcttgtcggtttctggatcaactacggaatcaaccagcatctcccttactcccctggccaaaacgagaatgtctggctcattccctttgctgttcagctcatccctgctggtcttcttatggtcggcgctgtctttattcccgagtcgcctcgatggttgttctccaagggcaagcgtgagcaggctatcaagaacctttgctggatgcgaaatctaagccaagacgatgtttacattgttgaggagattaactttatcgacgccgagatcgaccgataccacagtgctgttggtgccggtttctggaagccattcgctgctctcaagaaccgtaaggttcagtggcgcttcctcctcggtggtctcctatttgtgttccaaaatggctccggaatcaacgccatcaactactacagccctaccgtcttcaaatcgatcggcattaccggaacaaacaccagcttcctcaccacgggtatctttggtgttgtcaagactactttgacctttgtctggctcatggttcttattgaccacatgggtcgacgaaacctcctcatgattggtgctgctggtggtgcattctccatgtactttattggtgcatacatcaagatcgccaacaccgaggccaagcttgctagtggacaagatgtttctctctcctctggtggtatcgcagctgtgttcttcttctacctctacactgctttctacaccccatcatggaacggcacaccttgggttctcaactctgagatgtttgaccaaaacactcgatctctgggtcaggccaacgccgctgccaacaactggttctggaactttatcattgcccgcttcactgagcaaatgttccgagcttggggctttggtgtttacatctttttcgcctctctcatgatcctctccatcttctttgtctttttctgcattcccgagaccaagggtgtgcctctggaggctatggacaagctgtttgcgaccaagcctatctggaaggccaacaagattgtcatggaggatttgagattgcaagaggaagagttccgacacaacgctgacggtgttgacatgcgggaggaaaaggccaaggctgagcagattgagggtgcggcttag

SEQ ID NO: 97666 - protein, 545 aa, Gibberella zeae PH-1
MGILTLKEDRPTPKAVYNWRVYACAAIASMAACTIGYDSAFIGTTLALPSFVQEFNFESYDPAALALTKQNIVSVYQAGAFFGSLFAYVSSYFLGRRWSLIIFSAVFMVGAGMMLGANGDRGLGLIIGGRVLAGIGVGGCSNMTPIYISELAPPAIRGRLVGLYELGWQAGGLVGFWINYGINQHLPYSPGQNENVWLIPFAVQLIPAGLLMVGAVFIPESPRWLFSKGKREQAIKNLCWMRNLSQDDVYIVEEINFIDAEIDRYHSAVGAGFWKPFAALKNRKVQWRFLLGGLLFVFQNGSGINAINYYSPTVFKSIGITGTNTSFLTTGIFGVVKTTLTFVWLMVLIDHMGRRNLLMIGAAGGAFSMYFIGAYIKIANTEAKLASGQDVSLSSGGIAAVFFFYLYTAFYTPSWNGTPWVLNSEMFDQNTRSLGQANAAANNWFWNFIIARFTEQMFRAWGFGVYIFFASLMILSIFFVFFCIPETKGVPLEAMDKLFATKPIWKANKIVMEDLRLQEEEFRHNADGVDMREEKAKAEQIEGAA

SEQ ID NO: 97667 - DNA, 1743 bp, Gibberella zeae PH-1
  CDS (1)..(1743)
atggcgccaccttccatgactgtttatttcgatgaccagaacccaaactcagaaaagggcaaagaagctggtgctcgtcggtccctcgccggacttgactactcacctctgcctcgcatcaccggaaggtcttttcttctagccacctttgtctctatgggtggtcttctcttcggatatgacaccggccaaatctctggcttcctcgagatgcccgactttctcgaccgctttgcccaaaccaacagcaatggcgaaaaagaattcagcactgtgcgctcaggtctaatcgtcgctcttctttccattggtaccctcatcggcgctctcgtcgctgcgcccatctccgatcgcattggtcgtaaatacagtatttctggctggacctgggtcatcgctatcggttttatcattcagatctcgtcaaaccgagattgggtgcagatcatgatgggacgatgggtcgctggtttgggtgttggtgcgctgtcgcttttggtgcccatgttccaggccgagactgctcctccatggattcgaggtgccatggtttgttgttaccagctcttcatcacaatgggtatcttcttggccgcctgcttcaactacggcacagtcacccaccagcgcaacaactcagcaagctggcgcatcgtcatcggcatcggctgggtcttcaccctcattctcggcattggaattctcttccttcccgacacacctcgattcgactaccgcaagggcaagattgaccgcgcacgcgacaccctctgcaaagtctacggcgcgacacccaaccactgggccatccacacccagatggaagaaatcgaatccaagcttcgcgcagaaagccagatcaagggcaaccctgcaaaggagtttgttcaaatgttcaaagctccgcgcatgacgtaccgcatcttactcggcatgggcctgcagatgtttcagcagcttacgggtgccaactacttcttctactacggtaccaccatctttgcatctgtctcgattgacagctacaagacgcagattatcctcaacaccatcaacttcttggtcacgtttatcggtctatacatcgttgaacactatggtcgtcgcaagtctcttattgcgggaagtacttggatgtttatctgtttcctcattttcgcctcggttggtcacttctcactcgatcgcgcaaatccttctagtacccaaggcgctggtgttgccatgattgtctttgcctgtctcttcattctcggtttcgcgaccacctggggacctatgatttggaccatcatggctgagatcttcccttcgcgttaccgagccaagggtatggctttggccaccgccagtaactggctctggaatttcctgctcgccttcttcacacccttcatcaccaaagacattgacttccgctacggatacgtctttgctggatgcaatgtcctcggtggactcatcgtctacttcttcgtcattgaaggccagggtcgcacacttgaggagattgacaccatgtatcttgaaagagtaagccctatgaagagttcaaagtggatccctcctcctccagaggaaatgtcgaggatccgaaaggaggctggtacggatatcgagactgctgctgcagctcatcatggctcgagtgatgatgagactctggctcgacgttcgggtgtgactgatggtggccacgggcagaggaaggaggagaatgctggagctactcaccgcgaatag

SEQ ID NO: 97668 - protein, 580 aa, Gibberella zeae PH-1
MAPPSMTVYFDDQNPNSEKGKEAGARRSLAGLDYSPLPRITGRSFLLATFVSMGGLLFGYDTGQISGFLEMPDFLDRFAQTNSNGEKEFSTVRSGLIVALLSIGTLIGALVAAPISDRIGRKYSISGWTWVIAIGFIIQISSNRDWVQIMMGRWVAGLGVGALSLLVPMFQAETAPPWIRGAMVCCYQLFITMGIFLAACFNYGTVTHQRNNSASWRIVIGIGWVFTLILGIGILFLPDTPRFDYRKGKIDRARDTLCKVYGATPNHWAIHTQMEEIESKLRAESQIKGNPAKEFVQMFKAPRMTYRILLGMGLQMFQQLTGANYFFYYGTTIFASVSIDSYKTQIILNTINFLVTFIGLYIVEHYGRRKSLIAGSTWMFICFLIFASVGHFSLDRANPSSTQGAGVAMIVFACLFILGFATTWGPMIWTIMAEIFPSRYRAKGMALATASNWLWNFLLAFFTPFITKDIDFRYGYVFAGCNVLGGLIVYFFVIEGQGRTLEEIDTMYLERVSPMKSSKWIPPPPEEMSRIRKEAGTDIETAAAAHHGSSDDETLARRSGVTDGGHGQRKEENAGATHRE

SEQ ID NO: 97669 - DNA, 1740 bp, Gibberella zeae PH-1
  CDS (1)..(1740)
atggccattgccatgggctggcagaaacccgacaatgtcgcgggctcgtcggcgccggccatcatggtcggtctcttcgttgcctctggcgggttactgttcggctacgatactggagccataaacggtatccttgccatgacagagttcaaggaacagttcggaaaacacacaaattgcgtcgatgaaaacggcgccgtcgacatttgcacaaaagactcatccatcattgtcgctattctaagtgctggcactgcccttggtgctctactcgccgcacctaccggcgactcactaggtcgtcgcaagactctacttctggccgtcgccatcttttgcgtcggtgccatcttccaagttgctgctaataatattgacttgttgctggttggaagattctttgctggtgtaggtgtcggtctcatctctgtcctcgtcccattgtatcagtctgaaatggcgcccaaatggataagaggcactcttgtctgcgcctatcaattatcaataacctttggtctccttgccgcctctattgtcaacattctcgcctctaaacttaacaactcatctgcataccgcatcccccttggccttcaaatcgtcccagccatcattctcaccggaggtctattactgctaccagaaacacctcgctttcttgttaaaaagggcttgcatgaagccgccggcctatcacttagtcggctacgacgactcgacatcacccatccggcactcgttgatgaattgcaagagatgattgccaaccatcaatacgaactaacattaggtccggacagctacaaacaactttttatcggctcaccacatcttggtcgacgaatgtttactggatgcggactccaaatgcttcaacaacttaccggtatcaactttataatgtattacagcacatcgttctttgacggcgccggcgttgaaagcccttacaccaagtcacttatcatcaacattatcaatgttgtatcgacaataccaggtctattggtcatcgagaaatggggccgacgaagacttttgatgataggagcccttggtatggctggttgccaacttctcatggcatcattcgatactgcgacaggacaaagctatgagaaggcgtcacaaaccatcctcatcgccttttgtgccatcaacattttctttttcgctgcatcttggggtcccgtggtctgggtcgtcacttctgaaatttaccctctaaaggtccgagcaaaggccatgtccgtttcaacagcatcaaactggcttctcaactttgccattgcttactgcgccccttacttggtcggcacaggaccgggcaacgcctcctttggtccaaaaatcttctttatctggggcgccttttgcattctggccgttttctttgtgtggtgcatggtgtacgagacgagcaagatcagcctggaacagatcgacgaaatgtacgagcgtgtgaaccatgcatggaacagtaaatcattcgaaccgagctggagtttccagcagatgctcaatgatggatggtcgccaagcgctcaacctccagctgatcacgagcttcaaacgacaacaagcgcatcaagcgcagatacaactttgggtgacggcgatgcgtcttccataaccgttagccagagcaacaacaacagttcatcgcctaataacaacaatgaccagaacaaaggtccaccggccatgtcaatggccaatgttgacttcagctactag

SEQ ID NO: 97670 - protein, 579 aa, Gibberella zeae PH-1
MAIAMGWQKPDNVAGSSAPAIMVGLFVASGGLLFGYDTGAINGILAMTEFKEQFGKHTNCVDENGAVDICTKDSSIIVAILSAGTALGALLAAPTGDSLGRRKTLLLAVAIFCVGAIFQVAANNIDLLLVGRFFAGVGVGLISVLVPLYQSEMAPKWIRGTLVCAYQLSITFGLLAASIVNILASKLNNSSAYRIPLGLQIVPAIILTGGLLLLPETPRFLVKKGLHEAAGLSLSRLRRLDITHPALVDELQEMIANHQYELTLGPDSYKQLFIGSPHLGRRMFTGCGLQMLQQLTGINFIMYYSTSFFDGAGVESPYTKSLIINIINVVSTIPGLLVIEKWGRRRLLMIGALGMAGCQLLMASFDTATGQSYEKASQTILIAFCAINIFFFAASWGPVVWVVTSEIYPLKVRAKAMSVSTASNWLLNFAIAYCAPYLVGTGPGNASFGPKIFFIWGAFCILAVFFVWCMVYETSKISLEQIDEMYERVNHAWNSKSFEPSWSFQQMLNDGWSPSAQPPADHELQTTTSASSADTTLGDGDASSITVSQSNNNSSSPNNNNDQNKGPPAMSMANVDFSY

SEQ ID NO: 97671 - DNA, 1650 bp, Candida glabrata CBS 138; identical to SEQ ID NO: 97006
  CDS (1)..(1650)

SEQ ID NO: 97672 - protein, 549 aa, Candida glabrata CBS 138; identical to SEQ ID NO: 97007

SEQ ID NO: 97673 - DNA, 1707 bp, Candida glabrata CBS 138; identical to SEQ ID NO: 97008
  CDS (1)..(1707)

SEQ ID NO: 97674 - protein, 568 aa, Candida glabrata CBS 138; identical to SEQ ID NO: 97009

SEQ ID NO: 97675 - DNA, 1692 bp, Candida glabrata CBS 138; identical to SEQ ID NO: 97010
  CDS (1)..(1692)

SEQ ID NO: 97676 - protein, 563 aa, Candida glabrata CBS 138; identical to SEQ ID NO: 97011

SEQ ID NO: 97677 - DNA, 1602 bp, Candida glabrata CBS 138; identical to SEQ ID NO: 97012
  CDS (1)..(1602)

SEQ ID NO: 97678 - protein, 533 aa, Candida glabrata CBS 138; identical to SEQ ID NO: 97013

SEQ ID NO: 97679 - DNA, 1659 bp, Candida glabrata CBS 138; identical to SEQ ID NO: 97014
  CDS (1)..(1659)

SEQ ID NO: 97680 - protein, 552 aa, Candida glabrata CBS 138; identical to SEQ ID NO: 97015

SEQ ID NO: 97681 - DNA, 1650 bp, Candida glabrata CBS 138; identical to SEQ ID NO: 97016
  CDS (1)..(1650)

SEQ ID NO: 97682 - protein, 549 aa, Candida glabrata CBS 138; identical to SEQ ID NO: 97017

SEQ ID NO: 97683 - DNA, 1671 bp, Candida glabrata CBS 138; identical to SEQ ID NO: 97018
  CDS (1)..(1671)

SEQ ID NO: 97684 - protein, 556 aa, Candida glabrata CBS 138; identical to SEQ ID NO: 97019

SEQ ID NO: 97685 - DNA, 1695 bp, Candida glabrata CBS 138; identical to SEQ ID NO: 97020
  CDS (1)..(1695)

SEQ ID NO: 97686 - protein, 564 aa, Candida glabrata CBS 138; identical to SEQ ID NO: 97021

SEQ ID NO: 97687 - DNA, 1668 bp, Candida glabrata CBS 138; identical to SEQ ID NO: 97022
  CDS (1)..(1668)

SEQ ID NO: 97688 - protein, 555 aa, Candida glabrata CBS 138; identical to SEQ ID NO: 97023

SEQ ID NO: 97689 - DNA, 2289 bp, Candida glabrata CBS 138
  CDS (1)..(2289)
atggattctagcttcgaaatactcccgtaccgtggtgacgatcaaataccgagagttgatagtggcgggttgcgaagacgagcatcacagacaataaatactaatcatgatgacacttgtgttgatatagatgcctacaatagtggtatagatgtgtcaagtaagaatgagtatcttggaatcaataccgcagacgatgataatgaatatggtaacggtggaatgcaaaattatgaaggacctgtgaatgagcaagctatccattgtcaaaccaacgatatatcagaaaatgaaaataatctacagttgcttggacagccattgccacttcgttcaactatgatgaccacgtttgtgggacttttcgttgccgttggtgggtttttatatggttatgatacaggtctgataaatagtataactgatatgaaatacgttaaagaacacattgcaccaaatcactcattctttactacaacacagatatcgatgctggtgtcatttttatcattgggcacatttgtaggcgccctcattgctccatggatttcagatatttatggaagaaagtcaacaattatattcagtactatgatcatcttttcgataggtaactctctgcaagtagcagctggcgggctggcattgttaattgttgggagggtaatatctggtattggaataggtataatatctgctgtagttcccctttatcaggctgaagctgcacagaagcacatgagaggagccattattactacctaccagttggctattactttaggattactcgtttcaagcgcagtgtcacaaggcacagagtctatcaatgctccgagttcatacagagttcccataggattacagtatgtctggtctgttgttttaggtgttggaatggtttttttaccagaaagtcctcggtattatataatgaaggatgagatagaagaagcagcgagaagtttatcgttcttgagaggtatctctttagaagatccaaggctcttagaggaactagtcgaaattaaagctaactacgattatgaatcctcatttggtcctgtatcaatatgggattgtttcagatccagtgagcaacgtccaaagcaggtgctgagaatgtttactgggatatctatacaagctttccaacaattttctggtattaatttcatcttttactatggtgtttatttcttcaacaagacaggtattaaaagtagttacctggtgtcgtttgtcacttatgctgtgaatgttgcattcaacataccagggatgtttttaattgactatttagggagaagaaaagtattaatcttcggtggcattgcaatgactgcttgcaactttattattgccattgtgggtgtttctgccaaatccattgtttcaaataatgtaatgattgcatttatttgtgttttcatagcagccttctcgagtacatggggtggtgttgtatgggtaatctctgcagagctatttcccttgggtgtgagatcaaagtgcactgctatatgtgcggcagccaattggctagttaactttgtctgtgcattgatgactccttatattgtcgatacaggatcaaactacacatcttcgatgggtaccaagatatacttcatttggggaagtctgaatgcccttggaactatagttgcatatctgacagtgtatgagacgagagggttgacgcttgaagaaatcaatgagttgtacgttaactcacccacaccatttgcgtcgaacgaatggaatagaaagattcgcacagaatccacgatcccacctatggtacatgaccatgaactagataaccacattgtgccaacaatggacaacattctccatagcagaaatccaaaccagccatactcttcagatgagaaccaagatgttatagtaggggaagacaagctggacttggagcaaggctacaataaggagattcacaaccacagggatgataacaacgtatcgccaataccattcctccaggaacaaaatgggaaagaattcagcaatggtgctgatttcagcccatcgacacactcaacttttgccttgaccgagcacataccagcgaactacgtggaattggggaacggatttggattaaacacatacaggggcgggcccccatccatctccgattctagtgatgacgatcattgcacacactggcaaagcccagagaatggatcacctatataccatgaaattctgtcctctaacgacacgaatagtggcacttacaacaagaactctgaaaatttatag

SEQ ID NO: 97690 - protein, 762 aa, Candida glabrata CBS 138
MDSSFEILPYRGDDQIPRVDSGGLRRRASQTINTNHDDTCVDIDAYNSGIDVSSKNEYLGINTADDDNEYGNGGMQNYEGPVNEQAIHCQTNDISENENNLQLLGQPLPLRSTMMTTFVGLFVAVGGFLYGYDTGLINSITDMKYVKEHIAPNHSFFTTTQISMLVSFLSLGTFVGALIAPWISDIYGRKSTIIFSTMIIFSIGNSLQVAAGGLALLIVGRVISGIGIGIISAVVPLYQAEAAQKHMRGAIITTYQLAITLGLLVSSAVSQGTESINAPSSYRVPIGLQYVWSVVLGVGMVFLPESPRYYIMKDEIEEAARSLSFLRGISLEDPRLLEELVEIKANYDYESSFGPVSIWDCFRSSEQRPKQVLRMFTGISIQAFQQFSGINFIFYYGVYFFNKTGIKSSYLVSFVTYAVNVAFNIPGMFLIDYLGRRKVLIFGGIAMTACNFIIAIVGVSAKSIVSNNVMIAFICVFIAAFSSTWGGVVWVISAELFPLGVRSKCTAICAAANWLVNFVCALMTPYIVDTGSNYTSSMGTKIYFIWGSLNALGTIVAYLTVYETRGLTLEEINELYVNSPTPFASNEWNRKIRTESTIPPMVHDHELDNHIVPTMDNILHSRNPNQPYSSDENQDVIVGEDKLDLEQGYNKEIHNHRDDNNVSPIPFLQEQNGKEFSNGADFSPSTHSTFALTEHIPANYVELGNGFGLNTYRGGPPSISDSSDDDHCTHWQSPENGSPIYHEILSSNDTNSGTYNKNSENL

SEQ ID NO: 97691 - DNA, 1596 bp, Candida glabrata CBS 138
  CDS (1)..(1596)
atggagcaagtcactatcggtgttatatcattagattcatctcctacagaaaattacacgctgaacacagcagaaacaaggcaatcatttcagctctctggaaagagtgaagtaaataccataccgggagaaaaatatgaagaactaaagatgaagtacatacgccagcacactaaagcagtagtattatgttgtttaatatcatttggaggaatgatactaggctgggacatcggtaccgtgggtggtgtgtcgataatgccaagtttcaataatgcattcggtgatcaaacgacgattgtgtcctctgcaaaggaactctcaaatatgaaaagaggtctttacatttccatattcaacattggatgtgccttaggtggtattatgttttctaggttatcaaatactgtgggtcgtagagtaggaattctaaccgctatagcaaagtatactcttgtcctgacggtccagttattctcaaatggaaactttatccttcttctggcatctagatttgtattgggagtaactgttggcgcaataagtgttttggtgccgatgtttgtatcagaaagtgcgccaattaaaattcgaggagcattagtggtagtctatcaactagcaataacattgggaatactctttggaaatatactaaactacatgactaacaagcatttgtctatggtagatcccatgaacaatatggcatggaaaattccgatgctattcggttacctttgggctgccattgttgcagtgggcgcttgtattaccccggaatctgtccatttcctagccaaaattcgtaatgattatgaaagtgccaaaatatcatattcgatcatgaacaatatttcagtatttgaccatgaaactatcgattatgttaacaacttgctagtaaagcaagatgtgtataatgagaacgaccttaggaaccataaatttgagtttttatatggtaagccaaaatatggaaaacgcctacttattggcatcatggtgatggcctttcaacaactttctggtataaactacttcttctattatggaacctcattattcaaaagtgttggaatcaaagatacatacgccacggctatcatactttcatcagtcaattttattagtacttttgcaggcatctacttagtggaaagccttggaagaagatctacactaatttatggctcatttggcatgttcatatgtatgatattttatgcgtcttttggaactttaagtttgagaaaggatctattatcattcgtactgatcattgttacatgcttatttatctcgatcttcgccataactatcggcccagtatcatttgtagttgtagccgaattgttcccaacaagaactagatccgtttcaatgtctatatgctcttcctttaattggctagttaatttcgccattgctctggcaacaccagtgataatcaatagaataggcttcctttatgggtttttctttgcaggttgtcttctattagcaactggatttgaagcattctttgtaccagaaactaaaaataaaacagaagaagaaatagactatatgttccaaaacaacttgaaatcgtga

SEQ ID NO: 97692 - protein, 531 aa, Candida glabrata CBS 138
MEQVTIGVISLDSSPTENYTLNTAETRQSFQLSGKSEVNTIPGEKYEELKMKYIRQHTKAVVLCCLISFGGMILGWDIGTVGGVSIMPSFNNAFGDQTTIVSSAKELSNMKRGLYISIFNIGCALGGIMFSRLSNTVGRRVGILTAIAKYTLVLTVQLFSNGNFILLLASRFVLGVTVGAISVLVPMFVSESAPIKIRGALVVVYQLAITLGILFGNILNYMTNKHLSMVDPMNNMAWKIPMLFGYLWAAIVAVGACITPESVHFLAKIRNDYESAKISYSIMNNISVFDHETIDYVNNLLVKQDVYNENDLRNHKFEFLYGKPKYGKRLLIGIMVMAFQQLSGINYFFYYGTSLFKSVGIKDTYATAIILSSVNFISTFAGIYLVESLGRRSTLIYGSFGMFICMIFYASFGTLSLRKDLLSFVLIIVTCLFISIFAITIGPVSFVVVAELFPTRTRSVSMSICSSFNWLVNFAIALATPVIINRIGFLYGFFFAGCLLLATGFEAFFVPETKNKTEEEIDYMFQNNLKS

SEQ ID NO: 97693 - DNA, 1587 bp, Kluyveromyces lactis NRRL Y-1140
  CDS (1)..(1587)
atgtccttagatacagaatcatttgaaactgctgaaaaagcaattgaggtagtcacaaaggaaatggtatctttgacaaattactcagccattggatcattaaccagtcagttatctcagaatgacactaagtcaggtggaattgaacagaaaaagttaccgttgaaaccaatattattgtgtctggctacttcttttgcagggtttatctttggctgggatgttggcacaattggtgggattacaaacatggtatcatttcaaaacttttttggtaccaactttgattcttcgagtaatacacactactttccaaaacttcttattggattaatcgtttccattttcaatatcagttgcgcacttggtggattatttctagtgaagattgctgatattaatggaagaaaaccaggtatttatgctgcaatcactatctattcgttgggaacattgattggctggacatgtggctcctcttggtggtatttcttcttcgcaaggttcatttcaggacttggtgttggtgctactgcggtgatgataccaatgtttatagccgaatctgctcccatcaacattcgtggtgccatggttgtgctctaccagttaatgatcactcttggaattttgctcggaaatgtcatcaactattgttgcagatccactttacacgaaacagataatgccacatggaagatccctgtaggattaggaaacgtctgggccgctatcgtcgcgctaggtgttcattttatgcctgaatcaccagtttttcttaccaagaggttaggaagcgctctcaaagctaaggcagcttttgcccatatgaacaatttggacgtagatgatccaattgtggatagtcatattaggaagatgatggaatcagctgacgcggaggtatctactcacaatgatatgaagaacagcaggtttgaattcatactcggtcaaccaagattaggttttagactatttattggtattatggtgatggcgtttcaacagctatccggtgcaaattacttcttctattatggtacaacacttttcaactctgtgggaattgaagacccatacttaacgtcgattttattgtcttctgtcaacttcatatctacctttttcggtatttatttagttgaaaagttaggcagaaaagcatgcttaattcttggttccgcgggtatgtttacctgtatgtccgtgtatgcgtcagtcggatcgttcgcacttaataagtcgcctcaaaactctggtgcgattatggttaccttcacgtgtgtttacatcatgttctttgcatgcacatcgggacctgtgtcctttgtcgtcatttcggagttgtttccaagcaggacaaaagcgatatccatggcagtgtgtacctcaatcaattggctttgcaacttcttcatttctttatgcacaccatatgtcactgataagataggcttcaagtttgggttcgtttttgctggttgtctatttgtctcattctggttcttcactttcttattgaaggaaactaagaacaaaactcctgaacaggttgacgcattgtattctattgacaagcaatag

SEQ ID NO: 97694 - protein, 528 aa, Kluyveromyces lactis NRRL Y-1140
MSLDTESFETAEKAIEVVTKEMVSLTNYSAIGSLTSQLSQNDTKSGGIEQKKLPLKPILLCLATSFAGFIFGWDVGTIGGITNMVSFQNFFGTNFDSSSNTHYFPKLLIGLIVSIFNISCALGGLFLVKIADINGRKPGIYAAITIYSLGTLIGWTCGSSWWYFFFARFISGLGVGATAVMIPMFIAESAPINIRGAMVVLYQLMITLGILLGNVINYCCRSTLHETDNATWKIPVGLGNVWAAIVALGVHFMPESPVFLTKRLGSALKAKAAFAHMNNLDVDDPIVDSHIRKMMESADAEVSTHNDMKNSRFEFILGQPRLGFRLFIGIMVMAFQQLSGANYFFYYGTTLFNSVGIEDPYLTSILLSSVNFISTFFGIYLVEKLGRKACLILGSAGMFTCMSVYASVGSFALNKSPQNSGAIMVTFTCVYIMFFACTSGPVSFVVISELFPSRTKAISMAVCTSINWLCNFFISLCTPYVTDKIGFKFGFVFAGCLFVSFWFFTFLLKETKNKTPEQVDALYSIDKQ

SEQ ID NO: 97695 - DNA, 1659 bp, Debaryomyces hansenii CBS767
  CDS (1)..(1659)
atgtcgacagtttcaccggaaaaatctatatcgtctaagatacaacctcttgactcaaaaaatgagaagcactatgttcaagatcacatcatccaaattgaagactccaaaacctatacgtatttgggtttcaaaggtcagacattgcataacatgatttcatttctcgctggtatggggttcttacttttcggttacgaccagggtgtcatgggctcgttgttgactttgccagcttttaggaacacatttgaatctatagacacaattaaatacccagagcacgccactttccagggttttgttattgccgtttatgaaattggttgtttagcgggtgccgtttccactatgtacttgggtgatatgcttggaagaagaaaaactattctcattggatgttgtattatgattgttggtgctgtcatccagtgttcctcgttctccgttggtcagttaattgccggaagaattatcaccggtattggtaacggtatgaacacttccaccgttccaatatggcaatctgagtgtgctaagtcagaaaagagaggtaaattagttatgattcaaggtgccttaatcactggtggaatttgtatttcctactggatcgattttggcttcttcttcatcaaaaatagttctgtatcatggagattcccaattgggttccaaatatttttcccactattcatcttgcccctcatcatgtacttacctgaatctcctagatggttactaaaagccggtaaattggatgaagctgctaaagttttctctgctcttgatgacatcccagttaatgatcctactattgtctacgaagttcgagaaattgaaaactctttacaaaaggaaagacatgaaggtgaacaaaaatccaaccttcttcttttatttgctcagggtgataccaagaatttccacagaacttgcttggccgtctggtcgcaaattatgcaacaaattactggtattaatttaatcacctactatgcgggtactgtattcgaaaaatatattggtttaaatcctttgaacgcgagaatcctagccgcctgtaacggtactgaatatttcatggtttcttgggttgcattctacacgattgaaagagttggcagaagaaaattgatgttatttggggctgctggtcaagctatgtctatggctgtcttgaccggtgccacctgggctgctagtccagaacacaatgacagtggtgctgcagctattgttgctgctgtcttcttattcgttttcaacagtttcttcgctatcggttggttaggaatgacctggttatacccagctgaaattaccccattaaacatcagagctgcttctaatgggttaagtacagctgcaaattggtctttcaattttatggtagttatgatcaccccagttgctttcgaaagtattgattcctacacttatactattttcgcagtaatcaatctcttaatgattccagtcgtttatttcttctatccagaaacagctggtaggtcgttagaggaaatggataacgtcttcgaactatccaatccttacactccttgggatgttgtaaaaatcgctagagagctaccttacgagagccaaactcgtgatcgtgatattgaaaaggttaatattcagcatatcggatga

SEQ ID NO: 97696 - protein, 552 aa, Debaryomyces hansenii CBS767
MSTVSPEKSISSKIQPLDSKNEKHYVQDHIIQIEDSKTYTYLGFKGQTLHNMISFLAGMGFLLFGYDQGVMGSLLTLPAFRNTFESIDTIKYPEHATFQGFVIAVYEIGCLAGAVSTMYLGDMLGRRKTILIGCCIMIVGAVIQCSSFSVGQLIAGRIITGIGNGMNTSTVPIWQSECAKSEKRGKLVMIQGALITGGICISYWIDFGFFFIKNSSVSWRFPIGFQIFFPLFILPLIMYLPESPRWLLKAGKLDEAAKVFSALDDIPVNDPTIVYEVREIENSLQKERHEGEQKSNLLLLFAQGDTKNFHRTCLAVWSQIMQQITGINLITYYAGTVFEKYIGLNPLNARILAACNGTEYFMVSWVAFYTIERVGRRKLMLFGAAGQAMSMAVLTGATWAASPEHNDSGAAAIVAAVFLFVFNSFFAIGWLGMTWLYPAEITPLNIRAASNGLSTAANWSFNFMVVMITPVAFESIDSYTYTIFAVINLLMIPVVYFFYPETAGRSLEEMDNVFELSNPYTPWDVVKIARELPYESQTRDRDIEKVNIQHIG

SEQ ID NO: 97697 - DNA, 1731 bp, Debaryomyces hansenii CBS767
  CDS (1)..(1731)
atgaccaatacagaaccaaatacggagagcctgacagtagaagcaggtgtaaatgataatgtgagcacatctaatagtactactaattatggaactgaacctcaaggaacacatgagaagttagaaaattatggtgatattgaaaagcatgaaataccagataatgaagggcaaattccaaccgcagatgagattttaaataagttaccggtcatgccagaaaggtcaactaaggatcaactttcatctatagttctttgttttttcattgcttttggtggatttatttttgggttcgatacaggtaccatttctggattcaccaacatgcctgactatatagataggtttggtttacaagatgctaatggtgattctaagacttataagattggtttgatcgttgccatttttaatgttggttgtgcatttgggtgtattttcttatctaagattgcagatgtttatggacgtcgaattggattgatgtttgcaatgattgtatatatcgtgggcatcattattcagatttcagcacagtcttcttggattcagattgtttttggtcgtttgattgcaggatttgctgtgggtaccgtttctgtgttgtcgccgttgtttattagtgagacttcaccaaaagcatatagaggtacgttagtttgttgtttccaactttgcgtcacttttggtatttttattgggtactgtattaattatggtacatatcataactttaatgactctcgccagtggagaatttctctaggtttgtcttttgcgtgggctatatttttattcatcggtatggtcttcctgcctgaatcgccacgttacttgattgaaaaaggtaagattgaagaagcaaagaaatctatctctttctcgaatggtgtttcaccagaagagccaggcgtgtatactgaaatccaattaattcaaagtggtattgacagagaaaaacttgcggggaatgcatcatggggtcagttggttgttggtaagccaaggatacttatgcgtgttataactggtgttatgttgcaatcattgcaacagttaactgggaataactattttttctactatggtacatacatttttgatgctgtgggattgagtgattcattccagacatctattgtgttgggtgttgtgaactttgcatctacttttgttggtatctatgcaattgagaaactaggaagaagattatgtttattaagcggaggtgttgcgatggctatttgttttttgatctactcagtcttgggcactgtaggtgatgtgcatataaagccccaaggtaatgctcaaatttttattacaactcttttcattttcttcttcgcctcaacttgggcgggcggtgtctattcaattgtttccgaaatatatcctttgagaattaggtctaaagccatggccgttgcaacagccggtaactggacttggggattcttgatttccttctttaccactgcaattacaaatgagatccaatttgcatatggttttgttttcttcggttgtatttgcttcggtactgtgttcacatatttctttgtttatgaaactaaaggattgtcattggaagaagttgatcaattatatgcatcggggatacccgcatggaaatcaagttcatggaaggttccttcacaagaagacatggctttctctgcgggatacgctgcaaaagataagcctgaagataaaagacaggagtaa

SEQ ID NO: 97698 - protein, 576 aa, Debaryomyces hansenii CBS767
MTNTEPNTESLTVEAGVNDNVSTSNSTTNYGTEPQGTHEKLENYGDIEKHEIPDNEGQIPTADEILNKLPVMPERSTKDQLSSIVLCFFIAFGGFIFGFDTGTISGFTNMPDYIDRFGLQDANGDSKTYKIGLIVAIFNVGCAFGCIFLSKIADVYGRRIGLMFAMIVYIVGIIIQISAQSSWIQIVFGRLIAGFAVGTVSVLSPLFISETSPKAYRGTLVCCFQLCVTFGIFIGYCINYGTYHNFNDSRQWRISLGLSFAWAIFLFIGMVFLPESPRYLIEKGKIEEAKKSISFSNGVSPEEPGVYTEIQLIQSGIDREKLAGNASWGQLVVGKPRILMRVITGVMLQSLQQLTGNNYFFYYGTYIFDAVGLSDSFQTSIVLGVVNFASTFVGIYAIEKLGRRLCLLSGGVAMAICFLIYSVLGTVGDVHIKPQGNAQIFITTLFIFFFASTWAGGVYSIVSEIYPLRIRSKAMAVATAGNWTWGFLISFFTTAITNEIQFAYGFVFFGCICFGTVFTYFFVYETKGLSLEEVDQLYASGIPAWKSSSWKVPSQEDMAFSAGYAAKDKPEDKRQE

SEQ ID NO: 97699 - DNA, 1665 bp, Debaryomyces hansenii CBS767; identical to SEQ ID NO: 97024
  CDS (1)..(1665)

SEQ ID NO: 97700 - protein, 554 aa, Debaryomyces hansenii CBS767; identical to SEQ ID NO: 97025

SEQ ID NO: 97701 - DNA, 1671 bp, Debaryomyces hansenii CBS767
  CDS (1)..(1671)
atgagtaattctactaaaaaggatgactgtcatgacgtgacaatagatagcactatatcagatattgaaatagaaaggtcaggctctacaaataatgttatgattgaaccaagtcccaaaagttcttcagaattgttgagctcagaatcagttatttctgattcggacgcaagaccatccaaattgattattttaatcacgttaacatcatctataagtgggtttatgtttgggtatgacaccggttacatatcgtctgcgttggtgaatattggcactgatttgagcaataaattattgtctaacggagagaaagaatttattacgtctgctacttctttgggtgcgttgatcggggctatcattggaggcatattagccaacttgattggaagaaaaatggtgttgttaggatcaaacgttatttttgttataggaactataattcaattagctgcacatactgtttggacgatgattgttggtagatttgttttgggactcggagtgggcattgcgtctttgatttcgcctttgatgttgagtgaattggcaccgtcaaaatataggggccgtttgattgttaccaactgtatgtttataactggaggtcaattggttgcctattttataaactggggattaactggtgtgaataatgggtggagagtatctgttggattatgtatggtaccccctataattcaatttgtgttgttttgtttcttacccgataccccaaggttttatattatggtaggtagagttgaagaagctagaaaagttttgagcaaaactcaccacaatccttccaatgctttcgttaatgcaactattcaagatatgatcgcctccaattcgactgttccaggaaataatccattagttcaagcgtggaactcaattaaaatcattcacacaaatccagcaaattttagggcattaatcttagcttgtggcttacaaggtatacagcaatttacggggtttaattctttaatgtatttcagtgcaacaattttcgaaactattgggttcgataatgcaactgcagtatctattattattgccgctacgaactttgtgtttacagggattgcattatgcattattgataagataggacgtagacgtatcctattaggtgcaattccatgcatgtgtatatcattagttctttgtgctattgccttccactttttaggtgtgaagtttacatcagattctgatgtcattgttgaagcgagaggcattactggctgggggattgttattattctcggtatggtgtggtttgtggcttcttacgctattggtataggtaacagtgcttggactggtgttgaattattctcagatgtaaatgttagagctgtcggctgtatgtatgctgctgctactaattgggctggttccttagttattgcatccactttcttgaccatgttggagaatattacacctcctggcacttttgcatttttcgcaggtttatgttttgttgcattcttttttgtttttttcttattgccagaagtttcaggcttggaactagaagaaactacagaatttttagcaaatggattcaatgttaaggcatctcgtcaaatttctaaggatagaaagaaagtgtcaaaattcgttactcaaaatgacgatcacagtgcataa

SEQ ID NO: 97702 - protein, 556 aa, Debaryomyces hansenii CBS767
MSNSTKKDDCHDVTIDSTISDIEIERSGSTNNVMIEPSPKSSSELLSSESVISDSDARPSKLIILITLTSSISGFMFGYDTGYISSALVNIGTDLSNKLLSNGEKEFITSATSLGALIGAIIGGILANLIGRKMVLLGSNVIFVIGTIIQLAAHTVWTMIVGRFVLGLGVGIASLISPLMLSELAPSKYRGRLIVTNCMFITGGQLVAYFINWGLTGVNNGWRVSVGLCMVPPIIQFVLFCFLPDTPRFYIMVGRVEEARKVLSKTHHNPSNAFVNATIQDMIASNSTVPGNNPLVQAWNSIKIIHTNPANFRALILACGLQGIQQFTGFNSLMYFSATIFETIGFDNATAVSIIIAATNFVFTGIALCIIDKIGRRRILLGAIPCMCISLVLCAIAFHFLGVKFTSDSDVIVEARGITGWGIVIILGMVWFVASYAIGIGNSAWTGVELFSDVNVRAVGCMYAAATNWAGSLVIASTFLTMLENITPPGTFAFFAGLCFVAFFFVFFLLPEVSGLELEETTEFLANGFNVKASRQISKDRKKVSKFVTQNDDHSA

SEQ ID NO: 97703 - DNA, 1674 bp, Debaryomyces hansenii CBS767
  CDS (1)..(1674)
atgactactgctgttggattagaagataattccaaagggaatattattactgttatgagtaaagatccgttagtgttttgcataattgcgtttgcatctattgggggtttactctttgggtacgatcagggagttattagtggtatagttactatggagtcatttgcggcaaaattccccagaattttttccgatcctgattataagggttggtttgtttctacatttttgttgtgtgcttggtttggttcgttgataaactctcctgttgttgatcgatttggaagaagggatactataagaatagcttgcgttgtatttgttatcggatctgtctttcaatgtgcaggtacgtcggttagtatgcttttcgctgggagagcagttgctggtatcggtgtcggacaattgactatggtagtcccaatttatatgtcggaattagctccaccttcagtaagaggtggtttagttgtaatacagcaattttcaataacaataggtattttgatatcattttggataaattatggcactcaatttattggaggaactaaatgtgctcctgaccaagattacaaaggcgatactttcgacccatacattgatgttcctcaaggtggttgttacggtcaaaaagatgcttcctggagaattccatttgggttacaaattgcaccagctttcattttaggtattggtatgtctttttttccaagatcgccaagatggctcttatcaagaaaaagagaagaggaggcatgggaggctttgaattatttgaggagaagaaataatcctgatatgattgatgctgaattcaatgaaattaaatcggacgtattatttgaacaaaaatataacgagaggaaatttcaaggaaaaacaggaatgtctttctttataacatcgtattgggatctagtctctaccaaatcaaattttaagagagtttttataggctctgcggttatgttcttccaacaatttattggttgtaatgcaattatttattacgcaccaacaatatttagtcaattaggaatggattccaacaccacagcattgttaggaacaggggtctatgggattgttaattgcctttcaactattcctgctatctttgcgattgacagatttggtagaaaaactttattgatggctggggcagctggaacttttgtttcgttggttatagtaggtgcaattgtcggcacatatggtgatactttatctaagcataaaactgctggtagagcggcaatagcttttatttttatatatgatttcaacttttcatatagctgggcacctattggatgggttttaccatccgaaatcttctctattggaatcagatcaaaagctatatccattactacttcatcaacatggatgaataatttcataattggtttggtcaccccccgtatgttggagacaatgaaatggggaacatatatcttttttgcagcatttgctataattgcatttgctttcacttggtttgttatcccagaaactaaaggagtacctttagaagaaatggatttagtttttggtgatttagatgcgttgcaagaaaagcaaaacttctctcgcatgaatgaattatcaaaaatggattcaattaaagctacaacagatatttcggaagcacattattctgattaa

SEQ ID NO: 97704 - protein, 557 aa, Debaryomyces hansenii CBS767
MTTAVGLEDNSKGNIITVMSKDPLVFCIIAFASIGGLLFGYDQGVISGIVTMESFAAKFPRIFSDPDYKGWFVSTFLLCAWFGSLINSPVVDRFGRRDTIRIACVVFVIGSVFQCAGTSVSMLFAGRAVAGIGVGQLTMVVPIYMSELAPPSVRGGLVVIQQFSITIGILISFWINYGTQFIGGTKCAPDQDYKGDTFDPYIDVPQGGCYGQKDASWRIPFGLQIAPAFILGIGMSFFPRSPRWLLSRKREEEAWEALNYLRRRNNPDMIDAEFNEIKSDVLFEQKYNERKFQGKTGMSFFITSYWDLVSTKSNFKRVFIGSAVMFFQQFIGCNAIIYYAPTIFSQLGMDSNTTALLGTGVYGIVNCLSTIPAIFAIDRFGRKTLLMAGAAGTFVSLVIVGAIVGTYGDTLSKHKTAGRAAIAFIFIYDFNFSYSWAPIGWVLPSEIFSIGIRSKAISITTSSTWMNNFIIGLVTPRMLETMKWGTYIFFAAFAIIAFAFTWFVIPETKGVPLEEMDLVFGDLDALQEKQNFSRMNELSKMDSIKATTDISEAHYSD

SEQ ID NO: 97705 - DNA, 1584 bp, Debaryomyces hansenii CBS767
  CDS (1)..(1584)
atgggtttagaagataatgcgcttattagaaagtatgtcaatgtcggggaaaaaagggctgggtcagcatctatggggattttcgtaggtgccttcgcagctttcgggggtgttttgttcgggtatgatactggaaccatttcaggtatcatggccatgaactatgtcaaaggagaatttcctgccaataaggagagttttacgtcaaaagaaagttcgttgattgtttccatcttatcagcaggtactttcttcggtgcgttgttagcaccgtttatgtctgatactttaggtagaagatggtcattaattatttcaacattcattgttttcaacttgggagtgattttacaaactgtttcaactggtattccattactatgtgctggaagagctattgctggttttggtgttggtcttatatctgctgtcattccattatatcaatcagaagccactccaaaatggattagaggggctgttgtatcttgttatcaatgggccattactattggcttattgttagcggcttgtgttaaccaaggtactcataatagaaatgactcgggttcatacagaattccaattgctgttcaacttttatggtcgttaattttgggtactggtatgatcttcttgcctgacacgccacgtttctggatccacaaaggtaatgaatctgaagctaagaaatcgttgaagattttaagaaaattaccacttgaccacccagacttaattgaagaatacgaagacatcaaagctgcttacgatttcgagtgttctttcggaaaatcgtcttggatggatctttttaccacaaggaataggcaattgaagagattatttaccggtgttgctcttcaagcatttcaacaattaactggtgttaactttatcttctattttggtacctctttcttcaagagtgctggtattgaaaacgaatttcttatttctttagccaccagtattgttaacgtaggtatgactgttccaggtatctttttaattgaattagtgggtcgtcgttctatgttgttgtggggtgctgttggtatgtcggtttctcaatttatcgttgctattgttggtattgccactgatagtgccgacgctaacaaagtcttgatcgcattcacttgtttcttcattgcattctttgcttctacctggggtccaattgcttgggttgttgttggtgagattttcccattaagaactagagctaagtccgttgcattatctgccgcttccaactggctttggaactgggctatcgcatacgctactccatacttggtagaagatggtaagggtaatgctaacttaggaacaaacgttttcttcatctggggtggatgtaactttctttgtattttgttcacttacgtcttcatttacgaaaccaagggttactctttggaacaaattgatgaattatatgaaaaagttccacatgcttggaaatctcgtggcttcattccttctgcccatgctttcagagaagatgctccagagtcaatcagctctatgggaaaggatatggaaaaagttactgaaattgaaaccacttcagtctaa

SEQ ID NO: 97706 - protein, 527 aa, Debaryomyces hansenii CBS767
MGLEDNALIRKYVNVGEKRAGSASMGIFVGAFAAFGGVLFGYDTGTISGIMAMNYVKGEFPANKESFTSKESSLIVSILSAGTFFGALLAPFMSDTLGRRWSLIISTFIVFNLGVILQTVSTGIPLLCAGRAIAGFGVGLISAVIPLYQSEATPKWIRGAVVSCYQWAITIGLLLAACVNQGTHNRNDSGSYRIPIAVQLLWSLILGTGMIFLPDTPRFWIHKGNESEAKKSLKILRKLPLDHPDLIEEYEDIKAAYDFECSFGKSSWMDLFTTRNRQLKRLFTGVALQAFQQLTGVNFIFYFGTSFFKSAGIENEFLISLATSIVNVGMTVPGIFLIELVGRRSMLLWGAVGMSVSQFIVAIVGIATDSADANKVLIAFTCFFIAFFASTWGPIAWVVVGEIFPLRTRAKSVALSAASNWLWNWAIAYATPYLVEDGKGNANLGTNVFFIWGGCNFLCILFTYVFIYETKGYSLEQIDELYEKVPHAWKSRGFIPSAHAFREDAPESISSMGKDMEKVTEIETTSV

SEQ ID NO: 97707 - DNA, 1737 bp, Debaryomyces hansenii CBS767; identical to SEQ ID NO: 97026
  CDS (1)..(1737)

SEQ ID NO: 97708 - protein, 578 aa, Debaryomyces hansenii CBS767; identical to SEQ ID NO: 97027

SEQ ID NO: 97709 - DNA, 1638 bp, Debaryomyces hansenii CBS767
  CDS (1)..(1638)
atgggatatgaagaaaagttggtcgcaccagctctaaaactaagattattcttagataaacttccaaacatttataatatttatgtcattgctactatttcgtgtatttcggggttgatgttcggtatcgacatttcatcgatgtcggcgttccttagtaatgacgcttaccttaaatattttggtacccctgaacctgatatgcaaggattcattactgctgctatgtctcttgggtcattctttgggtctcttgcatcggcattttgttcagagccatttggtagaagagcttcattgttgctttgtggattcttttggtctgttggggctgcaattcaatcttcatcacagaatgtcgcccagttaattattggtcgttttatttctggttttggaattggtttcggctcatctgtggcacccgtgtatggatcagagttggcacctagaaaaattagagggttaattggtggtcttttccaactttcagttaccttaggtattttgattatgttctatatctgttacgggttaggtaaaatccaagccgtcggctcattcagaactgcgtggggtttgcaaattatcccaggattgatcttaatacttggatgtttctttattccagaatcacctagatggttagccaaacagaactactgggaagaggcggaggacattgtcgctagagtccaagctaaaggtaacagagaagaccctgaagtattaattgaaatggctgaaattagagaccagattctgacgttagacaaagttaagtcttttacttatattgatttattcaaaaagaagtatcttcttagaactgtaacggcaatatttgctcaaatttggcaacaattaacaggtatgaacaccttaatgtattatattgtctatgttttcgaaatggctggttatcatggtgatgcaaatttggttgcctcttcaattcaatattgtatcaattttgccatgactattcctgcattgtacttaatggataaggtcggtaggagaccagtgttgttaactggagctgcgctcatgatggcctggcaatttgctatagggggcttgcttgccacttatgctgaacccaccgatatttttgggggtaataataccgttaaaatcagtatcccagaagatgaatctcctgccgccaaggctgttattgcatgttgttacttattcgttgtttcatttgcgtctacttggggtgttggtatctgggtttactgtgctgaagtctggggtgatagtgcctcaagacaaagaggtgcgtgtgttgcaactgctggtaattggatttttaatttcgcaattgcaatgttcactccgcacgctttcagtactattacttggaaaacatacatgatttttgctactttctgtgcatgtatgtttcttcatgttttcttctttttccctgaaactaagggtaaaagattggaagaaattggtcaaatgtgggacgagcatgttccagcttggaagtctgcttcgtggcaaccacacgtaccactcgtttcagataatgaaatacacgggaagatggattctgcgcatgatgaacattcatctcgttcggagtctactggagaaaaggtggtcgcagatcacattgcttga

SEQ ID NO: 97710 - protein, 545 aa, Debaryomyces hansenii CBS767
MGYEEKLVAPALKLRLFLDKLPNIYNIYVIATISCISGLMFGIDISSMSAFLSNDAYLKYFGTPEPDMQGFITAAMSLGSFFGSLASAFCSEPFGRRASLLLCGFFWSVGAAIQSSSQNVAQLIIGRFISGFGIGFGSSVAPVYGSELAPRKIRGLIGGLFQLSVTLGILIMFYICYGLGKIQAVGSFRTAWGLQIIPGLILILGCFFIPESPRWLAKQNYWEEAEDIVARVQAKGNREDPEVLIEMAEIRDQILTLDKVKSFTYIDLFKKKYLLRTVTAIFAQIWQQLTGMNTLMYYIVYVFEMAGYHGDANLVASSIQYCINFAMTIPALYLMDKVGRRPVLLTGAALMMAWQFAIGGLLATYAEPTDIFGGNNTVKISIPEDESPAAKAVIACCYLFVVSFASTWGVGIWVYCAEVWGDSASRQRGACVATAGNWIFNFAIAMFTPHAFSTITWKTYMIFATFCACMFLHVFFFFPETKGKRLEEIGQMWDEHVPAWKSASWQPHVPLVSDNEIHGKMDSAHDEHSSRSESTGEKVVADHIA

SEQ ID NO: 97711 - DNA, 1689 bp, Debaryomyces hansenii CBS767
  CDS (1)..(1689)
atggttttgaagatttgggatagaactaatacgtttggtctcaggggcagatcccttagattggccattacagttaccgctgtgacaggtttctccttgttcggttatgatcaaggtttaatgtctggtattattactggtgatgattttagtaaggagtttcctgctgtaacaaatgagggtgctggctcggaacattgggctactgttaaccaaggtggggttgtttcatgttatgaaatcgggtgtttcttcggtgcattatttgctttatttagaggtgatagattcggaagaagacccatggtgattataggatcattacttattattcttggtacaattatttccactgcatcatttggcgctcattggggattgggtcaatttattattggtagagttatcactggattaggtaacggtatggatactgcaacgattccggtttggcaatctgaagtttctagagcggaaaatagaggtttcttagttaacttagaaggatcagttgttgcattcggtacatttattgcctattggttagattttggtttatcatacgttgagggtgaacatgcatctgttcaatggagatttcccgttgcgttccaaatatttttcgctgcagttttatttgtaggtattatcaatttacctgagtcaccaagatggttaattgctcatggctataaagatgaagcgaattatgtattagcatctttaaatgatgttgaaattgatgacgatttggttattgctgaaagtactgttataactgatggtgtcaacagatttgcaagatctcaagttggattcaaagagttattttctggtggtaagctgcagcatttttcaagaatggttattggtgcatctactcaattctttcaacaatttactggatgtaatgcttctatctactattcgactgttttatttgaacgtttgggaatggctgacacttatgaaaagttacctttggttatgggaggtgtattttctacagtttatgcattaatgactattccatcattctttttgattgataggttgggtagaagagctttatttttgatcggtgctgccggccaaggtttggcattcactatcgcatttgtgagtttgattccagaggatggtgatagtgacggtggtaaaaaagctgctgctgtgggtattttcttgtttattgccttctttgctttcaccattttgccattgccatgggtttacccaccagaaatcaatcctttgagaaccagaaccgttgcttctgccatttctacttgtaccaattggttaacaaattttgctgtcgttatgttcacgccacttttcatggcagaaagtcagtttggttgttatttgttctttgcgcttttcaattaccttttcattccaattattttctttttctatcctgaaacagctggtcgtactttggaagaaattgatatcatttttgcaaaggcatatgttgataagagacaaccatggagagttgccgctactttacctcatttaagcttgcaagaacaagaagacgaaggaaacaaattgggtatctttgatgagttcgataaggaaggatttgaacaaagtgaaaacatttcctctaattcatctaacaaatcacctgaagatggttcaaatgatgaacctttagttaagcctgctgaagtttaa

SEQ ID NO: 97712 - protein, 562 aa, Debaryomyces hansenii CBS767
MVLKIWDRTNTFGLRGRSLRLAITVTAVTGFSLFGYDQGLMSGIITGDDFSKEFPAVTNEGAGSEHWATVNQGGVVSCYEIGCFFGALFALFRGDRFGRRPMVIIGSLLIILGTIISTASFGAHWGLGQFIIGRVITGLGNGMDTATIPVWQSEVSRAENRGFLVNLEGSVVAFGTFIAYWLDFGLSYVEGEHASVQWRFPVAFQIFFAAVLFVGIINLPESPRWLIAHGYKDEANYVLASLNDVEIDDDLVIAESTVITDGVNRFARSQVGFKELFSGGKLQHFSRMVIGASTQFFQQFTGCNASIYYSTVLFERLGMADTYEKLPLVMGGVFSTVYALMTIPSFFLIDRLGRRALFLIGAAGQGLAFTIAFVSLIPEDGDSDGGKKAAAVGIFLFIAFFAFTILPLPWVYPPEINPLRTRTVASAISTCTNWLTNFAVVMFTPLFMAESQFGCYLFFALFNYLFIPIIFFFYPETAGRTLEEIDIIFAKAYVDKRQPWRVAATLPHLSLQEQEDEGNKLGIFDEFDKEGFEQSENISSNSSNKSPEDGSNDEPLVKPAEV

SEQ ID NO: 97713 - DNA, 1764 bp, Debaryomyces hansenii CBS767
  CDS (1)..(1764)
atgaacgatattaatttggaaagttgtacgcaaaagcctaacatgaaccataagctaattaataagttaaagagaagagtgtctagtgcaggagactcgatgtccatcaagtcagctagagaacaggcagatcatgttcctattccagatgcaatctacaactataagttggttattgttgcagtcacagcagcagctgctgctgtgattattgggtacgatgctggtttcattgggggaactgtgtcgttggaaagttttaagcaagagtttggcatggacaaaatgtcgagtgaccaagccacgcttattgaagcaaatgttgtgtctgtttttcaggctggtgcattctggggagcattaatgatgtacccagtgggggaaatttttggtagaaaggtaggtttaattatttctgggttcttattgacgttcggtgcggctatttctttaatttcgaacaaagacactggtttaggggctatttatgccggtagagtgttgactggtgttggtatcggtggatgttccggacttgcgccaatttatgtgtcagaaatcagtcctgctgctgtcagaggtaagttagttgggtgctgggagttatcatggcaaattggaggtattattgggtattggattaactatggtgtgctacaaaatattccaacctcgaagaaacagtggctcattccctttgctatccaattaattccatctgggttattctggattggtgcttgtattatccctgaatcgcctagatttttagtctcgaagggtaaaatggaaaaggctagaaagaacttggcatatttaagaaatatccctgaagatcatgaatattctcaccacgaaatcgatgttttcactaaggatatccaagaaagaagagctaagattggtgatggtttctttgccccaattttagctattgtcaaaagtaagaagttgctcatcagattacttatgtctacttctttattcccaatgcaaaatggttctggtattaatgccatcacttattattctcctaccgttttcaagtctttaggtgttagtggttctgatgcgggattgttatccacgggtatttttggtattattaaggcatttgcttcagttgtttggatcttcttcattgttgatttaatgggtcgtcgttcttcattaatttggttctcagtaccatgttcactctgcatgtggtatattggagcatacgtttatgttgcagacccagccgcaagattagcaactggtgatactcaaatggatgctggtggtaaggcagctcaaggattattatatatttggacctttttttacggggcctcgtggaacggtactccatgggttattaattctgaaattttttcccaagacgttagaacattcactcaagctattaatgctgcatctaactggttttgggccttcattatgggtagatttactggacaagcattcgaggccacttcgtacggtttgtacttcgtatttgctgcatgtatgattgtattcccattatttattttcttcttttaccctgaaactaagggtgttccattagaagctatcgaccacttgttcgaagtaccagcttggagagcaagagaatatgctatggaaaaatacgatgctgaattcgaaggtggtgaatttcaggaggacgatttcgcttcatacccatcatcacacgaagaaaaggtaggtgctgctactaatgttacagtaaatactgatccttctgataatagataa

SEQ ID NO: 97714 - protein, 587 aa, Debaryomyces hansenii CBS767
MNDINLESCTQKPNMNHKLINKLKRRVSSAGDSMSIKSAREQADHVPIPDAIYNYKLVIVAVTAAAAAVIIGYDAGFIGGTVSLESFKQEFGMDKMSSDQATLIEANVVSVFQAGAFWGALMMYPVGEIFGRKVGLIISGFLLTFGAAISLISNKDTGLGAIYAGRVLTGVGIGGCSGLAPIYVSEISPAAVRGKLVGCWELSWQIGGIIGYWINYGVLQNIPTSKKQWLIPFAIQLIPSGLFWIGACIIPESPRFLVSKGKMEKARKNLAYLRNIPEDHEYSHHEIDVFTKDIQERRAKIGDGFFAPILAIVKSKKLLIRLLMSTSLFPMQNGSGINAITYYSPTVFKSLGVSGSDAGLLSTGIFGIIKAFASVVWIFFIVDLMGRRSSLIWFSVPCSLCMWYIGAYVYVADPAARLATGDTQMDAGGKAAQGLLYIWTFFYGASWNGTPWVINSEIFSQDVRTFTQAINAASNWFWAFIMGRFTGQAFEATSYGLYFVFAACMIVFPLFIFFFYPETKGVPLEAIDHLFEVPAWRAREYAMEKYDAEFEGGEFQEDDFASYPSSHEEKVGAATNVTVNTDPSDNR

SEQ ID NO: 97715 - DNA, 1638 bp, Yarrowia lipolytica CLIB122
  CDS (1)..(1638)
atgattggaaacgctcaaattaaccaggtgggagccttacagcaccggttccccaaactccacaatccttacttaactgcggccgtggccaccatgggtggcctgcttttcggctttgatatctcgtctgtttctgcctttgtcgacaccaaaccctacaaggagtactttgggtaccccacctccatccagcagggcggtatcactgcctcaatggccggtggatccttcctgtcgtctctggtggccggctggatttccgaccgacttggtcgacgtttcgccatccactttgcttccttttggtgggtggttggagctgccatccagtcctcagcccaaaacaagggccaattgatcgccggtcgactcatttccggccttggtatcggtctgggctcctcggttatccccgtctacatctccgagctgtctcccaagaagattcgaggtcggcttgtcggtctcttccaatgggccgttacctggggtatcctcatcatgttctacatttccttcggtctcagtaacatccacggagtcgccggattcagagtcgcctggggtctgcagatcatccccggtctgctcatgtctctcggttgtttgttcctggaagagtctccgcgatggctagccaagcaggacaactgggacgagtccgtgcgagtgcttcgagccatccaccagggaggctacggcaccgaagaagacattttgttagagattgaagagatccgagaagcagtccgaatcgagcatgagaccaaaaacctgcgattctggcacctgttccaaaaggactctatcaaccgaacaatggtgggtatctgggcccagatctggcagcagctcaccggcatgaacgtcatgatgtattacattgtgctgattttcaccatggctggatacactggaaacgccaatctggtggcctcgtctatccagtacgtcatcaacatgatcatgaccatccccgctcttctgttcattgaccgagtgggacgacgacccctgctgctgttcggatcaatcgtcatgatgatctggctgtttgccgtcgctggtatccttgcagtgtacggaactcagatccccggtggactcgacggagacgcattcacaaccattgtcattgagcccactcacaagcctgcccaaaagggagtcattgcgtgctcgtacctgtttgtggccacctttgcgcctacctggggccccggtatctggctgtactgctccgagctgttccctctgaagcagcgagctgtggctgccggtgtaaccgcctctgccaactggatcttcaactttgctctcgctctattcgtgccctcggccttcaagaacatcaactggaagacctacatcatctttggagtcttctgtatcgtcatgaccatccacgtctttgtcctcttccccgaaaccaagggcaagaccctcgaagagattgatatgatgtgggccgcccgagttcctgcctggagaaccgcaaactgggtgcctgaccacgttcctggcgcccttcccgaagacgagaaacactcggaggagatggtcgaggccgtcgaatccaatgaagaggagcccaagatagccagtgctaacgtcgacgcccctccctctcaattgtaa

SEQ ID NO: 97716 - protein, 545 aa, Yarrowia lipolytica CLIB122
MIGNAQINQVGALQHRFPKLHNPYLTAAVATMGGLLFGFDISSVSAFVDTKPYKEYFGYPTSIQQGGITASMAGGSFLSSLVAGWISDRLGRRFAIHFASFWWVVGAAIQSSAQNKGQLIAGRLISGLGIGLGSSVIPVYISELSPKKIRGRLVGLFQWAVTWGILIMFYISFGLSNIHGVAGFRVAWGLQIIPGLLMSLGCLFLEESPRWLAKQDNWDESVRVLRAIHQGGYGTEEDILLEIEEIREAVRIEHETKNLRFWHLFQKDSINRTMVGIWAQIWQQLTGMNVMMYYIVLIFTMAGYTGNANLVASSIQYVINMIMTIPALLFIDRVGRRPLLLFGSIVMMIWLFAVAGILAVYGTQIPGGLDGDAFTTIVIEPTHKPAQKGVIACSYLFVATFAPTWGPGIWLYCSELFPLKQRAVAAGVTASANWIFNFALALFVPSAFKNINWKTYIIFGVFCIVMTIHVFVLFPETKGKTLEEIDMMWAARVPAWRTANWVPDHVPGALPEDEKHSEEMVEAVESNEEEPKIASANVDAPPSQL

SEQ ID NO: 97717 - DNA, 1548 bp, Yarrowia lipolytica CLIB122
  CDS (1)..(1548)
atgggactcgctaacatcatcaaccgtggagaaaagcccgagggctcggccttcatggcggcctttgtggccgtgtttgtcgcgtttggaggtattctgtttggatacgacactggaaccatttccggcgtcatggccatgccattcgtcaagaagacctttacagatgacggcctggagttcacttctgagcagacctcgctcatcacttccattctttctgcaggcaccttcactggagccatttctgctccctgggcctctgatactctgggaagacgactgggtctgatcctcttctgtgtcgtcttctctgttggcgctattcttcagactgctgccaccggccgaacgcttttgattgtcggacgagttgttgctggtcttggtgttggtggagtctcttccatcgttcctctttaccagtctgaggttgcccccaagtggatccgaggtgccgttgtctccatctaccagtttgccatcaccattggtcttctgctggctgccattgtcaacaacgcaaccaaaaacaaagacaacagtgcttcctaccgaattcctctcggccttcagcttctgtgggccgtcatcctgagtggaggtctcatcctgctaccggagactcctcgattctggatcaagaagggcgagtacgacaaggccgccgattccctgcgacgactacgacgacttcctgttgagcacgaggctgtacagaaggagctcctggagatccaatcttctcacgaccacgagatgcagatcggtagcgccacctgggccgcctgcttctcccccaaggggtcccagctgaagcgaatgctgaccggtattgccattcaggccctgcagcagctcaccggtatcaacttcatcttctactacggaaccgagttcttcaagaagtccaacatctccaaccccttcctcatccagatgatcaccaacattgtcaacgtggttatgaccatccccggtatcatgtttgttgatcgagtcggacgacgaaagctgctgttgatcggagctatcgtcatgtgctcttccgagtttatcgtggcggctgttggtactgccattgataacgagacctcctcaaaggttctgattgccttcacttgtaccttcattgccggtttcgccgccacctggggtcctattgcctgggttgtcattggagagattttccctctacgaatccgagccaagggtgttgctctatgcgccgcctccaactggcttttcaactttgccattgcctttgcaaccccctacctcgtcgacgaggcccctggatcggccggtctcaagaccaaggtcttcttcatctggggaggctgcaacttcctgtgcatcgccttcacttacttcttcatctacgagaccaagggtcttactctggaggaggtggaccagatgtacgccgagatcaagattgcttctcgatcccaccagtttgtgcctaccactcgagtcgctgcttacgacgagcacgcttctgacgacaagaaggacggacagcacgtctacattgagtctgtctag

SEQ ID NO: 97718 - protein, 515 aa, Yarrowia lipolytica CLIB122
MGLANIINRGEKPEGSAFMAAFVAVFVAFGGILFGYDTGTISGVMAMPFVKKTFTDDGLEFTSEQTSLITSILSAGTFTGAISAPWASDTLGRRLGLILFCVVFSVGAILQTAATGRTLLIVGRVVAGLGVGGVSSIVPLYQSEVAPKWIRGAVVSIYQFAITIGLLLAAIVNNATKNKDNSASYRIPLGLQLLWAVILSGGLILLPETPRFWIKKGEYDKAADSLRRLRRLPVEHEAVQKELLEIQSSHDHEMQIGSATWAACFSPKGSQLKRMLTGIAIQALQQLTGINFIFYYGTEFFKKSNISNPFLIQMITNIVNVVMTIPGIMFVDRVGRRKLLLIGAIVMCSSEFIVAAVGTAIDNETSSKVLIAFTCTFIAGFAATWGPIAWVVIGEIFPLRIRAKGVALCAASNWLFNFAIAFATPYLVDEAPGSAGLKTKVFFIWGGCNFLCIAFTYFFIYETKGLTLEEVDQMYAEIKIASRSHQFVPTTRVAAYDEHASDDKKDGQHVYIESV

SEQ ID NO: 97719 - DNA, 1485 bp, Yarrowia lipolytica CLIB122
  CDS (1)..(1485)
atggccattattgtggctgtatttgtggcttttggaggacttctctacggctacgacacaggaactattgctggaatcatgaccatgggctatgtgaaagaacactttacagactttgggaagaacgacttcacctcgggccaatcatctctcaccacatctatcctatctgtgggcacatttaccggagccatcgttgctcccttagctgctgacacggctggtcgacgtctgggtcttctgttgtattgtcttgtattctctgtgggtgctattttgcagaccgtcacaaccggaagagtcttgctaattgtgggacgggtgattgctggtcttggtgtgggaggtatctcgtccattgtgcctctctatcagtcagaagtgtctcccaaatggatcagaggggccgttgtttctgtctaccagtttgccatcactgtgggtcttctactggcagctattgtcaacaatgccactaaggaccgtccaaatacgtcatcataccgtatccctcttggtattcaactcatttgggctcttattctttcagcaggacttgtgtttcttcctgagactcctcgtttctgggtcaagaagaaccggccagagaaagccgccgaagcactctcacggctaagaaggctaccaacagactcgaaaccggtaaaaaaggaactgcttgaactacagaagtcgttcgaaatggaaatggaggttggaaactcctcctggaaggcttgtttcagtccacatggatcacagctcaaaagactgctgacaggagtctcaatccaggctctgcaacaactaacaggcatcaatttcatattctactatggaaccaactttttcaaaacagctggcataaaagatccctttgtggtgtccatgatcacctctgccgtcaatgtggccttcacccttccgggtattctgtttgtcgacaaagtgggccgaagaaagctgctcttgattggagccgtggtaatgtgtgtttcagaattaattgtggcagctgtaggagcagctctggatagccaggtgtcttccaaggtccttattgccttcacttgtacgttcatcgcaggctttgcatccacctggggacctatagcctgggtggttgttgcggagattttcccgcttcgaatccgggccaagggagtggctatcagtgtggctgccaactggattttcaactttgccattgcctttgcaactccgtacttggtcgacaagaaacctgggtctgccggtctcgagtccaaggtgtttttcatctggggaggttgcaattttctagccattgcctttgtgtacttgtttgtctatgaaaccaaagggttgtcactggagcaggtggacgaaatgtactcggaggtcaagtacgcctggcagagtgataggttccagaccgagatcatgtctggaaagacggaggtttcgccggatcagagctgcgattctggatttgattcggattag

SEQ ID NO: 97720 - protein, 494 aa, Yarrowia lipolytica CLIB122
MAIIVAVFVAFGGLLYGYDTGTIAGIMTMGYVKEHFTDFGKNDFTSGQSSLTTSILSVGTFTGAIVAPLAADTAGRRLGLLLYCLVFSVGAILQTVTTGRVLLIVGRVIAGLGVGGISSIVPLYQSEVSPKWIRGAVVSVYQFAITVGLLLAAIVNNATKDRPNTSSYRIPLGIQLIWALILSAGLVFLPETPRFWVKKNRPEKAAEALSRLRRLPTDSKPVKKELLELQKSFEMEMEVGNSSWKACFSPHGSQLKRLLTGVSIQALQQLTGINFIFYYGTNFFKTAGIKDPFVVSMITSAVNVAFTLPGILFVDKVGRRKLLLIGAVVMCVSELIVAAVGAALDSQVSSKVLIAFTCTFIAGFASTWGPIAWVVVAEIFPLRIRAKGVAISVAANWIFNFAIAFATPYLVDKKPGSAGLESKVFFIWGGCNFLAIAFVYLFVYETKGLSLEQVDEMYSEVKYAWQSDRFQTEIMSGKTEVSPDQSCDSGFDSD

SEQ ID NO: 97721 - DNA, 1602 bp, Yarrowia lipolytica CLIB122; identical to SEQ ID NO: 97028
  CDS (1)..(1602)

SEQ ID NO: 97722 - protein, 533 aa, Yarrowia lipolytica CLIB122; identical to SEQ ID NO: 97029

SEQ ID NO: 97723 - DNA, 1623 bp, Yarrowia lipolytica CLIB122
  CDS (1)..(1623)
atgtcgctggacaaaaaccgccagatcacgacctctgagtcgtcgtctggaagcagtgccgatgaagggacccatatcatgagaggcctgaccagtactagtactcaggacgagaccactggttccatttcggaaggcaacctagaagccgagaaaatctcgccgtttgtgtttgtgctggttgccctggcctccatttccggattcctgtttggatacgacacgggctatgtttctggagctctggtggtcatcaaggaggatcttggacgtgccctttccaacggagataaggagctgattactgcttccacgtccctgggagctctccttggaggagttattgccggagccatgtgcgacttctttggccgaaagtgggttatcacctttgccaatattctgtttctggttggagctgccattcagtgtggagctcacgccgtgtggaccatgatcggaggccgattcgtcatgggatggggcgtgggtattgcatctctatgtgctcctctgtacatttccgagctggcccccactcgaatccgaggtcgtcttgtcgttctcaacgtcctggctatcaccggaggacagcttgtggcctacggaattggtgctggcatggcccacgtgcaccaaggatggagaattctagttggtctgtctatggtgcctgcctttgtgcaaatggtcatctttgtgttcatgcccgagactcctcgatatcttgttcgaaagaataagattgctgaggccaagaaggtgctggccaagacatatgccaccgatgacgacaaccttctcgaccgaaagctccacgaactcatgctccacaacgcatacaaggagtccggcctgtccactatggcgcgagctcgaaacactatgaaggaactttattgcgtacccagcaacttgcgagccctcataattgcttgtggactgcagggaatccagcagttttgtggtttcaactcgctcatgtacttttctgctaccatttttgaggtggtgggctttgataacgccacagccgtctccatcatcgttgctggaacgaactttgtcttcaccattgtcgcctttatggtcattgaccgtattggacgacgccgaattctcctgggaaccatctggggcatgtctctgggactcgttgtcaacgccattgctttccacttccttgacaagcagaaggaaaagaaccccaaccatgagctcgataaggaacacatttccggatgggcatacgtggtcctcgttgctcagctcgtctacgtcgccttctacgccactggtatcggtaatgtgccatggcagcagtcggagctgttccccatctccgtccgaggtgttggaactggcatggccactgccaccaactgggcaggatcgctcattgtgtcctccactttcctgaccatgttggaaaatatcacccccactggaacattttccttctacgccggtctctgtgctctcggagaagtgtttgtcttcttcctgtatcccgagacttccggcatggatctggagcagattcaacagctgctgacgggaggtttcaacatcaaggagagtatgcggctgtctgatgaggccaagagaggctacaagaagtag

SEQ ID NO: 97724 - protein, 540 aa, Yarrowia lipolytica CLIB122
MSLDKNRQITTSESSSGSSADEGTHIMRGLTSTSTQDETTGSISEGNLEAEKISPFVFVLVALASISGFLFGYDTGYVSGALVVIKEDLGRALSNGDKELITASTSLGALLGGVIAGAMCDFFGRKWVITFANILFLVGAAIQCGAHAVWTMIGGRFVMGWGVGIASLCAPLYISELAPTRIRGRLVVLNVLAITGGQLVAYGIGAGMAHVHQGWRILVGLSMVPAFVQMVIFVFMPETPRYLVRKNKIAEAKKVLAKTYATDDDNLLDRKLHELMLHNAYKESGLSTMARARNTMKELYCVPSNLRALIIACGLQGIQQFCGFNSLMYFSATIFEVVGFDNATAVSIIVAGTNFVFTIVAFMVIDRIGRRRILLGTIWGMSLGLVVNAIAFHFLDKQKEKNPNHELDKEHISGWAYVVLVAQLVYVAFYATGIGNVPWQQSELFPISVRGVGTGMATATNWAGSLIVSSTFLTMLENITPTGTFSFYAGLCALGEVFVFFLYPETSGMDLEQIQQLLTGGFNIKESMRLSDEAKRGYKK

SEQ ID NO: 97725 - DNA, 1539 bp, Aspergillus nidulans FGSC A4
  CDS (1)..(1539)
atgggctttatgcttaggaagcctgatgatgcagcgggctctgcggcccctgctatcctgatcggcctgtttgtggcctttggtggcgtcttgtacggctatgatactggtactatcagcggcattctcgccatgaaatactggcggaggcagttctctaccggctacgttaaccccaacgaccatatccccgacgtcacctcctcccagtcctcgatgatcgtttctctcctgtccgccggtaccttcttcggtgccctcacggccgccccagttgctgattactttggtcgccgcattgccatgatcctcgactgttttgtattttgcttcggagtggtcttgcagacagcagccaccgccattcccttgttcgttgctggacgtttcttcgccgggtttggcgttggattgctctccgcaacagttcctttataccagtctgagacggctcccaagtggatccgtggcactattgtcggtgcttatcagcttgcgatcactatcggtctactccttgccgctattgtcaacaactctacaaaagaccgcaatgacaccggttgctaccgcattcccgtcgcggttcaattcgcctgggccatcatcctggttgtgggaatgatcatcctccctgaaaccccgagattcctgatcaaacaagacaaccatgaggctgctatcaagtctcttgcccgtcttcgtcgtctggacatcaacgatctcgctgttgtcgaagaacttgaagagattaaggcaaaccatgaatatgagctcagcgttggcaaagccagttaccttgagatactccgcgggtccattgtcacagtttactacggaacgacattcttccaacactctggcattaacaacagctttgtcattaccttgataacgaacatcgtcaatgtagtttcaaccctacccggactttggatggtcgagaaatggggccgtcgcccgctgctactttttggcgccgtcggtatgtgcgtcagccagttcattgtggctattgtcggcacaaccaccgactccggcgtcgcaaacaaggtccttatcgctttcgtctgcgtttacatcttcttcttcgcgtcctcatggggaccggtcgcgtgggttgtcactggtgagctcttcccgctcaaggctcgcgccaagtgtctctctatcactactgctgcgaactggctgcttaactgggcgatcgcctacgccaccccatatatggtcgactctggtccgggaaatgccaacctccagtcaaaggtgtttttcatctggggaggattctgcttgattgctggaatatttgtctggacctgcatctacgagaccaagggtcttacccttgaggaggtcgatgaactttacgccaaggttcccgttgcctggcgctctaaaggctttgttccgtccgtgcattacacagacgtgcgcgacgttgctgctgggcgtaagggtagtggcttggctgaattagaggcggacgcccaggccaagcagatctcggagcatgtcgagaaagcttcggtctaa

SEQ ID NO: 97726 - protein, 512 aa, Aspergillus nidulans FGSC A4
MGFMLRKPDDAAGSAAPAILIGLFVAFGGVLYGYDTGTISGILAMKYWRRQFSTGYVNPNDHIPDVTSSQSSMIVSLLSAGTFFGALTAAPVADYFGRRIAMILDCFVFCFGVVLQTAATAIPLFVAGRFFAGFGVGLLSATVPLYQSETAPKWIRGTIVGAYQLAITIGLLLAAIVNNSTKDRNDTGCYRIPVAVQFAWAIILVVGMIILPETPRFLIKQDNHEAAIKSLARLRRLDINDLAVVEELEEIKANHEYELSVGKASYLEILRGSIVTVYYGTTFFQHSGINNSFVITLITNIVNVVSTLPGLWMVEKWGRRPLLLFGAVGMCVSQFIVAIVGTTTDSGVANKVLIAFVCVYIFFFASSWGPVAWVVTGELFPLKARAKCLSITTAANWLLNWAIAYATPYMVDSGPGNANLQSKVFFIWGGFCLIAGIFVWTCIYETKGLTLEEVDELYAKVPVAWRSKGFVPSVHYTDVRDVAAGRKGSGLAELEADAQAKQISEHVEKASV

SEQ ID NO: 97727 - DNA, 1611 bp, Aspergillus nidulans FGSC A4
  CDS (1)..(1611)
atggccatcggcaacatctacgtgatcgcggccatcgccgtcattggcggtggtcttttcggttttgatatctcttctatgtctgccatcatcaacacagacgcatatctgtgctacttccaacaaggccccttaaaaaccaatgacaagggggagcaagtgtgcagtggtcctactgctgacgtccagggtggtatcaccgcggccatgcccggtggctcctggctcggtgcgctggtttcggggttcctgtctgatatttttggccgcaagacgacgatccagatcgggtctgttatttggtgcattggctccatcatcgtttgcgccgcgcagaacatccctatgctcattgtcggccgcatcatcaacggattcagtgtcggaatctgctctgctcaggttcccgtctacatttctgaactggcaccacccaccaaacgtggccgcctcgtcgggctccagcagtgggccatcacttggggcatcatgatcatgttctacatctcctacggaaccagctatatcgacggtacagccgccttccgcatcccttggggtctgcaaatgatcccggccgtcctcctcttcttcggcatgatggtccttcctgaatccccccgctggctcgcccgcaaagaccgctgggaagagtgtcttgcggttctcaccctcgtccacggacatggcgatcccaacgctcccttcgtcgttcgcgaatacgaggaaattaaggcaatgtgcgaatttgagcgcaacaatgccgacgtcagctacctcgaacttatcaagccgaacatgatcaaccgcacacatgtcggtgtcttcacgcagatctggtcccaactgaccggaatgaacgtcatgatgtactacattacctatgtcttcgctatggctggactccaggggaacaacctcctcgtgtcgagctccatccagtacgttattaacgtcgttatgaccatccctgccattctttgggtcgaccgctggggccgccgccctaccctcctcctcggcgctgccggaatgctcgcattcctgtttgccaatggcggtctcatgtctagctacggacaccccgctccccccggcggcctcgacggcatcgagcagcaaagctggatcgtgcgcggtcccccctccaaagccgtcatcgcctgcacctacctcttcgtcgcggtgtacgcgatctcctggggtcctgtgtcttgggtgtacccgcccgagctgttcccgctccgcgtccgcggcaaagccaacgccctctgcacctcgtctaactgggccttcaacttcgcgctcgcgtacttcgttccaccggcgttcgtaaacatccagtggaaggtatacatcattttcggtgtcttctgcacggccatgttcctgcatgtcttcttcatgttccccgagacggcaggtaagaccctcgaagatgtagagggcattttcacgaatccggctgggatcaagtacattggaacgccggcttggaagacgaagaatgaacggggtcgtgccgcgatgctggagcagactggctttgatgtcgatgaggagaagagagcggaggctgttgccgtgcatgaggagtcccagccgaaatga

SEQ ID NO: 97728 - protein, 536 aa, Aspergillus nidulans FGSC A4
MAIGNIYVIAAIAVIGGGLFGFDISSMSAIINTDAYLCYFQQGPLKTNDKGEQVCSGPTADVQGGITAAMPGGSWLGALVSGFLSDIFGRKTTIQIGSVIWCIGSIIVCAAQNIPMLIVGRIINGFSVGICSAQVPVYISELAPPTKRGRLVGLQQWAITWGIMIMFYISYGTSYIDGTAAFRIPWGLQMIPAVLLFFGMMVLPESPRWLARKDRWEECLAVLTLVHGHGDPNAPFVVREYEEIKAMCEFERNNADVSYLELIKPNMINRTHVGVFTQIWSQLTGMNVMMYYITYVFAMAGLQGNNLLVSSSIQYVINVVMTIPAILWVDRWGRRPTLLLGAAGMLAFLFANGGLMSSYGHPAPPGGLDGIEQQSWIVRGPPSKAVIACTYLFVAVYAISWGPVSWVYPPELFPLRVRGKANALCTSSNWAFNFALAYFVPPAFVNIQWKVYIIFGVFCTAMFLHVFFMFPETAGKTLEDVEGIFTNPAGIKYIGTPAWKTKNERGRAAMLEQTGFDVDEEKRAEAVAVHEESQPK

SEQ ID NO: 97729 - DNA, 1671 bp, Aspergillus nidulans FGSC A4
  CDS (1)..(1671)
atggccgacaaggtccaagccgacgagccccagatacagcccgagtcctcaatcccagatagccggtcctctctcaagggagacgcccaccatgccgaagtatcccgacaaccatacggccccccgggtcttcggggtgtagtcgccaatccttttgtactgctctgcgcggcatgctcaaccctcggagggttgtcgttcgggtacgatcagggtgtgatctcagtcaccctggtcatggaacagtttctgggccggttcgtggaggttgccgagggccatccgggatcagggttctggaagggcttgatgacggcaatgttggaattgggtgcttttgttggcgcgctcaatcagggctggctcgctgataagatctctcgacggtactcgatcgttgtggctgtggctatctttaatgtcggttccgtgctgcagactgccgccgtggactatgcgatgcttaccgtcggacgcacaattggcggtattggcatcggtatgctgtccatggttgcgccgctctatatctcagaggtctcgccgcccgagtgtcgaggcgcgctgctcgtcttggaggagttctgtatcgtgctcgggatcgtcattgcgtactggatcacgtacgggacacggttcatggccggcgagtgggcgtggagacttcctttcctgctgcagatcgtgccgagtttcgtcttgctgggaggtgtcattgtcctcccgttctcgcctcgttggctcgcgtccaagggccggaatgacgaggcgcttcagagcctgagccagctgcgccggctgccgaccaccgaccaccgtatccaacaagagctgctggacatcaagatcgatgtccgctttcatcaagagctgaacgccgagaagcacccgacccttcagggctcggggacgacaaagagcctgcttcgcgagctggccggttgggccgactgcttcaagagcggttgctggcgacgcacccaggtggcagtccttgtgatgtttttccagcagtttgttggtatcaacgccctcatctactactcgcccacgctcttcaagaccatgggtctcgattacgatatgcaattgctcatgtcgggtatcatcaacgtcacgcagctggttggcgtctgcaccagtctctggaccatggacgccctcggccgtcggccgctcctgctctggggtgctgccatcatgggaatttcccatgtcattattgcagccctcgtcggtatctactcagacaactggcctgcgcaccgaacacggggctggaccagtgtcgcttttctgtttgtgtatatgctcgcctttggcgccacctggggatcagtaggctgggcgctgccggctgaggtgttctcttcatttctccgcgccaagggtgtcgctcttgcaacatgcggcacctggctgttcaactttatcatcggccttatcacacctcccttgattcaagatacagggtatggtgcgtacgtcttcttcgcagtgttctgtatcctcgccttcatctggaccttcttctgcgtccctgagacaagcggccgcaccctggagcagatggacgcagtattcaaggacaactcaatcagcgcggagcgggcaaggaggcaggcgatcgaaaatgagcttatgggagagcatcatggcgttacagcatag

SEQ ID NO: 97730 - protein, 556 aa, Aspergillus nidulans FGSC A4
MADKVQADEPQIQPESSIPDSRSSLKGDAHHAEVSRQPYGPPGLRGVVANPFVLLCAACSTLGGLSFGYDQGVISVTLVMEQFLGRFVEVAEGHPGSGFWKGLMTAMLELGAFVGALNQGWLADKISRRYSIVVAVAIFNVGSVLQTAAVDYAMLTVGRTIGGIGIGMLSMVAPLYISEVSPPECRGALLVLEEFCIVLGIVIAYWITYGTRFMAGEWAWRLPFLLQIVPSFVLLGGVIVLPFSPRWLASKGRNDEALQSLSQLRRLPTTDHRIQQELLDIKIDVRFHQELNAEKHPTLQGSGTTKSLLRELAGWADCFKSGCWRRTQVAVLVMFFQQFVGINALIYYSPTLFKTMGLDYDMQLLMSGIINVTQLVGVCTSLWTMDALGRRPLLLWGAAIMGISHVIIAALVGIYSDNWPAHRTRGWTSVAFLFVYMLAFGATWGSVGWALPAEVFSSFLRAKGVALATCGTWLFNFIIGLITPPLIQDTGYGAYVFFAVFCILAFIWTFFCVPETSGRTLEQMDAVFKDNSISAERARRQAIENELMGEHHGVTA

SEQ ID NO: 97731 - DNA, 1653 bp, Aspergillus nidulans FGSC A4; identical to SEQ ID NO: 97030
  CDS (1)..(1653)

SEQ ID NO: 97732 - protein, 550 aa, Aspergillus nidulans FGSC A4; identical to SEQ ID NO: 97031

SEQ ID NO: 97733 - DNA, 1755 bp, Aspergillus nidulans FGSC A4; identical to SEQ ID NO: 97032
  CDS (1)..(1755)

SEQ ID NO: 97734 - protein, 584 aa, Aspergillus nidulans FGSC A4; identical to SEQ ID NO: 97033

SEQ ID NO: 97735 - DNA, 1689 bp, Aspergillus nidulans FGSC A4
  CDS (1)..(1689)
atgggtgtggacatcaagggcctcttcaagcccaaagctgaacaacaagaacactcccaagccacaacgccttcaaggaccgactcaattgcggagaaggacaatggcatcatcgacgacagccctgtcaagtacctaacatggcggtcattcatcctgggtatcgttgtgtccatgggtggtttcatcttcggttactctactggtcaaatttccggcttcacaacaatggcagatttcaagaagcgcttcgccgagcgccaagcaaacggcgagtacgtcttcagcaacgtccgcaacggtctaatcgtcggtcttctctgcattggaaccatgatcggagccctcgtcgccgcccccatcgccgaccgcattggccgcaaactctccatgtccttctggtcgatcatccacatcgtcggtatcattatccagatcgccactgactccaactgggtccagattgccatgggccgttgggttgccggtctcggtgtcggtgccctctccagcgtcgtccccatgtaccaatccgaagctgcaccccgccaggtccgtggtgccatgatctcggccttccagcttttcgtcgcctttggtatcttcatctcttatatcatcaactacggtaccgagtcgatccaatccactgcctcgtggagaatcaccatgggcatcggtttcgcttggccactgatcttaggtctcggagctcttttcctgcccgagtccccccgttacgcttaccgtcttggccgtattgacgaggcccgcaaggtcatggccaagctctatggtgttgaggttaaccaccgcgttgtcgtccaagaaatgaaggacatgaaggataagctcgaggaggagcgcgctgctggtgttgctccctggcacgaggttgtgactggcccccgtatgctctatcgtactcttcttggtattgctctgcagtccctgcagcagctctctggcgcaaacttcatcttctactacggtaactccattttcacctccaccggtctcaacaacagttacgtcacccagatcattcttggtgccgttaacttcggtatgaccctgcctggtctgtacattgtcgagcactttggtcgccgtgctagtctgatggtcggtggtgcctggatggccatctgcttctacatctgggcttctgtgggcaactccgttcttgatcttgacaacccgcagaacacccccaaggccggagccgccatgatcgtgttcacctgcttcttcatcgccggtttcgccaccacatggggtcccatcgtctggtccatctgctctgagatgtaccccaaccgcagccgcgccacaagcattggcattgccacttgtgccaactggacatggaacttcctgatctccttcttcaccccatttatctcaggctccatccactttgcctacggctacgtgtttgcctcctgctgtgttgttggtgtccttatcgtcttcttcttcgtcaacgagacccagggccgtaccctcgaggaagtcgacaccatgtatgtcttgcatgttgtcccctggaagagtgcttcctgggttcccgatgagagcatcgtccgtgatctccaccctggttccgatgctaacaagactgagggccttgggcaggcggagcatggtgaggagagcaggccggagcctgtggagattcgggagtga

SEQ ID NO: 97736 - protein, 562 aa, Aspergillus nidulans FGSC A4
MGVDIKGLFKPKAEQQEHSQATTPSRTDSIAEKDNGIIDDSPVKYLTWRSFILGIVVSMGGFIFGYSTGQISGFTTMADFKKRFAERQANGEYVFSNVRNGLIVGLLCIGTMIGALVAAPIADRIGRKLSMSFWSIIHIVGIIIQIATDSNWVQIAMGRWVAGLGVGALSSVVPMYQSEAAPRQVRGAMISAFQLFVAFGIFISYIINYGTESIQSTASWRITMGIGFAWPLILGLGALFLPESPRYAYRLGRIDEARKVMAKLYGVEVNHRVVVQEMKDMKDKLEEERAAGVAPWHEVVTGPRMLYRTLLGIALQSLQQLSGANFIFYYGNSIFTSTGLNNSYVTQIILGAVNFGMTLPGLYIVEHFGRRASLMVGGAWMAICFYIWASVGNSVLDLDNPQNTPKAGAAMIVFTCFFIAGFATTWGPIVWSICSEMYPNRSRATSIGIATCANWTWNFLISFFTPFISGSIHFAYGYVFASCCVVGVLIVFFFVNETQGRTLEEVDTMYVLHVVPWKSASWVPDESIVRDLHPGSDANKTEGLGQAEHGEESRPEPVEIRE

SEQ ID NO: 97737 - DNA, 1605 bp, Aspergillus nidulans FGSC A4
  CDS (1)..(1605)
atggcggacggtgtcgttgcgggtacccgggttgaggcccccgtcacctggaagacctacctcatgtgcgcgtttgccgcctttggtggtatcttttttggttatgattctggttatatcaacggtgttatggcaatggactacttcattcacgagttttcaggaaaggtcaaagccgagtatgaagccgccgataacctgagcggctatgtgatctcctcctccaacaagtcccttatcacctcgattctctctgcgggtaccttcttcggtgccatcattgccggtgacctggccgattggttcggccgtcgaacaacgatcatcagcggatgtggaatcttcatggttggtgtcgccctgcagactgcctccaccactgttgccttgctggttgtcggccgtttgattgctggattcggtgtcgggtttgtctctgccatcctgattctgtacatgtcggaaatcgcgccccgcaaggtccgtggtgccattgtttccggctaccagttctgcgtcaccgttggtctgatgctggcttcctgcgtggactacggtaccgagaaccgcaccgattccggctcgtaccgtattccaattggtctccagctgctctgggctatcatccttgctgttggtctcttcctccttcccgagtcgcctcgttactatgtgcgcaagggcgatgtgtctagcgccgccaaagtgcttgctcgcgtccgtgaccaggacgttgagtcggactatgtcaaggaggagcttgctgagatcgtcgccaacaacgagtacgaaatgagccttatccctcagggtggttactttgccacttggttcaactgcttccgcggaagtatctggtccccgaacagcaacctgcgccgtaccatcctgggcacctcgcttcagatgatgcagcagtggactggtgtcaacttcgtcttctacttcggtactaccttcttcaccaacctcggcactatttccgaccccttcctcatcagtatgatcaccaccatcgtcaacgtcttctccactccgatctctttctacacgatggagaagattggtcgtcgtcctctccttctctggggcgccctgggcatggttatctgccagttcattgtcgccattgccggtgtcgttgatggatctaacaacaagaccgtcagcgctcagatcgcatttatctgcatttacatcttcttcttcgcctccacctggggtcccggtgcctgggtcgtcatcggcgagatctacccgttgccgatccgttcccgtggtgtcgctctctccactgcctccaactggctctggaactgcatcattgctgtcatcaccccctacatggtcgacgaggacaagggcaacctcaagtccaaggtgttcttcatctggggctccctctgcgcgtgcgcttttgtctacacctacttcctgattcccgagaccaagggtcttactcttgagcaggtcgacaagatgatggaggagaccacccctcgcacttcttccaagtggaagccccacggcaccttcgcggccgagatgggtatgactgagaaggatgtgactcagactgtggaggacattgctaagaaggcgtaa

SEQ ID NO: 97738 - protein, 534 aa, Aspergillus nidulans FGSC A4
MADGVVAGTRVEAPVTWKTYLMCAFAAFGGIFFGYDSGYINGVMAMDYFIHEFSGKVKAEYEAADNLSGYVISSSNKSLITSILSAGTFFGAIIAGDLADWFGRRTTIISGCGIFMVGVALQTASTTVALLVVGRLIAGFGVGFVSAILILYMSEIAPRKVRGAIVSGYQFCVTVGLMLASCVDYGTENRTDSGSYRIPIGLQLLWAIILAVGLFLLPESPRYYVRKGDVSSAAKVLARVRDQDVESDYVKEELAEIVANNEYEMSLIPQGGYFATWFNCFRGSIWSPNSNLRRTILGTSLQMMQQWTGVNFVFYFGTTFFTNLGTISDPFLISMITTIVNVFSTPISFYTMEKIGRRPLLLWGALGMVICQFIVAIAGVVDGSNNKTVSAQIAFICIYIFFFASTWGPGAWVVIGEIYPLPIRSRGVALSTASNWLWNCIIAVITPYMVDEDKGNLKSKVFFIWGSLCACAFVYTYFLIPETKGLTLEQVDKMMEETTPRTSSKWKPHGTFAAEMGMTEKDVTQTVEDIAKKA

SEQ ID NO: 97739 - DNA, 1584 bp, Aspergillus nidulans FGSC A4
  CDS (1)..(1584)
atggcagacgcggtgattgctggtcagcgcgtggaggccccggtcacatggaaggcgtaccttatgtgcgtgttcgcggcctttggtggtatattcttcggctacgactctggctatattaatggagttatgggcatggattatttcatccaagaatttacaggaaaggtcaaaagcgaaactcccgccgcgcagtttgtgatttcatcgtcgaataaatcccttatcacctctatcctgtctgcggggacgttctttggcgctattattgccggtgacctggcagactggtacggccgtcgcatcacgattatcaatggctgcggagtctttatggctggtgtggcttttcagattgcctctaccaccgtgcccatgcttgtcgtcggccgattgatcgcaggcgttggtgtcggttttgtctctgcgatcatcattctgtacatgtctgagatttctcctcgaaggttccgtggtgctatcgtatcgggctatcagttttgcatcaccattggtttgatgctggcctcctgcgtgaactatgggacggagaaccggaatgattcgggctcataccgtatcccgattgccctccaactcctctgggcgatcattcttgggataggtctgttcgtccttccagagtctccccgttattatgttcggaaaaacaatctggctgaagcagccaaaaccctcgctcgcgtgcgaggccagcccccggagtcagagtatatcacgcaagagctggcagaaatcgtggccaacaatgaatacgagatgcaggttattccccagggcggctattttgctacgtggttgaactgcttccgtggaggtctccggtctcctaacagcaaccttcgtcgtgttatccttgggacctctcttcagatgatgcaacaatggactggagtgaacttcgtcttctattttggtactacgtttttccagaacctcggtaccattgacgaccctttcctcatcagcatgatcaccacgattgtcaatgtcttttctactccgatctccttttacacgatggagaagctcggtcgtcgccctctactgctttggggcgctctgggcatggtcgtctgccaatttattgtggcgatcgctggaaccgtggatggagacaacagtaaaaccgtctcggcgcaaatctcgtttatctgcatttatatctttttctttgcttccacttggggccctggcgcttgggtcgttattggcgagattttcccgctgcccattcgttctcgtggcgttgcgctatcaacagcctccaactggctttggaactgcattattgcagttatcacaccgtacatggttgatatcgacaaggggaacctcaagtcccgagtgttctttatctggggatccctgtgtgcctgcgcatttgtctatgtctacttcctgattcccgagacaaaaggcctcaccctcgaacaagtcgacaagatgatggaggagactactcctcgcacatctgccaaatggaagcctcactctacctttgcgaccgagatgggtatgactgagaaaaatgcgagtacaaccgtggaaagcgctgcctaa

SEQ ID NO: 97740 - protein, 527 aa, Aspergillus nidulans FGSC A4
MADAVIAGQRVEAPVTWKAYLMCVFAAFGGIFFGYDSGYINGVMGMDYFIQEFTGKVKSETPAAQFVISSSNKSLITSILSAGTFFGAIIAGDLADWYGRRITIINGCGVFMAGVAFQIASTTVPMLVVGRLIAGVGVGFVSAIIILYMSEISPRRFRGAIVSGYQFCITIGLMLASCVNYGTENRNDSGSYRIPIALQLLWAIILGIGLFVLPESPRYYVRKNNLAEAAKTLARVRGQPPESEYITQELAEIVANNEYEMQVIPQGGYFATWLNCFRGGLRSPNSNLRRVILGTSLQMMQQWTGVNFVFYFGTTFFQNLGTIDDPFLISMITTIVNVFSTPISFYTMEKLGRRPLLLWGALGMVVCQFIVAIAGTVDGDNSKTVSAQISFICIYIFFFASTWGPGAWVVIGEIFPLPIRSRGVALSTASNWLWNCIIAVITPYMVDIDKGNLKSRVFFIWGSLCACAFVYVYFLIPETKGLTLEQVDKMMEETTPRTSAKWKPHSTFATEMGMTEKNASTTVESAA

SEQ ID NO: 97741 - DNA, 1638 bp, Candida albicans SC5314
  CDS (1)..(1638): transl_table=12
atgtcgtccaagatcgaaagaatcttttctggacctgctttaaaaatcaatacttatttggacaagcttccaaaaatttacaatgttttcttcattgctagtatatccaccattgctggtatgatgtttggttttgatatttcgtcaatgtctgcctttattggtgctgaacattatatgaggtatttcaattctccaggatcggatatccaagggttcattacttcatccatggctttgggttctttctttggttctattgcctcctcatttgtttctgaaccctttggtagaagattatcattattgacttgtgctttcttctggatggtcggtgctgctattcaatcatcagttcaaaatcgtgctcaattgattattggtagaatcatttctggtattggtgttggtttcggttctgctgttgctccagtttatggtgctgaattggctccaagaaaaatcagaggtcttatcggtggtatgttccaattctttgtcaccttgggtatcatgatcatgttttacttatccttcggattgggccacattaatggtgttgcttcattcagaattgcttggggacttcaaattgtccctggtctttgtttgttcttgggttgtttctttattccagaatctcctcgttggttggctaaacaaggtcaatgggaagctgctgaagaaattgttgccaagatccaagctcatggtgatcgtgaaaaccctgatgttttgattgaaatttctgaaatcaaagatcaattattattggaggagtccagtaaacaaattggttatgctactttattcaccaaaaagtacattcaaagaaccttcactgctattttcgcccaaatttggcaacaattgactggtatgaacgttatgatgtactatatcgtttatattttccaaatggctggttattctggtaacagtaacttggttgcttcatccattcaatatgttatcaacacttgtgtcaccgttcctgcattatattttattgataaagtaggtagaagaccattattgattggtggtgccactatgatgatggctttccaattcggtcttgctggtattttgggtcaatactcaattccttggccagatagtggtaacgactcagtcaacattagaattccagaagacaataagtctgcctccaaaggtgccattgcttgttgctacttgttcgttgcttcctttgcctttacttggggggtcggtatctgggtctattgtgctgaaatctggggtgacaacagagttgctcaacgtggtaatgccatttccacttctgctaattggattttgaatttcgctattgccatgtataccccatctggtttcaagaatattagttggaaaacatatatcatttatggtgtcttctgtttcgctatggctacccatgtctactttggattcccagaaaccaagggtaaaagattggaagaaattggtcaaatgtgggaagaacgtgttcctgcttggagatcaagatcttggcaaccaaccgttcctattgcttccgatgccgaattggcaagaaagatggaagttgaacacgaagaagataaattgatgaatgaagactctaactccgaatccagagaaaatcaagcctaa

SEQ ID NO: 97742 - protein, 545 aa, Candida albicans SC5314
MSSKIERIFSGPALKINTYLDKLPKIYNVFFIASISTIAGMMFGFDISSMSAFIGAEHYMRYFNSPGSDIQGFITSSMALGSFFGSIASSFVSEPFGRRLSLLTCAFFWMVGAAIQSSVQNRAQLIIGRIISGIGVGFGSAVAPVYGAELAPRKIRGLIGGMFQFFVTLGIMIMFYLSFGLGHINGVASFRIAWGLQIVPGLCLFLGCFFIPESPRWLAKQGQWEAAEEIVAKIQAHGDRENPDVLIEISEIKDQLLLEESSKQIGYATLFTKKYIQRTFTAIFAQIWQQLTGMNVMMYYIVYIFQMAGYSGNSNLVASSIQYVINTCVTVPALYFIDKVGRRPLLIGGATMMMAFQFGLAGILGQYSIPWPDSGNDSVNIRIPEDNKSASKGAIACCYLFVASFAFTWGVGIWVYCAEIWGDNRVAQRGNAISTSANWILNFAIAMYTPSGFKNISWKTYIIYGVFCFAMATHVYFGFPETKGKRLEEIGQMWEERVPAWRSRSWQPTVPIASDAELARKMEVEHEEDKLMNEDSNSESRENQA

SEQ ID NO: 97743 - DNA, 1638 bp, Candida albicans SC5314
  CDS (1)..(1638): transl_table=12
atgtcgtccaagatcgaaagaatcttttctggacctgctttaaaaatcaatacttatttggacaagcttccaaaaatttacaatgttttcttcatcgctagtatatccaccattgctggtatgatgtttggttttgatatttcttcaatgtctgcctttattggtgctgaacattatatgaggtatttcaattccccaggatcgaatatccaagggttcattacttcatccatggctttgggttctttctttggttctattgcctcctcatttgtttctgaaccctttggtagaagattatcattattgacttgtgctttcttctggatggtcggtgctgctattcaatcatcagttcaaaatcgtgctcaattgattattggtagaatcatttctggtattggtgttggtttcggttctgctgttgctccagtttatggtgctgaattggctccaagaaaaattagaggtcttatcggtggtatgttccaattctttgtcaccttgggtatcatgatcatgttttacttatccttcggattgggccacattaatggtgttgcttcattcagaattgcttggggacttcaaattgtccctggtctttgtttgttcttgggttgtttctttattccagaatctcctcgttggttggctaaacaaggtcaatgggaagctgctgaagaaattgttgccaagatccaagctcatggtgatcgtgaaaaccctgatgttttgattgaaatttctgaaatcaaagatcaattattattggaggagtccagtaaacaaattggttatgctactttattcaccaaaaagtacattcaaagaaccttcactgctattttcgcccaaatttggcaacaattgactggtatgaacgttatgatgtactatatcgtttatattttccaaatggctggttattctggtaacagtaacttggttgcttcatccattcaatatgttatcaacacttgtgtcaccgttcctgcattatattttattgataaagtaggtagaagaccattattgattggtggtgccactatgatgatggctttccaattcggtcttgctggtattttgggtcaatactcaattccttggccagatagtggtaacgactcagtcaacattagaattccagaagacaataagtctgcctccaaaggtgccattgcttgttgctacttgttcgttgcttcctttgcctttacttggggggtcggtatttgggtctactgtgctgaaatctggggtgataacagagttgctcaacgtggtaatgccatttccacttctgctaattggattttgaatttcgctattgccatgtataccccaactggcttcaagaatattagctggaaaacatatatcatttatggtgtcttctgtttcgctatggctacccatgtctactttggattcccagaaactaagggtaaaagattggaagaaattggtcaaatgtgggaagaacgtgttcctgcttggagatcaagatcttggcaaccaaccgttcctattgcctccgatgccgaattggcaagaaagatggaagttgaacacgaagaagataaattgatgaatgaagactctaactccgaatccagagaaaatcaagcctaa

SEQ ID NO: 97744 - protein, 545 aa, Candida albicans SC5314
MSSKIERIFSGPALKINTYLDKLPKIYNVFFIASISTIAGMMFGFDISSMSAFIGAEHYMRYFNSPGSNIQGFITSSMALGSFFGSIASSFVSEPFGRRLSLLTCAFFWMVGAAIQSSVQNRAQLIIGRIISGIGVGFGSAVAPVYGAELAPRKIRGLIGGMFQFFVTLGIMIMFYLSFGLGHINGVASFRIAWGLQIVPGLCLFLGCFFIPESPRWLAKQGQWEAAEEIVAKIQAHGDRENPDVLIEISEIKDQLLLEESSKQIGYATLFTKKYIQRTFTAIFAQIWQQLTGMNVMMYYIVYIFQMAGYSGNSNLVASSIQYVINTCVTVPALYFIDKVGRRPLLIGGATMMMAFQFGLAGILGQYSIPWPDSGNDSVNIRIPEDNKSASKGAIACCYLFVASFAFTWGVGIWVYCAEIWGDNRVAQRGNAISTSANWILNFAIAMYTPTGFKNISWKTYIIYGVFCFAMATHVYFGFPETKGKRLEEIGQMWEERVPAWRSRSWQPTVPIASDAELARKMEVEHEEDKLMNEDSNSESRENQA

SEQ ID NO: 97745 - DNA, 1638 bp, Candida albicans SC5314
  CDS (1)..(1638): transl_table=12
atgtcgtccaagatcgaaagaatcttttctggacctgctttaaaaattaatgcttatttggataagcttccaaaaatttacaatgttttcttcattgctagtatatccaccattgctggtatgatgtttggttttgatatttcctccatgtctgccttcattggttctggtccatatatgaaattctttcattctccaggatcagacattcaagggtttattaccgcatctatggcattaggttcattctttggttccattgcttcttcttttgtttctgaacctttcggtagaagattatcattgttaatttgtgctttcttctggatggttggtgctgctattcaatcctcatctcaaaatcgtgctcaattaattattggtagaatcatttctggtgttggtgttggtttcggttctgctgttgctccaatttacggtgctgaattggccccaagaaaaattagaggtttcattggtggtatgttccaattctttgtcactttaggtatattgattatgttttatatctcatttggtttaggtcacattaatggtgttgcttcatttagaattgcatggggacttcaaattgtccctggtctttgtttgttcttgggttgtttctttattccagaatctcctcgttggttggctaaacaaggtcaatgggaagctgctgaagaaattgtcgccaaggttcaagctcatggtgatcgtgaaaacccagatgttttgattgaaatctctgaaatcaaagatcaattattgttagaacaatcaagcaagcatattggatacgctactttattcaccaagaaatatatttacagaactttcactgctattttcgcccaaatttggcaacaattgactggtatgaacgttatgatgtattatattgtttatattttccaaatggctggttattctggtaacagtaacttggttgcttcatccattcaatatgttattaatacttgtgttactgccccagctttatactttattgataagattggtagaagaccattattgattggtggtgctactatgatgatggctttccaattcggtcttgctggtatcttaggtaattattctgttccttggccagatagtggtaacgactcagtcaacattagaattccacttgacaacaaatctgcttctaaaggtgccattgcttgttgctacttgttcgttgcatcctttgcctttacttggggggtcggtatctgggtctattgtgctgaaatctggggtgacaacagagttgctcaacgtggtaatgccatttccacttctgctaattggattttgaatttcgctattgccatgtataccccatctggtttcaagaatattagttggaaaacatatatcatttatggtgtattctgtttggccatgggtacccatgtctactttggattcccagaaaccaagggtaaaagattggaagaaattggtcaaatgtgggaagaaaatgttcctgcttggagatcaagatcttggcaaccaaccattcctattgcctccgatgccgaattggcaagaaagatggaagttgaacatcaagaagataaattgatgaatgatgattctaactcagaatcaaaagaaaaccaagtctaa

SEQ ID NO: 97746 - protein, 545 aa, Candida albicans SC5314
MSSKIERIFSGPALKINAYLDKLPKIYNVFFIASISTIAGMMFGFDISSMSAFIGSGPYMKFFHSPGSDIQGFITASMALGSFFGSIASSFVSEPFGRRLSLLICAFFWMVGAAIQSSSQNRAQLIIGRIISGVGVGFGSAVAPIYGAELAPRKIRGFIGGMFQFFVTLGILIMFYISFGLGHINGVASFRIAWGLQIVPGLCLFLGCFFIPESPRWLAKQGQWEAAEEIVAKVQAHGDRENPDVLIEISEIKDQLLLEQSSKHIGYATLFTKKYIYRTFTAIFAQIWQQLTGMNVMMYYIVYIFQMAGYSGNSNLVASSIQYVINTCVTAPALYFIDKIGRRPLLIGGATMMMAFQFGLAGILGNYSVPWPDSGNDSVNIRIPLDNKSASKGAIACCYLFVASFAFTWGVGIWVYCAEIWGDNRVAQRGNAISTSANWILNFAIAMYTPSGFKNISWKTYIIYGVFCLAMGTHVYFGFPETKGKRLEEIGQMWEENVPAWRSRSWQPTIPIASDAELARKMEVEHQEDKLMNDDSNSESKENQV

SEQ ID NO: 97747 - DNA, 1665 bp, Candida albicans SC5314
  CDS (1)..(1665): transl_table=12
atgggaagttcaaccaataatacacaatcaaaagctacccccagtgtgttagaaaatgaagtcaatagctcaaaatcatcagttgtttcatcaacgtcttctgctaaagggttgctacgtgaaaccactaatcatggtactatggaaacatcctcggttcagatatctgaatcagaatctcgtccatcgaaaatggtacttgtattaacacttgcatcatcaatttctggatttatgtttgggtacgatactggttatatatcttcagcattagttcaaattggtacagatttatctaacaaaattctaacatcaggtgaaaaagaatttataacttctgccacatcgttaggagctcttcttggtgctgttgttggtggtgtattagcaaatttgattggtagacgtagagttttattgggctcaaatatcattttcgttgtggggacaataatacaattggctgctcgtactgtgtggactatgatagccgggcgatttgttttaggttggggtgttggtattgcatcattgattgctcctttaatgatttcagaattagctcctgctaaatatcgtggtagattaattgttaccaatgtcatatttattactggtggtcaattaatagcttatttcataaattggggtcttacaagagtaagtcatggttggagagtatctgttggtttatgtatggtaccaccagttttacaatttgttttattttggtttttaccagatacaccaagattttacgtgatgaatgggaactttgaaaaggcaagacaagttttgagaaaagtacacgttgatccttcagatgaatttgtaaatgctactattgatgaaatgattgcctctgattcaactgtcccaggtaatggacctttacaaaaggcatggaaatcgatcaagattattcacactactccaggaaattttagagctttgatacttgcatgtggtttacaaggtatacaacaattcactgggtttaattcattaatgtatttcagtgcaaccatttttgaaactattggtttccataacgctacagctgtttctattatcattgctgccacaaatttcgtgtttacagggatagccatttgtattattgataaagttggtagaagaagaattttattggtaggaatgccatgcatgtgtatctcattaattgtctgtgctgttgccttccattatttgaatgttgatttcagtactggtacagttgtatctagaggtattaatggttgggggattgttgtgattataggaatgatattgtatgttgcttcttatgccataggtattggtaatgctgcatgggtgggtgttgaaatgttttcagatgtcaatgtacgttccattggggcaatgtatgctgcatgtacaaattgggctggttcattggtaattgctacgacattcttgacaatgttggaaaatataaccccaactgggacattttcattctttgctggattatgttttattgcatttttctttgtttatttcttgttaccagatactgctggtttggaattggaagaaaccaccgatttcttatccaacgggttcaatgtgaaacaagctgcacaattgtcaaaggaaagaaagaagcattccaagtttgctaaatcgaaaccaaccgtatag

SEQ ID NO: 97748 - protein, 554 aa, Candida albicans SC5314
MGSSTNNTQSKATPSVLENEVNSSKSSVVSSTSSAKGLLRETTNHGTMETSSVQISESESRPSKMVLVLTLASSISGFMFGYDTGYISSALVQIGTDLSNKILTSGEKEFITSATSLGALLGAVVGGVLANLIGRRRVLLGSNIIFVVGTIIQLAARTVWTMIAGRFVLGWGVGIASLIAPLMISELAPAKYRGRLIVTNVIFITGGQLIAYFINWGLTRVSHGWRVSVGLCMVPPVLQFVLFWFLPDTPRFYVMNGNFEKARQVLRKVHVDPSDEFVNATIDEMIASDSTVPGNGPLQKAWKSIKIIHTTPGNFRALILACGLQGIQQFTGFNSLMYFSATIFETIGFHNATAVSIIIAATNFVFTGIAICIIDKVGRRRILLVGMPCMCISLIVCAVAFHYLNVDFSTGTVVSRGINGWGIVVIIGMILYVASYAIGIGNAAWVGVEMFSDVNVRSIGAMYAACTNWAGSLVIATTFLTMLENITPTGTFSFFAGLCFIAFFFVYFLLPDTAGLELEETTDFLSNGFNVKQAAQLSKERKKHSKFAKSKPTV

SEQ ID NO: 97749 - DNA, 1641 bp, Candida albicans SC5314; identical to SEQ ID NO: 97036
  CDS (1)..(1641): transl_table=12

SEQ ID NO: 97750 - protein, 546 aa, Candida albicans SC5314; identical to SEQ ID NO: 97037

SEQ ID NO: 97751 - DNA, 1653 bp, Candida albicans SC5314; identical to SEQ ID NO: 97034
  CDS (1)..(1653): transl_table=12

SEQ ID NO: 97752 - protein, 550 aa, Candida albicans SC5314; identical to SEQ ID NO: 97035

SEQ ID NO: 97753 - DNA, 1623 bp, Candida albicans SC5314; identical to SEQ ID NO: 97038
  CDS (1)..(1623): transl_table=12

SEQ ID NO: 97754 - protein, 540 aa, Candida albicans SC5314; identical to SEQ ID NO: 97039

SEQ ID NO: 97755 - DNA, 1581 bp, Candida albicans SC5314
  CDS (1)..(1581): transl_table=12
atgagtgcaaatatccaagctcttatgaaaagctatgtcaattttgacgaacacacttctggttccgctgccagaggtattttaatcggtatgtttgctgcttttggtgggtttttgtttggttacgacactggtactatttctggtgtattgtctatggactacgttaaagccagattccccaacaacaaaaccgatttcacttctggtgaaagttcccttattgtctccattttatcagtcggtacttttgttggttccttgattgccccattgttttccgatagaattggtcgtagatggacattgattttatctactttgattgtttttaacttgggagttcttttacaaactgttgccactgaaaagaaattgcttattgcaggtagagccattgccggtactggtgttggtttaatttcatctgttattcctaattatatttcggaaacaacaccaaagtgggctagaggtgctgtcactgcttcataccaatggatgatcacctggggtcttttaattgctgcttgtgccaacaagggttcccaaggtagaaaagactctggttcctatagaatacccattggtattcaatttttgtgggcattgattttgggtattggtttcttgtttctcccagaaaccccaagatactgggtttccaagtctgaagaaactaaagctaaagattctttgagaagaattagaaacttgcctgttgatcacccagatttggtgctggaatacgatgacattaaagcaaactttgatttcgaatccaaatatgccacttcttcttggacccaagttttcaaaaacgttaacaaacaacaccacagattattcactggggttgccatccaagctttgcaacaacttactggtattaatttcatcttctactatggtactcaattcttcaagcgttctggtattgaagatcctttccttatccaacttgccactaatattgttaatgttggtatgactgtgccgggtattattttggttgaaacctggggtagaagaccattgttgatggccggtagtgttgttatggctgtctcccaattgattgttgccattgttggtgttgctgctagcagtcatgctgcaaatcaatgtttagttgctttcagttgtattttcattgctggtttcgcagcaacttggggacctctttgttgggctatttgtggtgaatcctttgctttgaacgtgagactgaaatcaatctccttgtgtaccgcaagtaactggctttggaatttcggtattggttatgctactccttatatggttgattcaggtaaagggaacgccgacttgggttcaaaggtgtttttcatttggggtggatgtaacgtcattggtgggttgtttgcatactttatggtttacgaaaccaagagtcttacattagaacaagttgatgaattgtacttgaaagttgatcacgcttggcaatctaaaggatttgttcctagtgtccacgcatttagagatgatggcgatattgagcacatctcttctgatggaaaagccgaaatggttgaagttgatgaaaattccgtttaa

SEQ ID NO: 97756 - protein, 526 aa, Candida albicans SC5314
MSANIQALMKSYVNFDEHTSGSAARGILIGMFAAFGGFLFGYDTGTISGVLSMDYVKARFPNNKTDFTSGESSLIVSILSVGTFVGSLIAPLFSDRIGRRWTLILSTLIVFNLGVLLQTVATEKKLLIAGRAIAGTGVGLISSVIPNYISETTPKWARGAVTASYQWMITWGLLIAACANKGSQGRKDSGSYRIPIGIQFLWALILGIGFLFLPETPRYWVSKSEETKAKDSLRRIRNLPVDHPDLVSEYDDIKANFDFESKYATSSWTQVFKNVNKQHHRLFTGVAIQALQQLTGINFIFYYGTQFFKRSGIEDPFLIQLATNIVNVGMTVPGIILVETWGRRPLLMAGSVVMAVSQLIVAIVGVAASSHAANQCLVAFSCIFIAGFAATWGPLCWAICGESFALNVRSKSISLCTASNWLWNFGIGYATPYMVDSGKGNADLGSKVFFIWGGCNVIGGLFAYFMVYETKSLTLEQVDELYLKVDHAWQSKGFVPSVHAFRDDGDIEHISSDGKAEMVEVDENSV

SEQ ID NO: 97757 - DNA, 1806 bp, Ustilago maydis 521
  CDS (1)..(1806)
atgacacgttccaacaccgacgggtccatgaccccctccaagcaggagggcaacttggtctctgctacccacccaccgcttgccaagcgacgtttcggttccacgtcgctcactgaagatcttcagcggcattggcgtgtctaccttcttggtatctgcgcttccttcggaggtctactgttcggttgggacacgggcctcataggcggcgttctcaacatggctgcctttcaaaatgattttggcctcaaaaacaatccatccaagctagcagcgctcaagggtaacattgtatccgtcttgcaagctggctgctttttcggcgccgcttccagtttctacctgccccaccgattcggtcgtcgcaacgccatgttgatctctgctgccgtcttcctggtcggctccatcatacaaaccacctgccgccttcatggacaaagcgcgacttccgctttgaaccagctctacgtcggacgtgtcatcggtggattcggtgtcggactcgcctcttcggtcgtgcccacttatctttctgagtgcgcgcctcgctcgattcggggtcgacttgctggcatgtaccagctgctgattgtcactggtatctgcatcgcctactttgtcaactacggcatggtccagaactatcccgaccagcattcgagcgctatgtggcaggtgccttttgctctgcagtgtctgcccggttttcttttcgtcgtaacccttttctttcagccagagtctccgcgttggctcgtcgagcagggcagaagtgaagaagctcatcgcgccctcgctcgcatcaatcgtactcctatcgacgatccaagcgtcgtggcaattctccaagaaatccaaaatgatctccaaggaaaacaaggcctctccatccgtcaacaagtccggatggccttcgccgaaagagtcacaacatatcgagtctttaccggcgcccttcttatgttttttcagcagttcacgggcactaatagcattaattactattcaccccaaatctttgccagccttggcgtcactggtcagtctagcggtcttctggcgacgggagtctatggtgtcgtcaaaatcgtaaccaccggtctttttatggtagtggcgatcgagcagcttggccgcaagtggtgtctcatcactggcggcattgttcaagtattttgcctcttttggattgcaatctaccaggccgtccgtcccagcggaacgcctgttgacggtgtcggctacctgaccattgccatgatctatctctttgtagttggatatggtctcggatggtcttcggtcacttgggctgtaagtgcagaaattgcgccgaatcagcttcgtgcgttggccatgtcggcagctactatgagccagtggttcttcaactttgtcattgcactcatcacgcctcgggcgctcgaacacatcaagttcggcaccttcatccttttcgccgttgtcacatcggtcgcggtgctctgggcagcgtttttcctgcccgagactagcggtgtctctctggaactcatgcacagagtgttccaaggcaacatcatcactaggtcgatccaggatttgtcaccaaagaagagaaaggccttccgcgacaggttgatggctgaagcggatggtacgattgatcaaggaaccaacccaggtgtcaatcaagagcagaccgcctcggctgacgttgctacgctggacagggtgccgtcaaagcttcccaagggtggcgaggacggcatcctcaatacgtcggatgcggtctcgtctgacaacgaccatggcaagaggtga

SEQ ID NO: 97758 - protein, 601 aa, Ustilago maydis 521
MTRSNTDGSMTPSKQEGNLVSATHPPLAKRRFGSTSLTEDLQRHWRVYLLGICASFGGLLFGWDTGLIGGVLNMAAFQNDFGLKNNPSKLAALKGNIVSVLQAGCFFGAASSFYLPHRFGRRNAMLISAAVFLVGSIIQTTCRLHGQSATSALNQLYVGRVIGGFGVGLASSVVPTYLSECAPRSIRGRLAGMYQLLIVTGICIAYFVNYGMVQNYPDQHSSAMWQVPFALQCLPGFLFVVTLFFQPESPRWLVEQGRSEEAHRALARINRTPIDDPSVVAILQEIQNDLQGKQGLSIRQQVRMAFAERVTTYRVFTGALLMFFQQFTGTNSINYYSPQIFASLGVTGQSSGLLATGVYGVVKIVTTGLFMVVAIEQLGRKWCLITGGIVQVFCLFWIAIYQAVRPSGTPVDGVGYLTIAMIYLFVVGYGLGWSSVTWAVSAEIAPNQLRALAMSAATMSQWFFNFVIALITPRALEHIKFGTFILFAVVTSVAVLWAAFFLPETSGVSLELMHRVFQGNIITRSIQDLSPKKRKAFRDRLMAEADGTIDQGTNPGVNQEQTASADVATLDRVPSKLPKGGEDGILNTSDAVSSDNDHGKR

SEQ ID NO: 97759 - DNA, 1737 bp, Ustilago maydis 521
  CDS (1)..(1737)
atggctggagcagtgccagcagcttctccaggcggtgtcaccgtcggagagaccaagctctggtctcaagctaatgtccgcccgatcttcttctgtgccctcgccgtcatcggtgccatcctgtacggttacgatggtacctatttcaccggtattctcgagatggaccgcttcaagcgcgatttcggtgtcatcaacccagataatggccagtacgagattccttccaacgaccagtcgctctacgcttccatcgtacaagccggtgaagtggttggctccctcctcgctgctcccctgggtgactacgtcggtcgacgaggtggtttctttggtgcttgtactcttgttgcccttggcgttgtcctgcaactcgtcacggttggttccaaggcactcctcacgctcggtcgaggtgtgctgggtgccggtgtcggtgtcatctccaactgcacccccctctacctctccgaaattgctcccactgccatccgcggtgccatcgtctcgtcttggcagctcatgctcgccattggccaagtcatcggcgcctgcatcgctcagggaaccaaggacattgactcgacgtggtcgtaccgcatcccgatcattttcaatctcttttttgtagctgttcttgtcgcggctcagttcatcattcccgagtcgccacgatggctcatccagaagaaccgcgacgaaaaggcgctcgccgccctcaagcgtgtcaacaagggacagaaagacgatgtgcgcgacaaggtcattgctctcgagtacaatgcttttcggcaggcccgcgccgacgagctcgagctttccggtgaaggcggctggaaatcacttatgcacggcgtcgagctgcgcaagtttgcctgcgttctgggtattctgattggccagcagattggaggtgtacaatttatcttttcgtacactgtcacctttatgacggccgtcggactcaaggacgctttcattatcacgatcattgtcgatgtcattgaggtggtcggtgtcctgtgctcgttccttctggtcaaccgctttggccgccgaccgttgatcctatggacctcggtgcccatgtttatctctctctttgtcgtggctggtatcggcaccaagggtcttcctccgcgcggcgagtcgcttccttggccaggcgtcatcagcgtcaccgagggtcgcaccatcgctgctatgatctgcatctatgtgtttttcttcaacctggcttggggacctctggcttgggtcgtcgcttccgagctggctgtcggcaagaaccgcagcaagatcatgtcggttggcacggcttgcttctggatcattgcatgggctgtcaccttcacgttgccttacctcttctacaacgccggacttggtgctcagattggttggatctacggtgtcggtacgctgattgctatgacatttgtctacttttacattcccgagacgtttggtcgctcgctcgaagagatcaacgagatgctcgaggcgcgcgtcccaacgcgcaagtggaccacctacatgacgcagcaggaacgtgtgctcgtcgaccagagccgacatttggacgacgactcggcgctcggcaccaagccaagtaatgtttcattgactgcgtcgaatgcggatgacaagaagctcgatgctaaagatggctctggcgcaccttctcaggatcgaaacccaacgcgattggggacttctgatgtggatagtgtctag

SEQ ID NO: 97760 - protein, 578 aa, Ustilago maydis 521
MAGAVPAASPGGVTVGETKLWSQANVRPIFFCALAVIGAILYGYDGTYFTGILEMDRFKRDFGVINPDNGQYEIPSNDQSLYASIVQAGEVVGSLLAAPLGDYVGRRGGFFGACTLVALGVVLQLVTVGSKALLTLGRGVLGAGVGVISNCTPLYLSEIAPTAIRGAIVSSWQLMLAIGQVIGACIAQGTKDIDSTWSYRIPIIFNLFFVAVLVAAQFIIPESPRWLIQKNRDEKALAALKRVNKGQKDDVRDKVIALEYNAFRQARADELELSGEGGWKSLMHGVELRKFACVLGILIGQQIGGVQFIFSYTVTFMTAVGLKDAFIITIIVDVIEVVGVLCSFLLVNRFGRRPLILWTSVPMFISLFVVAGIGTKGLPPRGESLPWPGVISVTEGRTIAAMICIYVFFFNLAWGPLAWVVASELAVGKNRSKIMSVGTACFWIIAWAVTFTLPYLFYNAGLGAQIGWIYGVGTLIAMTFVYFYIPETFGRSLEEINEMLEARVPTRKWTTYMTQQERVLVDQSRHLDDDSALGTKPSNVSLTASNADDKKLDAKDGSGAPSQDRNPTRLGTSDVDSV

SEQ ID NO: 97761 - DNA, 1620 bp, Ustilago maydis 521; identical to SEQ ID NO: 97040
  CDS (1)..(1620)

SEQ ID NO: 97762 - protein, 539 aa, Ustilago maydis 521; identical to SEQ ID NO: 97041

SEQ ID NO: 97763 - DNA, 1914 bp, Ustilago maydis 521
  CDS (1)..(1914)
atggcacaaacaccgtccacatcatcccacgaggacatgtacaaaaatgaaaagatcgacctcaaagtcgttcaagccgacgaggtccacgtccaccaggtccagggctacgacgcccccgaaccttccaaaatgactcgccgtgcccagatcctcgccattaccatctgtgtaggaggtctactgtttgggtttgacataggcatcatttctggctgcttcatcatggatcccttcatcaaagtctttggcgattgcggtgctcaaggctgctctataccagaagggcgtatctcgatcatcaactcgtctctctcgatcggtacttttgtcggggctctccttcaagcgcccgtttctgacttctttggtcgtaagccttcgatgatcacctgggccaccacgttcaccgtcggcgccatcattcagaccgccacgatcagctcttggcatcaatttgccgtaggccgtgccgttgccggtcttggtattggtgctctttccggtctttgccctctctacctcggcgaaaccgcgcccaagcacatccgcggcaccatggtcactttctatcagcttctcatcatctttggcatcttcatctcctacggcgtctcgtgggccacacagaacttcaagacatcaaacgccagctggaagatccccgtcggtctccagctgctttggggcgttgccatgctctctctcatgaccttgcttccagagtcgcctcgctactgcctcaaaaacggtcaagtggaccgcgctcgcgagatcatggccaagatgcgtgatgtggtgctgcagccgatcaatggccagcctcgcggagacaagtggatggaagccgagcttgcagagatgaagcagggtatcgatgaggagaacaacatctttgccggtcgcagctacctgggctcttaccttgtctgcttttccgccaagaaccagatgtggaagcgtaccatcaacggaatgatgctccagactttgcagcagcttaacggtcagaacttctactactactacctgcctcttctcagctccaccctggcgcttccgctcgaccccttccagatccagtttatcctcggttctgcttcgctcgtcgctacgctccctgcactagttgctatcgaaaagctcggccgtcgcccgcttctcctcatcggagcggcttgtgaagcggcctgtgctttcatcgtcgctttcgtaggacactacaagaccgcacccaaggacacacctgcggacctcatcactgcatcgcaacaccaagcgggcgcagtatttatctcctttgcgatcatccatctgctcttctacagctgctgttggggtccaggtccttggctgtacctctccgagtcgttcaactcacctacaagagccaaagcaatttctctcgggtcggcgagtaactggctgttcaatttcctgctcagcttcttttcaaacaaggtcgcggcgcaatacgggccgttcatcatgctcatctttggctcagtgctcgtctttgcgtttgtctgggtatacttcatggtacctgaaacaaaaggcatctcactcgaagatgtcgaggtgctgtattccgagaacgtcaagccgtggaagtcggcagcttggatggccatcactcgtgactgtcgtcgtgaactgagcctctttgggaagcaggaggtgggcagccaaaccgtcgtccgtcgtccgtcgtgcgtcttttgcgcgctgcaactctggcggctttatgacccagtcgagcccagcgacacccaaagaacaatagtgacgataaaatacgcgtgtgggtttgcatgcgtcaaagaccgatcaaacccgttcaactacgcgaccatgtgctcgctaccaacgagcgtggcactcgtgactgtgtgcagtcgtcacgcttgttag

SEQ ID NO: 97764 - protein, 637 aa, Ustilago maydis 521
MAQTPSTSSHEDMYKNEKIDLKVVQADEVHVHQVQGYDAPEPSKMTRRAQILAITICVGGLLFGFDIGIISGCFIMDPFIKVFGDCGAQGCSIPEGRISIINSSLSIGTFVGALLQAPVSDFFGRKPSMITWATTFTVGAIIQTATISSWHQFAVGRAVAGLGIGALSGLCPLYLGETAPKHIRGTMVTFYQLLIIFGIFISYGVSWATQNFKTSNASWKIPVGLQLLWGVAMLSLMTLLPESPRYCLKNGQVDRAREIMAKMRDVVLQPINGQPRGDKWMEAELAEMKQGIDEENNIFAGRSYLGSYLVCFSAKNQMWKRTINGMMLQTLQQLNGQNFYYYYLPLLSSTLALPLDPFQIQFILGSASLVATLPALVAIEKLGRRPLLLIGAACEAACAFIVAFVGHYKTAPKDTPADLITASQHQAGAVFISFAIIHLLFYSCCWGPGPWLYLSESFNSPTRAKAISLGSASNWLFNFLLSFFSNKVAAQYGPFIMLIFGSVLVFAFVWVYFMVPETKGISLEDVEVLYSENVKPWKSAAWMAITRDCRRELSLFGKQEVGSQTVVRRPSCVFCALQLWRLYDPVEPSDTQRTIVTIKYACGFACVKDRSNPFNYATMCSLPTSVALVTVCSRHAC

SEQ ID NO: 97765 - DNA, 1605 bp, Ustilago maydis 521
  CDS (1)..(1605)
atggctggaggtgctgttgccgatgtcggctacacctcgactggccctgtggcccgccccgtcaacgtgaggcagtcgcttcctgctatcctggtcgctgctgcttccgctttcggcggtgttcttttcggttatgacactggtacaatttcgggtcttctcgtcatgaagaacttcaaggagacttttggtcagcttttgcccgacggaaaggttgacctcaccaccaacgacacttcgcttgttgtctcgattctttcggctggtaccttcgtcggtgcccttgccggtgctcctctatctgacatcctcggtcgtcgatggggtatgcaggtcgctcttttcgtcttcaccatcggtgtcgtcatgcagatggccaccactaacctagacgttttcatcggtggccgtgtcgttgccggtctcggtgtcggtatcctctccactattgtacccatgtaccagtccgagactgctccccgctggatccgtggtgcggttgtttccggctaccagtgggccatcaccatcggtctcctctgcgcctcgcttgccacctacggtaccaagaaccacgataactctggcgcgtggcgtattcccgtcggtattcagctcgccttcgccatcattctttgcatcttcttcacgattctccccgaatcgccccgttggctcgtcaagaagggtaaccacgaacgtgcctccaagtcgcttgcccgcctcaactcgactgacgttgacgaccccattgtccgctccgagctctcggtcatccagaccaacctcgacattgagctgacccactcgaccggctcttacctcgactgcttcaagaccaacgatcgaaagtacttgctccgatccctcaccggtatctttatccaggccttccagcagctcaccggtatcaacttcatcttctactttggcaccaagttcttcgagaccgctctccccggctctgaccccttcatcttctcggtcatctccaacgttgtcaatgtcgtttccaccatcccaggcatgtacatgatggagcgtctcggtcgtcgtaagctcctcatctggggtgccgtctggatgtgtctctgcgagctcattgttgccgttgtcggtaccgctgtccccaaggagaacacttcgggtggtaagaccgccgtcgctttcgtctgcatctacattgccggtttcgcctccacctggggtcctgctgcctgggtcgtttgcggtgagattttccctctcgccatccgcgccaaggctctctcgctctgcactgcctccaactggctctggaactttggtatcggctacgccaccccttacctcgtcgactctggtcgcggcaaggctggtctcggtgccaaagtgttcttcatctggaccggtacctgcgcctgctgtgccgtctttgcctacttccttatctacgagacccgtctgctctcgctcgaggaggtcgacgagatgtacgctcagaccaaccccatcaagtcgaccgctgccaacgccgagatccgcgctcgtcgctccgacctcgagggtgccgttgcccccgtcaaggaagacgagctggccacccacgacgagaaaaagtactaa

SEQ ID NO: 97766 - protein, 534 aa, Ustilago maydis 521
MAGGAVADVGYTSTGPVARPVNVRQSLPAILVAAASAFGGVLFGYDTGTISGLLVMKNFKETFGQLLPDGKVDLTTNDTSLVVSILSAGTFVGALAGAPLSDILGRRWGMQVALFVFTIGVVMQMATTNLDVFIGGRVVAGLGVGILSTIVPMYQSETAPRWIRGAVVSGYQWAITIGLLCASLATYGTKNHDNSGAWRIPVGIQLAFAIILCIFFTILPESPRWLVKKGNHERASKSLARLNSTDVDDPIVRSELSVIQTNLDIELTHSTGSYLDCFKTNDRKYLLRSLTGIFIQAFQQLTGINFIFYFGTKFFETALPGSDPFIFSVISNVVNVVSTIPGMYMMERLGRRKLLIWGAVWMCLCELIVAVVGTAVPKENTSGGKTAVAFVCIYIAGFASTWGPAAWVVCGEIFPLAIRAKALSLCTASNWLWNFGIGYATPYLVDSGRGKAGLGAKVFFIWTGTCACCAVFAYFLIYETRLLSLEEVDEMYAQTNPIKSTAANAEIRARRSDLEGAVAPVKEDELATHDEKKY

SEQ ID NO: 97767 - DNA, 1737 bp, Ustilago maydis 521
  CDS (1)..(1737)
atggttggcgttgctaccactcgtgaccacagtcatgtcgctcaagcgctggctgaccatcgtctgtcgatggtcggcgctacgggcgccaagggtctagttaagaatgcccgtacccttgctattgctgtgtttgcttcgatgggcggtctgatctacggctataaccagggcatgtttggtcaaatcttgagcatgcactcgtttagcgaggcaagtggtgtcaagggtatcaccaatcccacgctcgctggtttcatcactgccattctcgaactcggtgcttgggtcggtgtgttgatgaatggctacgtttccgacgctttcgggcgaagaaaatgcgttgtattcggcgttgtctggtttatcctcggtgccatcatccaagcttgcactcgcgacggctcctacaattatatcatcgctggacgaaccattaccggtgtcggtatcggctctctatcgatgattgtacctctttacaacgccgagttggcgcccccagagatccgtggctcgctcgttgcccttcagcagcaggccattgttgccggtgtcatgatcagctactggttcacctacggcaccaactacattggcggcactggcgccgcccagagtcgtgcagcctggttgattcccatcactgtgcagatcctccccgcactcatgctcgctatcggcatctttttcctgcccgagtcgcctcgttggctgatcaatgtcggacgcgaacaagaatcgctcaaggtgatcgccgaccttcgcagacttcccgagaacgacctcctcgttcagctcgagttcctcgaggtcaaggcccagaagctctttgaggatcgtgtctcggctcacgatcacccagatctccaggacggctcccgctcgagcaacttcaagctcggtgtcgcccagtacaagtcgctcgtcaccaacccggccaaccttcgacgcacgatagtagctgtcgttactatgttgtttcagcagtggtgcggtataaactttgtgctctactattcgccatttatcttcaaacagatcggtctcgagggcaacaccatctcgcttctcgcctcgggggtcgttggtatcgttctcttcctcgcaaccatacctgctgtgctctacatcgacacctggggacgcaagcctacgctctatgtcggatgcgccatcatgggcgcctgtcacttggctgtggccattatcattgctacctgcagtgacaactggcctgctcaccgtgctgctggttgggttgcctgcgtcttcgtctggatctttgccgctggcttcggtttctctttcggcccgatcggctggatcatcgttgccgaggtattccctcttggcttgagggctaaaggtgtgtccattggtgccgcttccaactggctcaacaattttgcggtggccatgtcgaccccggatttcatttctgccgctccgtacggcgtctttatcttccttggggttatgtgcttccttgcgattgcctatgtcaagttttttgttcccgagaccaagatgaagtcgctcgatgagctcgatgccgtctttggcgacaattcgggtcgatcgaaatgggaagctggcatgatgctccaagcccagcgcgatgttggcctcctccgtctagctggtatcgacgagggaaagatcagcgctgttacggctgatgacgcctctgacaaggacgagaaaagctccgacatcatcacatcgaccgtatga

SEQ ID NO: 97768 - protein, 578 aa, Ustilago maydis 521
MVGVATTRDHSHVAQALADHRLSMVGATGAKGLVKNARTLAIAVFASMGGLIYGYNQGMFGQILSMHSFSEASGVKGITNPTLAGFITAILELGAWVGVLMNGYVSDAFGRRKCVVFGVVWFILGAIIQACTRDGSYNYIIAGRTITGVGIGSLSMIVPLYNAELAPPEIRGSLVALQQQAIVAGVMISYWFTYGTNYIGGTGAAQSRAAWLIPITVQILPALMLAIGIFFLPESPRWLINVGREQESLKVIADLRRLPENDLLVQLEFLEVKAQKLFEDRVSAHDHPDLQDGSRSSNFKLGVAQYKSLVTNPANLRRTIVAVVTMLFQQWCGINFVLYYSPFIFKQIGLEGNTISLLASGVVGIVLFLATIPAVLYIDTWGRKPTLYVGCAIMGACHLAVAIIIATCSDNWPAHRAAGWVACVFVWIFAAGFGFSFGPIGWIIVAEVFPLGLRAKGVSIGAASNWLNNFAVAMSTPDFISAAPYGVFIFLGVMCFLAIAYVKFFVPETKMKSLDELDAVFGDNSGRSKWEAGMMLQAQRDVGLLRLAGIDEGKISAVTADDASDKDEKSSDIITSTV

SEQ ID NO: 97769 - DNA, 1638 bp, Cryptococcus neoformans var. neoformans B-3501A; identical to SEQ ID NO: 97042
  CDS (1)..(1638)

SEQ ID NO: 97770 - protein, 545 aa, Cryptococcus neoformans var. neoformans B-3501A; identical to SEQ ID NO: 97043

SEQ ID NO: 97771 - DNA, 1404 bp, Cryptococcus neoformans var. neoformans B-3501A
  CDS (1)..(1404)
atgaagagctcgatcatcttctgcttctttgctgccttcggcggctgggtattcggttacgatattggatacatctcaggatgtctgatcatgcctaactttatccaatacatgggagaacaagatcctaccacaggggaatggattctctcctcacagcggcaaagtatcatcacctctttgctgtccgccggtactttctttggcgctctcctgcaaagttttaccagtgacagacttggtagaaggggatcgatcatcttctggtccattatcttctctgttggaatcattatccaagtatcttccttcggtcttgctcagatcactgtcggtcgattcgtagccggtctcggtgtcggtgcactctcagctatcgtcccgctttacgtgggggaagcggcccccaagaaattgcgaggtgctcttctcgtattgtaccaagtccagatcgcatccggtctcttcttggcctacatcgtcgatcttggaacacatcacctcaagtcctcagcttcatggcgtattcctgttggtcttcagctcgtttggggtgcattcctaattgtcggcggtttactcctccctgaatcaccgcgtcttctgctcggtagaggtgacgagaaaggcgccctcaaggctatcgcgaggttaaatgactgtgaagtggacgatcccttgacgagagatgttatcaaggatttggaagaagccatcagggaggagaatgagggtggaaaggctggatggttagagtgtttcagcacgaggagtatgatgtggaagagaactctgaacggttgcatggtacaattcttgcagcaactcaacggacagaacttctactactactacggcccagtattctttgagagtgctgacgtccctctttctgcgtactctatccaagccattctcggcggtatctccctcgccacagtcatccccgccatgtggaccatcgagcaccttgggcgacgtaaatcactccttttcggcgccgctattcaagctgcctgtgccctcatcgccggcttggttggtcattactacaccgatgtggcgggtgtcaccgattccatggtcaagacgggtggtaacgttttaattgcgtttgctgtcattcatgtttccatgtacagtttgttctggggacctacaccctgggtcatcctgggcgagacttaccctctccgtgttcgaccaaaggcgattgctcttgctgctgctgttaactggctttggaatttccttctctcttacttctcgcctttgattgctgatgacatcggccctcttattctcttgatcttctttggatgtcttatcttcgctttcgtctacgtcttctttatgcttccagaggtgagtaaccttcgggacacattcaggttcacgcgttga

SEQ ID NO: 97772 - protein, 467 aa, Cryptococcus neoformans var. neoformans B-3501A
MKSSIIFCFFAAFGGWVFGYDIGYISGCLIMPNFIQYMGEQDPTTGEWILSSQRQSIITSLLSAGTFFGALLQSFTSDRLGRRGSIIFWSIIFSVGIIIQVSSFGLAQITVGRFVAGLGVGALSAIVPLYVGEAAPKKLRGALLVLYQVQIASGLFLAYIVDLGTHHLKSSASWRIPVGLQLVWGAFLIVGGLLLPESPRLLLGRGDEKGALKAIARLNDCEVDDPLTRDVIKDLEEAIREENEGGKAGWLECFSTRSMMWKRTLNGCMVQFLQQLNGQNFYYYYGPVFFESADVPLSAYSIQAILGGISLATVIPAMWTIEHLGRRKSLLFGAAIQAACALIAGLVGHYYTDVAGVTDSMVKTGGNVLIAFAVIHVSMYSLFWGPTPWVILGETYPLRVRPKAIALAAAVNWLWNFLLSYFSPLIADDIGPLILLIFFGCLIFAFVYVFFMLPEVSNLRDTFRFTR

SEQ ID NO: 97773 - DNA, 1590 bp, Cryptococcus neoformans var. neoformans B-3501A
  CDS (1)..(1590)
atgcctcttccaaagttagctgtgatcttaggagctttcgcttctttctctggtttcttattcggttacgacacgggttacatctcaggatgtaaggagatggaaacttttgttcgaacttttggtcttctccaacctgacgggacttatgtcttgagctcgggtagagactccttgataacttcaattttatctgtcggtacttgcttgggagccttatgtggctcaatggtcggggatcgtattggcagaagattcggtattgtgttttacatctgccttttcttcatcggggtagctttgcaaaccggatgtaaaaaccttgcaggattcgctatcggtcgggtattcgcaggtctgggtgtaggaggcacatcatgtttagtaccaatctatcaagccgaatgttcacccaaagcaatccgtggcttcgtcgttgctgcttatcaattcttcgtaaccgtcggattattggtagctgcgtgtgtggtttacgctacaaagggtcgtccagacaactcagcatacgagatccccattgctatacaattcgtctggggtgctctcatcatcggtggtatgtgcatcttacccgaatcaccaagatggttacttctcaaagataaacaagaccaagcgaaaaaaaatttatccagattactgggtcaagctgagaacagtcaagctgtaatcactgagtttgccgaaatctcagccaatttggaacatgaacgatcgctcggtaaaggtacctggatggattgcttcaaatacggtgaaagtaaaactaggctgagaatcttcaccggtatggcccttcaagcgttacagcaattgactggtgtaaatttcatcttctactacggaacgacctttttctccaattcgggtatatcaaaccctttcctaactacaatcgccacaaacgtagtcaacgtaggaatgagtgttcctgggatgctcgctgctgataggatcggccgaaggcccttgatgatgtacggtgcagcaggtatggcagtatctcaacttatcgtcgctgccgtgggtgtggctgtcgacacttccaaccaagctggacaaaaagccctggtcgcttttgtctgtatctatatcgctcatttcgcttctacatggggtatcctggcttgggtcatcacgagtgagatttacccttacgagttgagaggtaaaggtatgagtttgtctactgctacccagtggttattcaactttgctattggctacgcaacaccttacctcgttgatgttgctccaggaagtgcaggtttgaaaaccaacgtcttctggatctggggtggctgctgttgtatcgctttcgtattcgcttatttcttcattcctgagacaaaagagctctccttggagcaatgtgatttgctctatcgaaactctaccgtactcaaatcagccgcctatcgaagacagatcctcgagcatgatatgcacgatgatgagattgcgcattacgactctaacaaaatgcccagaacggagcatgttgaagattcaaaagctgtggaggatgtgaaagcgcaacaaagtcaattggacgagtgggacgcgtga

SEQ ID NO: 97774 - protein, 529 aa, Cryptococcus neoformans var. neoformans B-3501A
MPLPKLAVILGAFASFSGFLFGYDTGYISGCKEMETFVRTFGLLQPDGTYVLSSGRDSLITSILSVGTCLGALCGSMVGDRIGRRFGIVFYICLFFIGVALQTGCKNLAGFAIGRVFAGLGVGGTSCLVPIYQAECSPKAIRGFVVAAYQFFVTVGLLVAACVVYATKGRPDNSAYEIPIAIQFVWGALIIGGMCILPESPRWLLLKDKQDQAKKNLSRLLGQAENSQAVITEFAEISANLEHERSLGKGTWMDCFKYGESKTRLRIFTGMALQALQQLTGVNFIFYYGTTFFSNSGISNPFLTTIATNVVNVGMSVPGMLAADRIGRRPLMMYGAAGMAVSQLIVAAVGVAVDTSNQAGQKALVAFVCIYIAHFASTWGILAWVITSEIYPYELRGKGMSLSTATQWLFNFAIGYATPYLVDVAPGSAGLKTNVFWIWGGCCCIAFVFAYFFIPETKELSLEQCDLLYRNSTVLKSAAYRRQILEHDMHDDEIAHYDSNKMPRTEHVEDSKAVEDVKAQQSQLDEWDA

SEQ ID NO: 97775 - DNA, 1563 bp, Cryptococcus neoformans var. neoformans B-3501A
  CDS (1)..(1563)
atggctcccaggagttccaagaaggctttgaccctctgtcttttccagagtttggcgggtgttattttcggatggagtaactctgaaggttctggtctgttctccatgtcaaagtaccaagaacgattcggtgaatgtatcgacggcgtttgcaccctttcaactactcgacaatctgccattaccggtcttttgtctgtcggcgccgtcattggtgctgttggttctggttctatcgctgaccgattcggtttgcgattgacctgtatggttttcatcttcatctacctttgtggtgctgccatcgagacttctgcctttaacacctatggtcaactatgcgtggctcgtcttctcaccggtctcggtgtcggtgctacttctggtcttgttcccgttttccaggctgaggcttctcctcctcgataccgaggtctcgtcactggttctttccagctttgtgttactcttggtatctggggtgttgccatgaccaactggggtatgagctcttatgccggtgatgtctcatggcgaatccccgtatctcttcaaatggtctgggctgctttgttgctcgtcggtttcctcttttcccctgagtctcctcgattccttgccaagaagggcagatgggaccactgccgaaagaaccttgccaatctccgtggtcttcctactgatcaccctgacatcgataccgagatggaagaagtccgtgaggctaccatcaaagaccaggagcgcggtcaggccagctatgtcgaatgtttctctaccaaggaccgaattctctggcgaactatgatcggtatctgtgtccaaattggccagcaaatcaccggtatcaacttcttcttctcttacggtgtccagttcgcccagactgccggtcttgacgacacctacgtcttccagatcattctcgcttccgtcaacgtcgttttctctttccccggtattcttgctgtcgaccgagcgggtcgacgacctatcctcctcattggtggcattctcatgtttattggtcagattgttgtcggtgctgtctccaaggcctaccctgatgacaagattgccggtgatgttctcattgccttcacctgtcttttcattgcctctttcgcgtcttcttggggtcccattgcctgggttgtctgcggtgagactttccccattaggttgtcttctaggtgtgtcaccctcggtaccggtgccaactggctcttcaacctcatcatcgcctttgccgctcctcagattcaggcccgaatcggtactggtatcacttttgtttgggccggttgtctcgctctcgctatctcttttgccttcttctgcattcccgagacgagatcgatgagtatcgaggcgattgacgccctctatctctcccacaccccagcttggcgatctcataagtttgtcgacgagcagctcacgaggactcaaaacgcgcaagagaagcactactctcgatctatccacgccgagaacgagcaggtcaagtctagccagcagactagcgcccgaacgagtgctgaggacggcaggatggtctaa

SEQ ID NO: 97776 - protein, 520 aa, Cryptococcus neoformans var. neoformans B-3501A
MAPRSSKKALTLCLFQSLAGVIFGWSNSEGSGLFSMSKYQERFGECIDGVCTLSTTRQSAITGLLSVGAVIGAVGSGSIADRFGLRLTCMVFIFIYLCGAAIETSAFNTYGQLCVARLLTGLGVGATSGLVPVFQAEASPPRYRGLVTGSFQLCVTLGIWGVAMTNWGMSSYAGDVSWRIPVSLQMVWAALLLVGFLFSPESPRFLAKKGRWDHCRKNLANLRGLPTDHPDIDTEMEEVREATIKDQERGQASYVECFSTKDRILWRTMIGICVQIGQQITGINFFFSYGVQFAQTAGLDDTYVFQIILASVNVVFSFPGILAVDRAGRRPILLIGGILMFIGQIVVGAVSKAYPDDKIAGDVLIAFTCLFIASFASSWGPIAWVVCGETFPIRLSSRCVTLGTGANWLFNLIIAFAAPQIQARIGTGITFVWAGCLALAISFAFFCIPETRSMSIEAIDALYLSHTPAWRSHKFVDEQLTRTQNAQEKHYSRSIHAENEQVKSSQQTSARTSAEDGRMV

SEQ ID NO: 97777 - DNA, 1668 bp, Cryptococcus neoformans var. neoformans B-3501A
  CDS (1)..(1668)
atgatatcagtgcctggtggtcctggcgtcctctcggcgcctctcagccccgagcgggtggaggctcctgtgactgttaaggcttatctcctttgtgtctttgcctctttcggtggtatctttttcggcttcgattctggttacatgaacggcgtgttgggtatgaattacttcatcaacatgatgacgggtcttcctattcctggcgccgatgcggatcaggcgaccaaagatgccttcactctgccagcttgggagaagtctttgatcacttccattctttctgccggaacgttctttggtgcgatcatcgctggtgaccttgccgactacttcggtcgaaggattactatcgtttctggttgttgtgtatttatcgttggttgctgtctgcagactgcttcaactggcctcggcttgctggtggccggtcgtctcatcgctgggtttggtgtcggtttcatttcagcgatcatcattctctacatgtcggagatcgctcctcgaaaggttcgaggtgctattgtctcgggttaccagttttgcatcactattggtcttcttctttcctcttgtgtatgttacgcaactcagaaccggaccgatagcgggtcataccgtatccccatcgccattcagtttgcctgggctcttatcctcggtggtggtctccttttgcttccagagtctcctcgttggtatgtcaaggccggcaagatcgaacaggcaagaaaggcactgtctcgagtccgaggtcaacctgtggactctgattacatcaaggatgaaatcgccgaaattgtggccaatcacgagtacgagactgagcttactcccaatgtgacttacctctcctcttgggctgcctgtttcactggtggtattcgcaaccctggttctaaccttcgtcgaacccttctcggtatttccatgcaaatgatgcagcaatggactggtgtcaacttcatcttctactttggaaccaccttcttcaccgaccttgggactatctcgaaccccttcttgatttctctcatcactactttagtcaacgtctgctccacacctgtgtccttctggactatcgagcgatttggtcgacgaccccttcttatctatggtgccctcggtatgcttatctgcgagttcattgtcggtatcatcggtgtcgccaagcctggagacactacagtcgttaaggtgcagatctccttcatttgcatttacgtcttcttcttcgcgtcaacttggggtccaggcgcttgggtttctattggtgaaattttcccattgcctatcagagcgcgaggtgttggtctctccaccgcctctaactggctatggaactgtattatcgccgtcattactccttatcttgttggaactgacgaggctaacctcggttcaaaagtctttttcctttggggttcaacctgtattctctgctttatctacgcctatctctttgtatgggagaccaagggcctcactctggaacaggttgataggatgatggaagaatgcgggagccccagacgctcagcgggttggaaaccccataccacgtttgcagctgaagctgcccagggtacacatgggcttgaccagaatgagaaagcgaaagttggacctgtgttatcacagtcagagatgttggagcaagtttaa

SEQ ID NO: 97778 - protein, 555 aa, Cryptococcus neoformans var. neoformans B-3501A
MISVPGGPGVLSAPLSPERVEAPVTVKAYLLCVFASFGGIFFGFDSGYMNGVLGMNYFINMMTGLPIPGADADQATKDAFTLPAWEKSLITSILSAGTFFGAIIAGDLADYFGRRITIVSGCCVFIVGCCLQTASTGLGLLVAGRLIAGFGVGFISAIIILYMSEIAPRKVRGAIVSGYQFCITIGLLLSSCVCYATQNRTDSGSYRIPIAIQFAWALILGGGLLLLPESPRWYVKAGKIEQARKALSRVRGQPVDSDYIKDEIAEIVANHEYETELTPNVTYLSSWAACFTGGIRNPGSNLRRTLLGISMQMMQQWTGVNFIFYFGTTFFTDLGTISNPFLISLITTLVNVCSTPVSFWTIERFGRRPLLIYGALGMLICEFIVGIIGVAKPGDTTVVKVQISFICIYVFFFASTWGPGAWVSIGEIFPLPIRARGVGLSTASNWLWNCIIAVITPYLVGTDEANLGSKVFFLWGSTCILCFIYAYLFVWETKGLTLEQVDRMMEECGSPRRSAGWKPHTTFAAEAAQGTHGLDQNEKAKVGPVLSQSEMLEQV

SEQ ID NO: 97779 - DNA, 1449 bp, Bacteroides fragilis NCTC 9343
  CDS (1)..(1449): transl_table=11
atgaatcataccaacgagggtagcaagctctacctgtattccattacatcggtagccatcctgggcggattgctgttcggctatgataccgctgtaatttcaggagctgagaaagggctcgaagccttcttcctcacagccacagattttcaatacgacaaagtgatgcacggcatcacctcctcgagtgcactgatcggttgcgtcttgggtggtgcattgtccggcatcttcgcttcacggctggggcgccgcaactcactacggctggccgccgtacttttcttcctttcggcactggggtcttattatcctgaattcctgttctttgaatatgggaaggctaatatgaacttgcttatcacctttaatctctaccgcattctgggaggcatcggagtgggactggcgtccgctgtttgtcccatgtatattgccgagatagctccctccaacattcgcggtacactggtgtcatgcaatcagtttgccataatcttcggcatgcttgtggtttactttgtaaactacctgatcttgggcgaccaccagaatcctgttatcctgaaagatgctgctggcacactttctgtaagtagtgagtcggatatgtggaccgttaccgaagggtggcgctatatgttcggttccgaagcctttccggcagctttcttcggcatgttactcttcttcgtacccaaaactccccgttatctggtaatgattgatcaggatcagaaggcttattccattctcaaaaaagtgaatggagccacaaaagcacaagagattcttgccgaaataaaagccacttcgcaggaaaagacagagaagctgttcacctacggtgcggcggtgattgttatcggtattctgctttctgtcttccagcaagccatcggcatcaacgccgtgctctattatgcgccgcgaatattcgaaaatgccggtgccgaaggcggaggaatgatgcaaaccgtcatcatgggcattgtcaatatcgtctttacactgatagctattttcaccgtcgaccgtttcggacgaaaaccgttgcttatcatcggttccgtcggtatggctgtcggagcctttgcagtcgccttgtgtgacagtatgggtatcaaggggatacttcccgtactgtcggtcattgtatatgcagctttcttcatgatgtcatggggacccatctgttgggtactgatatccgaaatctttcccaacaccatccgtggcaaagcggtggccattgctgtggcatttcaatggatattcaactacattgtttcatctacgttccccgcgctctatgatttcagtccgatgtttgcctacagtctttacggaatcatttgtgtgattgccgccctcttcgtatggcgttgggtgccggaaaccaaaggaaaaacattggaggatatgagcaaactttggaagaagcgttaa

SEQ ID NO: 97780 - protein, 482 aa, Bacteroides fragilis NCTC 9343
MNHTNEGSKLYLYSITSVAILGGLLFGYDTAVISGAEKGLEAFFLTATDFQYDKVMHGITSSSALIGCVLGGALSGIFASRLGRRNSLRLAAVLFFLSALGSYYPEFLFFEYGKANMNLLITFNLYRILGGIGVGLASAVCPMYIAEIAPSNIRGTLVSCNQFAIIFGMLVVYFVNYLILGDHQNPVILKDAAGTLSVSSESDMWTVTEGWRYMFGSEAFPAAFFGMLLFFVPKTPRYLVMIDQDQKAYSILKKVNGATKAQEILAEIKATSQEKTEKLFTYGAAVIVIGILLSVFQQAIGINAVLYYAPRIFENAGAEGGGMMQTVIMGIVNIVFTLIAIFTVDRFGRKPLLIIGSVGMAVGAFAVALCDSMGIKGILPVLSVIVYAAFFMMSWGPICWVLISEIFPNTIRGKAVAIAVAFQWIFNYIVSSTFPALYDFSPMFAYSLYGIICVIAALFVWRWVPETKGKTLEDMSKLWKKR

SEQ ID NO: 97781 - DNA, 1383 bp, Pediococcus pentosaceus ATCC 25745
  CDS (1)..(1383): transl_table=11
atgaacgctaataaaaaaagaattagtccatatgtaatattgatttcctgtgcagccgctttgggaggacttctgtttggatatgatacagcagttatttcaggagctgttgggttcttacagataaagtttactttgagtagcgcgcaagttggatgggttacgtcttgtatcttaattggatgcgcactaggtgtttcgattgcaggtattttaagtgatttatttggacgcaagaaaatattggcgctttctgcagttatttttgcactttcttctttaggtgctgctttcgcaggaagttatatgattttagtgatttggagaatgcttgcaggtattggtataggattgacttccttaataacacctttatatattgcagaaatggcaccgtcaaatgtgcgtggaaaattggtatccgttaatcaattagctatcacgattggaatttttattgtctattttgttaatgcagcaattgcgtcaaatgcaacgcaattatggaatgtttcaacaggatggagatggatgatgggggttggagtaataccatcgttattatttttaattgcattgatcccggctggtgaaagtccacgttggttatcacaacacggaaaatctgaggctgcttataaagtattacaaaaagttgaaataagtgatgaggctgcagaaaagagcttagaagaaattcagatgtctgaggaagttgttgatgatacaaaatttagagatttatttaataagacttggttaccagtacttattattggagtattgttagccttgttccagcaattttctggaagtaatgcaataatgtattatgctcctgaaatatttaagggtgcaggatttggacaaagtggtgcattcatggctactgtatcaatcggagtaattaatatggtaatcaccattgtcgcattaggtttagtagacaagataggccgtaaaaagttattaggatggggatcttttgcgatgtcatgttgtttacttgttgtttcaatttgtttctttgtacatgctgctactagcataacattgacttttgttttattagcaattgccgcatacgcagtttctttagctcctgtaacgtggatactaatttcagaaatttttccattaaaaatcagaggtagagcaatgtcaatttgtacggcagttttatggctaagtgattttaccttaagttataccttcccaattctgactcagaatataggagaaggatggacttttatgctttatgtagtagttactgcattgtcggctatatttgtatggaaattagttccagaaacaagaggtaagtctttagaggaaatcgaagtatattggcatgctaaaagtaaaacccatgttaaataa

SEQ ID NO: 97782 - protein, 460 aa, Pediococcus pentosaceus ATCC 25745
MNANKKRISPYVILISCAAALGGLLFGYDTAVISGAVGFLQIKFTLSSAQVGWVTSCILIGCALGVSIAGILSDLFGRKKILALSAVIFALSSLGAAFAGSYMILVIWRMLAGIGIGLTSLITPLYIAEMAPSNVRGKLVSVNQLAITIGIFIVYFVNAAIASNATQLWNVSTGWRWMMGVGVIPSLLFLIALIPAGESPRWLSQHGKSEAAYKVLQKVEISDEAAEKSLEEIQMSEEVVDDTKFRDLFNKTWLPVLIIGVLLALFQQFSGSNAIMYYAPEIFKGAGFGQSGAFMATVSIGVINMVITIVALGLVDKIGRKKLLGWGSFAMSCCLLVVSICFFVHAATSITLTFVLLAIAAYAVSLAPVTWILISEIFPLKIRGRAMSICTAVLWLSDFTLSYTFPILTQNIGEGWTFMLYVVVTALSAIFVWKLVPETRGKSLEEIEVYWHAKSKTHVK

SEQ ID NO: 97783 - DNA, 1395 bp, Oenococcus oeni PSU-1
  CDS (1)..(1395): transl_table=11
ttgaaacaagctattgagacaattccagcgaataaaaaattaaaatatataaagaaaattgccattttagccacttttggagcttttttgttcggttacgatacgggagtcattaatggctctctttcttttatggctcgaggcgatgagcttaatctctctccgtttatggagggactggtcaccagctctttgttatttggagcggcaattggggccgttatttggggccgtttggctgatagatacggtcgtaaatcaattttacgtgtcttggcgataattttctttttttctacacttggttcttctatcgcaccgaattcatacgttttgattattggcagattgttcatgggtctagcagttggcggagttgccggaattgtgccggtctatttgggagaaatggcaccatccaatattcgtggaagcctggtatgccaagatcaaatgatgattgttttaggacaattactggcttatgtcatgaatggcattttgggaaacgcctttaatgtttcctatatctggcgttttatgattgcactggcagcgattcctgcgattatcctctggatagggacttatattattcccgagacgccccgttggttggcaatcgagaaaaaaagtgatcaggctttagtcgttcttagaaataccagagacgataaaactgctgatcaggatttaaagcatattgaacaaaacattaaaaaagaaagttcaagagggcatgcgagcctgcacgattttcacactccttggattaaaagaattttaattattggaattacgattgcggtaatgcaacaactggccggtatcaatatcatgatgtattatggaacgaccattttggaaaaaacgggtttcagcacgaaggcagctttgattgccaatatcggtaacggagttctatctgttttgggtaccactatatatatgttcttccttgctaaccgaattaaacgtcgacttgcttggattggcggcttctgtttcacgacgactatattagctgccattgcgattttgagtcactatgctgctggactttcgattttgccttatattgttatcacctgtacgatgctgtttgtctttgttgatcaaatgactcttggaccggtttgctggctgcttttatccgagatttttccattgcatgtgcgtggattgggggtcggaattgcgactttcggcatgtggataatggacttcggcgttggcttctttttcccgattttaattgagatctttggtttatcaaatactttttggatttttgccgtgatcggtgtgatttgcataattatttctttctttattattccagaaacatccggaagaagcttggaacagttggaagattcattccgtcgttcataa

SEQ ID NO: 97784 - protein, 464 aa, Oenococcus oeni PSU-1
MKQAIETIPANKKLKYIKKIAILATFGAFLFGYDTGVINGSLSFMARGDELNLSPFMEGLVTSSLLFGAAIGAVIWGRLADRYGRKSILRVLAIIFFFSTLGSSIAPNSYVLIIGRLFMGLAVGGVAGIVPVYLGEMAPSNIRGSLVCQDQMMIVLGQLLAYVMNGILGNAFNVSYIWRFMIALAAIPAIILWIGTYIIPETPRWLAIEKKSDQALVVLRNTRDDKTADQDLKHIEQNIKKESSRGHASLHDFHTPWIKRILIIGITIAVMQQLAGINIMMYYGTTILEKTGFSTKAALIANIGNGVLSVLGTTIYMFFLANRIKRRLAWIGGFCFTTTILAAIAILSHYAAGLSILPYIVITCTMLFVFVDQMTLGPVCWLLLSEIFPLHVRGLGVGIATFGMWIMDFGVGFFFPILIEIFGLSNTFWIFAVIGVICIIISFFIIPETSGRSLEQLEDSFRRS

SEQ ID NO: 97785 - DNA, 1551 bp, Bifidobacterium longum DJO10A; identical to SEQ ID NO: 97052
  CDS (1)..(1551): transl_table=11

SEQ ID NO: 97786 - protein, 516 aa, Bifidobacterium longum DJO10A; identical to SEQ ID NO: 97053

SEQ ID NO: 97787 - DNA, 1446 bp, marine gamma proteobacterium HTCC2143
  CDS (1)..(1446): transl_table=11
atgagtactgcagcatcggttcataaaagcgcgcttaaacagcagcgcaccacgctacaaattacccttgtggctgccttgggggggcttctatttggctacgacaccggcgttattgccggtagtcagctgtactttaccgaatattttaactttaccgctgccgaacaaggctgggcggttagcagtgcgctatacggctgtctgatgggtgccttggctgggggttatctggctaaccgcatcagtcggaaatataccttgattcttggcgcggtgctttttgttgtttcggcgtggggttctgggttcgctgacacgttggatcaattagtgatctaccgcattcttggcggcttaggcgtcggcttagcctcactggctgcgcctatgtatatcgctgaaatatcacccgctaaaaatcgcgggcgcatggtgtcctattaccagttggcggtggttattggtttttttgtggtttttttggcgacctactttatcggcggtggcgacacgcagaacatggcaactgagaggcttgcattgctccatgagcacaacgtgacgcagggctggcgagtgatgttctggtcagaattattgcccgctacggccttttttctgttgttgttcacggtgccgcacagtccgcgctggttgatgctgaaaggtcgtactgacgaggccgaagcggtgcttgctcgcatcacctcaagccctcaggaagccgcctcagaattatccgatatccgggcgtcgctggagaatcggtcgtcgccgaatctaacggtactgtttaccaagggcattggtttcgcgctatttcttggtgtcatgttatcgatttttcaacaggtgaccggtattaatgcgattctctactatggtgcggagatatttagtaacgccctaggctatggcccagaagatgcgcttaaacagcagttgtggctcggtgcggttaatttactcttcacctttgttgccatttataaaattgatagttggggtcgcaagccgttgtttattgccggtgctgtcggcatgtgtgtgggtttaagtattttgggtttgagcatttatgtgcaacagatgggcattatttcgctgttggcagtgttgctctttgttggctcatttgccatgtcgatggggccagtggtctgggtcatattatcggaaatgtttcccaataatgtacgcagtgtggcaatgtcgatcgccgtagcggcgcagtggttatttaacgcgttggtcgctaatagctttccgttggtgaatcaaagtgcgctaaatcaggatggttttaacggtgcactgccctattttatctttgccggattttgtgttgttgcaatgatttttgtttggaagctcgttcctgagaccaagggtaaaacgctggaggaaatggaggcgctttggtcaataaaagacaagggttga

SEQ ID NO: 97788 - protein, 481 aa, marine gamma proteobacterium HTCC2143
MSTAASVHKSALKQQRTTLQITLVAALGGLLFGYDTGVIAGSQLYFTEYFNFTAAEQGWAVSSALYGCLMGALAGGYLANRISRKYTLILGAVLFVVSAWGSGFADTLDQLVIYRILGGLGVGLASLAAPMYIAEISPAKNRGRMVSYYQLAVVIGFFVVFLATYFIGGGDTQNMATERLALLHEHNVTQGWRVMFWSELLPATAFFLLLFTVPHSPRWLMLKGRTDEAEAVLARITSSPQEAASELSDIRASLENRSSPNLTVLFTKGIGFALFLGVMLSIFQQVTGINAILYYGAEIFSNALGYGPEDALKQQLWLGAVNLLFTFVAIYKIDSWGRKPLFIAGAVGMCVGLSILGLSIYVQQMGIISLLAVLLFVGSFAMSMGPVVWVILSEMFPNNVRSVAMSIAVAAQWLFNALVANSFPLVNQSALNQDGFNGALPYFIFAGFCVVAMIFVWKLVPETKGKTLEEMEALWSIKDKG

SEQ ID NO: 97789 - DNA, 1536 bp, Ananas comosus
  CDS (1)..(1536)
atgacgatcgatttctcgatgccagggagttcggggattttggattccccagcaaagagggacatgtccttcttcagtaatgggtatgtgctagggctcacagttaccgcggggatcggtgggttgctttttgggtatgatacaggtgtgatatctggagcacttctatatatccgcgatgattttaaggcagtcaatgacaattatgtcttacaagaaacaattgtaagtatggcattagttggagccatgatcggggccgcggggggtggatgggtaaatgatgcttatgggcgcaagaaggctacccttcttgctgatgtggtcttcactgttggatcgcttatcatgtgtgccgcacctgacccatatgttctcattcttgggagactcctcgtcggtttgggggtgggaatagcgtcagttacggccccagtttatatcgcagaagctgcaccgtcagaaattagaggagggttagtggctactaatgtgctcatgatcaccggcgggcagttcctctcttaccttgtaaatcttgctttcactgaggtttctgggacgtggcgttggatgcttggagtcgctgcgataccagcaatcatacaattcattctgatgctctttcttcccgaatcacctcgctggctctacaggaagaatgagaaagctagggctatcgaggtcctctcgaagatctacgaccccgaccggttagaggaggagatcgatcttcttgctgtttcctctctcgatgatcggtccaagaaatcggtcagttatctcgatgtgttccggtcaaaggaaataaggctcgcatttttcgcaggagccggccttcaggcgttccagcaattcacggggatcaacacggtcatgtactacagcccgacgatcgtccagatggcgggcttctcctccaaccagctcgccctcctcctctccctcatcgtcgcggccatgaacgctgtgggcactgtcgtcggcatacttctcatagaccgcgccggccgccgccgcctcgccctcaccagcctctccggcgtcacgctctccctcctcatcctctccgcagccttcttcctccaatcctccgatctcacgtccgccttatgtggctcggctgctctacacacctccaccgcgtgcgggaaccgcctcgggtggttcgcggtggccggcctggctttatacatcgccgccttctcgcccggcatggggcccatcccgtgggcggtgaactcagagatctaccccgaagcgtaccgcggggtgtgcggggggatgtccgcgaccgtcaactgggtctcgaacctgatcgtcgcgcagatcttcctttccgtcgtggcggtgctggggacggcggcgacgtttctaatcatcgccggggtggccgtgctcgctttcgtcttcgtgctcctcttcgtgccggagacgaagggccggacctttgagcaggttgagcggatgtggaaggagcgggcgtgggggagcccgttgggcagccgcgagagcctcctcgacggcgcggcttga

SEQ ID NO: 97790 - protein, 511 aa, Ananas comosus
MTIDFSMPGSSGILDSPAKRDMSFFSNGYVLGLTVTAGIGGLLFGYDTGVISGALLYIRDDFKAVNDNYVLQETIVSMALVGAMIGAAGGGWVNDAYGRKKATLLADVVFTVGSLIMCAAPDPYVLILGRLLVGLGVGIASVTAPVYIAEAAPSEIRGGLVATNVLMITGGQFLSYLVNLAFTEVSGTWRWMLGVAAIPAIIQFILMLFLPESPRWLYRKNEKARAIEVLSKIYDPDRLEEEIDLLAVSSLDDRSKKSVSYLDVFRSKEIRLAFFAGAGLQAFQQFTGINTVMYYSPTIVQMAGFSSNQLALLLSLIVAAMNAVGTVVGILLIDRAGRRRLALTSLSGVTLSLLILSAAFFLQSSDLTSALCGSAALHTSTACGNRLGWFAVAGLALYIAAFSPGMGPIPWAVNSEIYPEAYRGVCGGMSATVNWVSNLIVAQIFLSVVAVLGTAATFLIIAGVAVLAFVFVLLFVPETKGRTFEQVERMWKERAWGSPLGSRESLLDGAA

SEQ ID NO: 97791 - DNA, 1422 bp, Bacillus megaterium
  CDS (1)..(1422): transl_table=11
atgaaacaaaatcgaaactcattatatattttttctattaccttagttgccgctatcggagggttactgtttggatatgacacagctgtaatatctggagctgaagaatcattaaaggtgtatcttattgacagcttagggttaggatctttagcacacggtgttactgtatcaagtgctttaataggatgtattattggaggattggtatctggttattttgcgacgaaactaggacgcaaacaatcacttatactagcagctattctttttatagtctcagcgttaggagcttcttatcctgagtttttatttttcacaaaaggggaaccgacactctctttgttactagcttttaacttctaccgcattataggtgggattggggttggcttagcatcagccatttgtcccatctatataggagaaattgcaccggcagatattcgcggcagattggtatcgttcaatcaatttatgattatttttggaatgttagtcgtttacttcgtgaattggggtattgcaaatggggaaaccttagaatggattaatgatgtaggttggagatacatgtttgcttcaggagctattccagctttactctttgcagcactcttgtttttagttcctgaaacgcctcgctacttagctatacagaatcaagatcaaaaagctttagccatactaactaaaattaatggatcttcagaagcgaaagcaattttagaagatattaaacaaacaatttctaccaatgtttcgtctgaaaaattattggcatatggaaaattagttatcgttgtaggtatactgctttctgtatttcaacagtttgtaggaatcaatgtagctctatattatgctccgcgtatttttgaaagcatgggagcagctaaaggttcttctatgctgcaaaccattattatgggattagtaaacgttatttttacagtaattgcaattttgacagttgatcggttgggaagaaaacctttattaataacagggtctatcggaatggccattggaatgttcggtgtagcaagcatggctttttcaaacatcattggtatagggacgcttgtatttatcattatttatacagcttcctttatgatgtcatggggaccaatttgttgggtgctcatttcagagatttttcctaataaaattagaggtcgtgctgtagctattgccgtagctgctcagtgggcggctaactattttatttcctctacatatcccgtgatgatggaatatagcggaggattaacatatggtttttacggtttaatgagtgtactttctgctttatttgtctggaaatttgttcctgaaacgaaaggtagaactctcgaacaaatggaaaatatgtggaggaaaaaacaaggggcttcaaagagtaagaaggccatataa

SEQ ID NO: 97792 - protein, 473 aa, Bacillus megaterium
MKQNRNSLYIFSITLVAAIGGLLFGYDTAVISGAEESLKVYLIDSLGLGSLAHGVTVSSALIGCIIGGLVSGYFATKLGRKQSLILAAILFIVSALGASYPEFLFFTKGEPTLSLLLAFNFYRIIGGIGVGLASAICPIYIGEIAPADIRGRLVSFNQFMIIFGMLVVYFVNWGIANGETLEWINDVGWRYMFASGAIPALLFAALLFLVPETPRYLAIQNQDQKALAILTKINGSSEAKAILEDIKQTISTNVSSEKLLAYGKLVIVVGILLSVFQQFVGINVALYYAPRIFESMGAAKGSSMLQTIIMGLVNVIFTVIAILTVDRLGRKPLLITGSIGMAIGMFGVASMAFSNIIGIGTLVFIIIYTASFMMSWGPICWVLISEIFPNKIRGRAVAIAVAAQWAANYFISSTYPVMMEYSGGLTYGFYGLMSVLSALFVWKFVPETKGRTLEQMENMWRKKQGASKSKKAI

SEQ ID NO: 97793 - DNA, 1563 bp, Amanita muscaria
  CDS (1)..(1563)
atgcctccagctgctacggggaatggcggcatagatcccaaaaacaaatttactggcatagccatgacagcattcagtgcttttggtggtatcctctacggttacgacactggcattatcagcggtatccttgcgatggacgatttcaagcgtacctttggtcaacaggcttctgatggcacatgttcccttccgctctcaagccaatccctgtttgtctctattctctcagctggaaccttcgtcggagctctctttggtgctcccatgggtgacattatcggcagaaaatggggtatcgtcatagctgctgcgatattctcgatcggtattgccttgcaaacagcctcagtaacggcagctcccttcgtcgttggtcgtgtcttcgccggtcttggtgtcggtctggtttcttgcctggttcctatgtatcagtccgaatgctcaccaaaatggatccgcggtgccgtagtatcattgtaccaatgggccattacgattggaatcttgcttgctgccgtcatcaacaacgccacccaaggccgtagcaaccactctgcctatcaaatccccatttctattcagtttgtctgggcatttatccttgggtttggcatgatgcttttgccggaatccccccgttttctcgttaggcaaggtcgcgacgaagatgctgccctgtccttgtcccgtcttacgaggctctcgcctgatgaccccgttgtcagaaatgaattggccgagattcgcaccaattttgaggctgaactggccctcggtgaaagctcgtacttggattgcttcagaccctcgcacaacaaaattttgttgcgtaccctgactggtattttcattcaagcttggcaacaacttacgggcatcaactttattttctactatggtacacaatacttccagaacgctggcatcaatcaagcattcctcattaccattgccaccggtatcgtcaacgtattcatgacattaccgggcttgtatggtgtcgaacgctatggtcgccgttccctcctccttattggtgcactaggcatgacgatttgcgagtttattgttgctatcgttggtgtcacgatccccgcctcgaatctagcaggtcagagagtgctaattgcattcgtttgcatttacatcgctttcttcgcatctacctggggtcctatgctttgggttatcgttggtgaaatctttcctctacaagtccgtgccaagggcatttcgctttctgttgccagcaactggttgtggaacttcggtattgcctttgctacaccttaccttgtaaatacccaagcgggatcagccggtctcgggtcaaaagtgttcttcatctggggcacaacatgtgcttgctgtcttgtctttacgtacttctgcgtgcccgagaccaagggcttgtctctcgaacagattgacgagatgtatcaggaagtaatgccattaaaatcctaccaataccgccgacgcctcgcgatagaaggcggatttaggacagaaaaggctgatatcatacacgaggaaacggcagaaaaggaaagcgggtaa

SEQ ID NO: 97794 - protein, 520 aa, Amanita muscaria; identical to SEQ ID NO: 97365

SEQ ID NO: 97795 - DNA, 1533 bp, Petunia hybrida
  CDS (1)..(1533)
atggcaggaggctttgcagctggatctggaggaggtgactatgaaggaaaagtcacaacttttggtatcatgacatgtttggttgctgccacaggtggtctcctctttggttatgatattggtatctcaggaggagttacatctatggatgaattcttgctcaaattttttccaaatgtataccataaggagaaggccttgaaagcagggggcaaccaatattgcaaattcgatgatcatctattgcaactcttcacctcatcactttatttagcagcactagttgcttcatttgcagcttcaataaccaccaaggcctttggccgaaaaatctccatgcttattggaggtcttattttccttgttggtgctgtccttaatggtgctgccatgaatttggctgcactcatcattggtcgtttgttgcttggtgttggcattggctatgccaatcagtcagttccagtttatctctcagaaatggcaccacctaaacttagaggagcactcaatgtttgtttccaaatggctgtcacccttggtatttttgttgcaaatatggtcaactatggtacctcttcaatgaagaaaaatgggtggagagtttcacttgttctagcagctgttcctgcaattatcatgaccgtaggagcagtgttcttacccgatacccctaactccttaattgacagaggccagaaagagaaagccaaggccatgttgcaaaaaatccgtgggacaaataatgtagacaatgaatttgaggatcttataatagccagtgatatgtcaaagctagtgacagatccatgggggaacattatgaaacctaggtacagaccacaattgaccatagctgtcctcattcctttcttccaacaactcacaggtatcaatgtgatcatgttctatgcccctgtcctcttcaagactctgggatttggtgatgaggctgccttaatgaccgctgttatcactggacttgtcaatgtcttcgccacccttatctcaatattcactgttgatagatttggcagaagattcctgttcctcgcaggaggtctccttatgcttatctgccaggctgctgttggtagcgtcataggcagtgtgtttgggacggatggcttaggaacgttcagcaagggactcggaaacgtgacggtggggttgatctgtctgtatgtagcagcatttgcatggtcatgggggccattggggtggttggtgcctagtgaggttttcccaatggaaattcgatcagcagggcaatcaattacagtgtcagtgaacatgttcttcacattcgtgataggccaactcttccttaccatgctttgcgagatgaagtttggtctcttcttcttctttgctggatttgtggtactcatgacactcttcatcttcttcttcttgcctgagaccaaaggtatcccaattgaagaagtcaacagaatctggaagaatcattggttctggaaaagttacgtgccaaatgatgatgatgatcatcactctaaaaatcaagtttag

SEQ ID NO: 97796 - protein, 510 aa, Petunia hybrida
MAGGFAAGSGGGDYEGKVTTFGIMTCLVAATGGLLFGYDIGISGGVTSMDEFLLKFFPNVYHKEKALKAGGNQYCKFDDHLLQLFTSSLYLAALVASFAASITTKAFGRKISMLIGGLIFLVGAVLNGAAMNLAALIIGRLLLGVGIGYANQSVPVYLSEMAPPKLRGALNVCFQMAVTLGIFVANMVNYGTSSMKKNGWRVSLVLAAVPAIIMTVGAVFLPDTPNSLIDRGQKEKAKAMLQKIRGTNNVDNEFEDLIIASDMSKLVTDPWGNIMKPRYRPQLTIAVLIPFFQQLTGINVIMFYAPVLFKTLGFGDEAALMTAVITGLVNVFATLISIFTVDRFGRRFLFLAGGLLMLICQAAVGSVIGSVFGTDGLGTFSKGLGNVTVGLICLYVAAFAWSWGPLGWLVPSEVFPMEIRSAGQSITVSVNMFFTFVIGQLFLTMLCEMKFGLFFFFAGFVVLMTLFIFFFLPETKGIPIEEVNRIWKNHWFWKSYVPNDDDDHHSKNQV

SEQ ID NO: 97797 - DNA, 1425 bp, Tetragenococcus halophilus
  CDS (1)..(1425): transl_table=11
gtgaagtcacacccgcttacgcttactcaaaatattatgaataataaaggattaaatcgctatgttattacaattaccttaattgcaactttgggaggtctattattcggttatgatactgctgttatatctggtgctgaacaatctatccagaataatctagttaatggagtaggtttaggttcctttgctcacgggttaacagtttctagcgcacttattggttgtgtttttggaggtctattatctggaatattttcaaataatttggggagaagaaactctttaaaattagcaggtagcctctttttaatttccgcattggggtctgcgtacccagaatttttgttctttcaagccggtgatgcatcagttggtcttctaattgtatttaatttataccgcgttcttggtggtatcggtgttggaatggcttccggtatatctcccacatatattggtgaaattgctcctggaaaagttcgtggcagcctagtttcgtggtatcagtttgctattatttttggacaattagttgtatatttcgtaaattggggaattgccaccggacaatcaccagaatgggtgaatgatattggatggagatttatgtttgcttcagaagcaataccggctattttattttttgctttgttgttttatgtacctgaaacacctagatacttagtgttaaaaaataacgaagaaaaagcttttgacgttttatctaaaattaacaactctaaagaagaggcaaaagatatattaactgatattaaaggctctctaaatacaacagaaacgagtggtaagttattttcttatggtaaaactgtagtcattgtaggtgttttactctcaatatttcagcaattcataggtattaacgttgctttatattatgcaccaagaatatttgaaagtatgggcgccggccaaaatgcctcgatggtacagacaatcattatgggaattgttaacgtgacatttacctatgttgcgataagaactgtagataaatgggggagaagaccgttgttgttagttggatcaatagggatggctattggtatgttcgctgttgcgttgcttgcgaaaaatggtgtgttgggtatttggacgttagtctttatcatagtttatacggcctcctatatgatgtcgtggggaccgattgtttgggtgttactttctgaaatattccctaacaaaatcagaggacaagcaatggcatttgcagttgctgctcaatggctatcaaacttctttatttcatcaacctatcctgcaatgatagactttagtggaccgctaacttatggattttatggtttgatgtgtgttatttccgcaatttttgtatggaagatggtcccagaaacaaaaggaaagacgcttgaacaattagaaaatacttggttataa

SEQ ID NO: 97798 - protein, 474 aa, Tetragenococcus halophilus
MKSHPLTLTQNIMNNKGLNRYVITITLIATLGGLLFGYDTAVISGAEQSIQNNLVNGVGLGSFAHGLTVSSALIGCVFGGLLSGIFSNNLGRRNSLKLAGSLFLISALGSAYPEFLFFQAGDASVGLLIVFNLYRVLGGIGVGMASGISPTYIGEIAPGKVRGSLVSWYQFAIIFGQLVVYFVNWGIATGQSPEWVNDIGWRFMFASEAIPAILFFALLFYVPETPRYLVLKNNEEKAFDVLSKINNSKEEAKDILTDIKGSLNTTETSGKLFSYGKTVVIVGVLLSIFQQFIGINVALYYAPRIFESMGAGQNASMVQTIIMGIVNVTFTYVAIRTVDKWGRRPLLLVGSIGMAIGMFAVALLAKNGVLGIWTLVFIIVYTASYMMSWGPIVWVLLSEIFPNKIRGQAMAFAVAAQWLSNFFISSTYPAMIDFSGPLTYGFYGLMCVISAIFVWKMVPETKGKTLEQLENTWL

SEQ ID NO: 97799 - DNA, 1650 bp, Beta vulgaris subsp
  CDS (1)..(1650)
atgagtgaaggaactaataaagccatgtcagacccaccaccaacaactgcaagcaaagtaatagcagattttgatcctttaaagaagcctcctaagagaaacaagtttgcttttgcttgtgctactttggcttctatgacttctgttttacttggttatgacattggagtaatgagtggtgcaataatctacctcaaagaagactggcacattagtgacacacaaataggagttctagtcggaatcttaaacatctactgcctcttcggctctttcgcagctggtagaacatccgattggatcggacgacgttacactatcgtgttagctggtgcaatcttcttcgttggcgcactactcatgggtttcgccacaaactacgcatttcttatggtaggccgttttgtaacaggaataggtgttggttatgcacttatgatcgcacctgtttacactgcagaggtttctcctgcttcttcaagaggatttcttacctcttttcctgaggttttcatcaatgcaggaattttgcttggatatatatctaatctcgcattttcaagcctcccaactcatttgagctggaggtttatgctcggaatcggggcgattccgagcatatttttggctattggagtgcttgctatgcctgagtcaccgaggtggcttgttatgcagggaaggcttggagatgctaagaaggtgcttaatcgaatatctgactcgcctgaggaggctcaacttaggctcagtgagattaagcagacagcaggaatcccagctgagtgtgatgaagacatatataaggttgaaaaaacaaagataaaatcagggaatgcagtttggaaagagctcttcttcaaccctactcccgcagtgaggcgtgcagtgattgcaggtatcggaattcactttttccagcaagcttccggcatcgacgccgtggttttatacagtccaaggatctttcagagtgctggaatcacaaatgcacgtaaacagttacttgcaacagtagctgtaggagttgttaagacacttttcatattagttgctacatttcaattagacaagtatggtagaaggcctttactattaacaagtgttggtggtatgatcatagccatcttaaccttagccatgtctttaactgttattgatcactctcatcacaagattacatgggctatagccttgtgtataaccatggtttgtgctgtcgttgcgtcgttttcgattggtttaggaccaattacatgggtatatagttcagaggttttccccttgaggttaagggctcaaggtactagcatgggtgtggctgttaatagagttgtaagtggtgttatttcaatatttttcttgcctttgtcacataagattacaacaggtggtgccttctttttgttcggagggattgctattattgcttggttcttcttcttgacgtttcttcctgagactagagggcgtacacttgagaatatgcatgagttgtttgaagattttagatggagggagtcatttccaggcaacaagtcaaataatgatgagaatagtacaagaaaacaaagcaatggtaatgacaagagtcaagtacaattgggagaaactactactagtactactgttacaaatgacaatcactga

SEQ ID NO: 97800 - protein, 549 aa, Beta vulgaris subsp
MSEGTNKAMSDPPPTTASKVIADFDPLKKPPKRNKFAFACATLASMTSVLLGYDIGVMSGAIIYLKEDWHISDTQIGVLVGILNIYCLFGSFAAGRTSDWIGRRYTIVLAGAIFFVGALLMGFATNYAFLMVGRFVTGIGVGYALMIAPVYTAEVSPASSRGFLTSFPEVFINAGILLGYISNLAFSSLPTHLSWRFMLGIGAIPSIFLAIGVLAMPESPRWLVMQGRLGDAKKVLNRISDSPEEAQLRLSEIKQTAGIPAECDEDIYKVEKTKIKSGNAVWKELFFNPTPAVRRAVIAGIGIHFFQQASGIDAVVLYSPRIFQSAGITNARKQLLATVAVGVVKTLFILVATFQLDKYGRRPLLLTSVGGMIIAILTLAMSLTVIDHSHHKITWAIALCITMVCAVVASFSIGLGPITWVYSSEVFPLRLRAQGTSMGVAVNRVVSGVISIFFLPLSHKITTGGAFFLFGGIAIIAWFFFLTFLPETRGRTLENMHELFEDFRWRESFPGNKSNNDENSTRKQSNGNDKSQVQLGETTTSTTVTNDNH

SEQ ID NO: 97801 - DNA, 1620 bp, Trichoderma reesei; identical to SEQ ID NO: 97058
  CDS (1)..(1620)

SEQ ID NO: 97802 - protein, 539 aa, Trichoderma reesei; identical to SEQ ID NO: 97059

SEQ ID NO: 97803 - DNA, 1506 bp, Medicago truncatula; identical to SEQ ID NO: 97376
  CDS (1)..(1506)

SEQ ID NO: 97804 - protein, 501 aa, Medicago truncatula; identical to SEQ ID NO: 97377

SEQ ID NO: 97805 - DNA, 1605 bp, Emericella nidulans; identical to SEQ ID NO: 97062
  CDS (1)..(1605)

SEQ ID NO: 97806 - protein, 534 aa, Emericella nidulans; identical to SEQ ID NO: 97063

SEQ ID NO: 97807 - DNA, 1644 bp, Candida intermedia; identical to SEQ ID NO: 97064
  CDS (1)..(1644)

SEQ ID NO: 97808 - protein, 547 aa, Candida intermedia; identical to SEQ ID NO: 97065

SEQ ID NO: 97809 - DNA, 1569 bp, Candida intermedia; identical to SEQ ID NO: 97066
  CDS (1)..(1569)

SEQ ID NO: 97810 - protein, 522 aa, Candida intermedia; identical to SEQ ID NO: 97067

SEQ ID NO: 97811 - DNA, 1620 bp, Aspergillus oryzae; identical to SEQ ID NO: 97386
  CDS (1)..(1620)

SEQ ID NO: 97812 - protein, 539 aa, Aspergillus oryzae; identical to SEQ ID NO: 97387

SEQ ID NO: 97813 - DNA, 1641 bp, Aspergillus oryzae; identical to SEQ ID NO: 97068
  CDS (1)..(1641)

SEQ ID NO: 97814 - protein, 546 aa, Aspergillus oryzae; identical to SEQ ID NO: 97069

SEQ ID NO: 97815 - DNA, 1617 bp, Aspergillus oryzae
  CDS (1)..(1617)
atgcaaagtgcaggcgatgcttgggaacggcgccgtcgtcttggttttgaagccgaggcaacgccacgagatcttccatcaatcagggctcgcgcttgcacgagtatctcgcgactccgaaagccacaccacgacggccccccgcaaacggctatcaagcccatactgactgttacgactctagacgatttgggtgttattgcggaggttattgccagccattcgttcgaagacaagttcgcagcaaatgacacccagaccggattggttgtgtctatgttcacagcaggtgccttcttcggctcagcatttgcaggtcccagtggtgatattctcggcagaagaaagaccatctccctcggttgtgtaatcttttgtcttggtggagggctccagactggagcacagacagtcgcatacttatacagtgggaggttcctggccggacttggtgtcggattccttaccatgattatcccgctataccaggctgagatctgccaccctgacattcgaggtcgagtgacatcgctgcagcaattcatgctgggcgttggttccctgtgtgctgcatggatctcgtatggcacgtatattggatttgccccaacaaacaatgctcagtggcaggtcccacttggtttacaagtggttcccgccgtgtttttgggtctcctgattatgtttttcccggagtcgccgcgttggctcattgaccatggcgagcacgaaaagggcctgcaaacgcttgcgaagcttcacgcgcatggggatgaaaatgacccatgggtccgtgctgaatacaaccagattcaggagagtattacgtttgagcatgagaatgaagccaagtcatacttggaattgttcagttctcggtcatcgttccgccgtcttttcctttgctgcgcgttacaagcatcagtgcagatgacgggagtgtcggctatccagtactactccgtgacaatttatgagcagatcggaatcaagggagacgaaacgttgcgttaccaagcaatcaattccgtcattgccttggtagcccagttcctctgtatgatgttcattgaccgcttcggtagacggcgaagtctgatctttggaaacttgggtaactgcctcactttcatcatcgcatgcatcctgctcgcaagattccctcccgaggtcaacaacacaggggctcactggggcttcatcattatgacatggttgtataatttctctttctcttgcacctgtggtcctctgtcttggatcattccggcagaggttttcgatacgcggacccggtcgaagggtgtttccattgctaccatgacatcttatgcgttcaacaccatgattggccaagtgacaccaatcgcaatggagaatgtccgctaccggtattactttgtcttcatcatctgtaacttcaccaacgccgtcttcttctggttgttgctgcctgagaccaagaagttgccgcttgaagagatgaactacttgttctccaactccccatggattgtgctaggaaccaagaaggaggattaccttcctcatgatcttgagcacaaagttcacgaacaagaagtgaagcaagaggtttatgcacaacacaaggagtga

SEQ ID NO: 97816 - protein, 538 aa, Aspergillus oryzae
MQSAGDAWERRRRLGFEAEATPRDLPSIRARACTSISRLRKPHHDGPPQTAIKPILTVTTLDDLGVIAEVIASHSFEDKFAANDTQTGLVVSMFTAGAFFGSAFAGPSGDILGRRKTISLGCVIFCLGGGLQTGAQTVAYLYSGRFLAGLGVGFLTMIIPLYQAEICHPDIRGRVTSLQQFMLGVGSLCAAWISYGTYIGFAPTNNAQWQVPLGLQVVPAVFLGLLIMFFPESPRWLIDHGEHEKGLQTLAKLHAHGDENDPWVRAEYNQIQESITFEHENEAKSYLELFSSRSSFRRLFLCCALQASVQMTGVSAIQYYSVTIYEQIGIKGDETLRYQAINSVIALVAQFLCMMFIDRFGRRRSLIFGNLGNCLTFIIACILLARFPPEVNNTGAHWGFIIMTWLYNFSFSCTCGPLSWIIPAEVFDTRTRSKGVSIATMTSYAFNTMIGQVTPIAMENVRYRYYFVFIICNFTNAVFFWLLLPETKKLPLEEMNYLFSNSPWIVLGTKKEDYLPHDLEHKVHEQEVKQEVYAQHKE

SEQ ID NO: 97817 - DNA, 1698 bp, Aspergillus oryzae
  CDS (1)..(1698)
atggaatcaacagttatagatcactcctctcgagggggctttgccctcatctaccagaatccctatttactgggcgttgcttcgttctcaactcttggaggtctcctcttcggatatgatcagggcgtggtatcgggggtcattacaatggaatcctttggagctcgattccctcgaatatacacagacagtagcttcaagggatggtttgtgtcgacactgctcctcgctgcatggttcggatctctaatcaacggcccaatcgcagatcgattgggccggaaactgtctatgaatgtcgccgtcgttatcttcgtgataggatcagctatccaatgcggtgccgtgaacatcccaatgctcttcgtcggacgtgcaattgccggtctagccgttggccaattaaccatgatcgtgccactctacatttcagaggtctccatccccgagatccgtggtggcctcgtcgtcctccaacaactctcaataacaatcggcatcctaattagctactggatcgactacggcacaaattacataggcggcacacgctgcgcccccaacaccccctacacaggccatacaaagaccacacccaccttcaacccctacacagacgtcccgcccaacggctgcacaggacaatccgaagcctcctggcgtctccccctcgccatccaaatcctcccagccctcatcctaggcctcggcattatcttcttccccgactctccccgctggctggcaatgaaagaacgcgacgacgaagccctaacagccctctccaagctgcgccgccagaccagagacagtcctgcgctggtaaatgagttcctcgagatcaaggcgtcgattatgctagaaaacactttcgcccgggaccatttcccgggcctatctggcctccggctgcatgctgcgcagtatgtgtcgtttttgacgacgtgggcgcggttcaagaggctggctatcgggtgctgtgtgatgttttttcagcagtttatgggctgcaatgctatgatatactacgccccgacgatctttgcgcagttgggtttggatgggaatacgacttctcttcttgcgacgggtgtgtacggcattgttaactgtctcagcaccttgccggcgcttttcttgattgataagattggtcgtcgggttctactcatgtctggtgctgtagggacctgtatctcgctggtgattgtgggtgcgcttatcggggcgtatggatccgatttggtcaaccataaatccgctgggtgggcaggtattgccttcatttatatttacgatattaacttttcctactcttttgctcccattggatgggtcctgccctcagaaatcttcaacctttctatccgttctaaggccatttcaatcacaacttcggcgacctggatgtgcaattttatcattggattgatcacccctgatatgctcgagtcaatcacttggggtacctatatcttctttgcggcattctgtctccttgcactggcattcacgttcttctgtattccggagacccgtggaaagactttggaagatatggaccttattttcggagacacagcagcccacgaagagaaacaacgcattgttcagattgaggccgagctccgtggtacgcagggccctaataaggacaccttagtaaagccctccgtacagcaggaagagtacgtttga

SEQ ID NO: 97818 - protein, 565 aa, Aspergillus oryzae
MESTVIDHSSRGGFALIYQNPYLLGVASFSTLGGLLFGYDQGVVSGVITMESFGARFPRIYTDSSFKGWFVSTLLLAAWFGSLINGPIADRLGRKLSMNVAVVIFVIGSAIQCGAVNIPMLFVGRAIAGLAVGQLTMIVPLYISEVSIPEIRGGLVVLQQLSITIGILISYWIDYGTNYIGGTRCAPNTPYTGHTKTTPTFNPYTDVPPNGCTGQSEASWRLPLAIQILPALILGLGIIFFPDSPRWLAMKERDDEALTALSKLRRQTRDSPALVNEFLEIKASIMLENTFARDHFPGLSGLRLHAAQYVSFLTTWARFKRLAIGCCVMFFQQFMGCNAMIYYAPTIFAQLGLDGNTTSLLATGVYGIVNCLSTLPALFLIDKIGRRVLLMSGAVGTCISLVIVGALIGAYGSDLVNHKSAGWAGIAFIYIYDINFSYSFAPIGWVLPSEIFNLSIRSKAISITTSATWMCNFIIGLITPDMLESITWGTYIFFAAFCLLALAFTFFCIPETRGKTLEDMDLIFGDTAAHEEKQRIVQIEAELRGTQGPNKDTLVKPSVQQEEYV

SEQ ID NO: 97819 - DNA, 1788 bp, Aspergillus oryzae; identical to SEQ ID NO: 97070
  CDS (1)..(1788)

SEQ ID NO: 97820 - protein, 595 aa, Aspergillus oryzae; identical to SEQ ID NO: 97071

SEQ ID NO: 97821 - DNA, 1617 bp, Aspergillus oryzae; identical to SEQ ID NO: 97072
  CDS (1)..(1617)

SEQ ID NO: 97822 - protein, 538 aa, Aspergillus oryzae; identical to SEQ ID NO: 97073

SEQ ID NO: 97823 - DNA, 1680 bp, Aspergillus oryzae; identical to SEQ ID NO: 97074
  CDS (1)..(1680)

SEQ ID NO: 97824 - protein, 559 aa, Aspergillus oryzae; identical to SEQ ID NO: 97075

SEQ ID NO: 97825 - DNA, 1545 bp, Aspergillus oryzae; identical to SEQ ID NO: 97078
  CDS (1)..(1545)

SEQ ID NO: 97826 - protein, 514 aa, Aspergillus oryzae; identical to SEQ ID NO: 97079

SEQ ID NO: 97827 - DNA, 1485 bp, Aspergillus oryzae
  CDS (1)..(1485)
atgggtcgcaagctcggcctcttccgcgccacatacttggcgtctgccagctgtatgggctcttttgcattcgcatttgacacgggtgttattagtggtgtcctcacattgccatcctttcagcgtgacttccgatatagtacttcgcagaaaacgacagtcaactccaacgcggtgtcaattcttcaggctggggcatttttcggatgcttcttcacaatgcctatagcctcgaagctgggccgccgctctggactcattctgagctcacttgtgttcaccgtagggaccatcttacagattattaatgcccataccctgggaactttctacgctggcagagtgattgccggacttggtatcggcgccgccactacgttgatacctatgtatgcagcagaaatggcccctaaagagattcgaggaagactcggggcctgtttccaattgttctttgccacgggagttatggtcgcatattgggttacttacgctgtatcgaaggaccagccagatgccacgaagcaatggcagattgcgttggggctgcaattactgccgtccacattgcttctactcggcatgtgcacagttaaagagagtgctcggtggcttgccgcaaagggtaagaaagataaagcatgggagtcgttgaaatgggttcgtggaggtgaagaaactgaggagctccagaaggaatttgatgaaatcattgcggggatcgaggaagaggctcgtgtcaaggagaatttcaccatccgcgagcttcttctgccagtgaatcgttatcgcattttcattgcttttacaattcagctatgcgcccagttaacgggaaacacatcgctcgcttactatgccaatcagatcttcgaagccgtgggagcggagggcgaagctaaattagtgaccggcttttttggcgtggtcaaggtagtcggagtctctattttccaactgtttgttctggaccgtgttggaagacgagttccattcatggttggagcattcgcaatgggttcgtttatgctcatcattgcatgtgttctggcgacccatcccacacaatcgggcgggtccaactcttcgccaacgaaagcggggatcgccatgattatcatgacctatgcggaggcctttagtttcaatatgtcctgggggcctctcccgtggttgtatgtgggtgagatcttctctagtcgcacacgagaagtgggagtagccgtcggtgctgcgtcgcagtggttgttcaactttatgatgtcgcagataacgccacacgccatcaccaacatcggttggagaatgttcctgatgtttgcgattttcaactatgcgatcatagtatattcatggttcttcctgaaagagacatccaaccattcattggaagaaatgcaagcagtctttgggggaggtgaccccccaaaggaggccagtctcgctggagagaagggcgaaattgacgccacggtgcgaccatga

SEQ ID NO: 97828 - protein, 494 aa, Aspergillus oryzae
MGRKLGLFRATYLASASCMGSFAFAFDTGVISGVLTLPSFQRDFRYSTSQKTTVNSNAVSILQAGAFFGCFFTMPIASKLGRRSGLILSSLVFTVGTILQIINAHTLGTFYAGRVIAGLGIGAATTLIPMYAAEMAPKEIRGRLGACFQLFFATGVMVAYWVTYAVSKDQPDATKQWQIALGLQLLPSTLLLLGMCTVKESARWLAAKGKKDKAWESLKWVRGGEETEELQKEFDEIIAGIEEEARVKENFTIRELLLPVNRYRIFIAFTIQLCAQLTGNTSLAYYANQIFEAVGAEGEAKLVTGFFGVVKVVGVSIFQLFVLDRVGRRVPFMVGAFAMGSFMLIIACVLATHPTQSGGSNSSPTKAGIAMIIMTYAEAFSFNMSWGPLPWLYVGEIFSSRTREVGVAVGAASQWLFNFMMSQITPHAITNIGWRMFLMFAIFNYAIIVYSWFFLKETSNHSLEEMQAVFGGGDPPKEASLAGEKGEIDATVRP

SEQ ID NO: 97829 - DNA, 1605 bp, Aspergillus oryzae
  CDS (1)..(1605)
atgtcagttatactccgaagactcgtccacaatgaggcgatgcgagaggaccccaaggagatttatggatggagggtgtacatgctcgcgtgttcggcctgctttggcggcatgcttttcggaatggagaccggtatcataggaggtgtccttacgatggatcctttccaagtgaaatatgggttaaagaaccttggcgatataggagaggccaatctctccgctaatattgtatccacattacaggcagggtgcttctttggcgccctcatcgcctccccagtagcagacaaatggggtcgaaagaccgggttgatatccgcatcgttaattgctatcgttggcgttatcatgcaagtggcagcaagcgggcacctggaagctatgtacatcggacgtctaatcaacggtttcggtgtcggcttcgcttcgatgatcaatcctctctatgtctctgaaaacgccccaagagccatccgtggtggtctaacaggcctctaccaactgttcatcacaatgggaattatgctcgccttctggatcaactacggctcttccctccacatcaagggcacggcacaatacatggttccacttgccatgcaggccctccccgcccttcttatgcttgtgggtatgctcctatgcaacgaatccccccgttggctcgcaaaacaagaccgctgggaagacgctcggaagacgctctcccgcgtgcgcaacctcccctcaacacatcagtacattgagaacgagttccaagatatcgtcaatcaacttgagcatgagcgccaactcatcggtggttccggcttctgggaccttatgaaagagatgtggctcatcccaggcaaccgcaaacgagccatgatcagcatcttcctcatggtctgccagcaaatgaccggcacgaacgccattaattactacgcaccacagatctttgaaaatctgggcatcaccggtactacgacaggcctcttcgccacgggagtgtacgggatcgtgaaggtggtggcatgtgccgtcttcctagtcttcgtcgccgattctttgggccgtcgacgctctctgctctggacctctgtcgcccagggcctagctatgctctacatcgggttatatatccgcattgcgccaccggtagaaggccagcccgtgatccccgctggctatgtcgctctcgtctgtatcttcctctttgccgcgtgcttccagtttggctgggggcccgtctgctggatctatgtctccgagatcccgactgcccgactgagaagtctgaacgtcgccatggctgccgcgacccagtggctgttcaactttgtcgtttctcgggctgttcccaatatgctggcgaccgttggtgccaacggttacgggacatacatcattttcgcctgtttttgtttctcaatgggcgtgtgggtttggttctttattcccgaaaccaaaggtctctcactggagaaaatggatgagctcttcggtgctactagcagtgatactcatttgaagactgaagatgtagagagaagtgcatcccaagtggaaggtgaccataaagatgaagttgctacagaaactagggtagaaagggtgtaa

SEQ ID NO: 97830 - protein, 534 aa, Aspergillus oryzae
MSVILRRLVHNEAMREDPKEIYGWRVYMLACSACFGGMLFGMETGIIGGVLTMDPFQVKYGLKNLGDIGEANLSANIVSTLQAGCFFGALIASPVADKWGRKTGLISASLIAIVGVIMQVAASGHLEAMYIGRLINGFGVGFASMINPLYVSENAPRAIRGGLTGLYQLFITMGIMLAFWINYGSSLHIKGTAQYMVPLAMQALPALLMLVGMLLCNESPRWLAKQDRWEDARKTLSRVRNLPSTHQYIENEFQDIVNQLEHERQLIGGSGFWDLMKEMWLIPGNRKRAMISIFLMVCQQMTGTNAINYYAPQIFENLGITGTTTGLFATGVYGIVKVVACAVFLVFVADSLGRRRSLLWTSVAQGLAMLYIGLYIRIAPPVEGQPVIPAGYVALVCIFLFAACFQFGWGPVCWIYVSEIPTARLRSLNVAMAAATQWLFNFVVSRAVPNMLATVGANGYGTYIIFACFCFSMGVWVWFFIPETKGLSLEKMDELFGATSSDTHLKTEDVERSASQVEGDHKDEVATETRVERV

SEQ ID NO: 97831 - DNA, 1593 bp, Aspergillus oryzae; identical to SEQ ID NO: 97080
  CDS (1)..(1593)

SEQ ID NO: 97832 - protein, 530 aa, Aspergillus oryzae; identical to SEQ ID NO: 97081

SEQ ID NO: 97833 - DNA, 1629 bp, Emericella nidulans; identical to SEQ ID NO: 97082
  CDS (1)..(1629)

SEQ ID NO: 97834 - protein, 542 aa, Emericella nidulans; identical to SEQ ID NO: 97083

SEQ ID NO: 97835 - DNA, 1563 bp, Tuber borchii; identical to SEQ ID NO: 97084
  CDS (1)..(1563)

SEQ ID NO: 97836 - protein, 520 aa, Tuber borchii; identical to SEQ ID NO: 97085

SEQ ID NO: 97837 - DNA, 1587 bp, Sclerotinia sclerotiorum; identical to SEQ ID NO: 97406
  CDS (1)..(1587)

SEQ ID NO: 97838 - protein, 528 aa, Sclerotinia sclerotiorum; identical to SEQ ID NO: 97407

SEQ ID NO: 97839 - DNA, 1689 bp, Emericella nidulans; identical to SEQ ID NO: 97086
  CDS (1)..(1689)

SEQ ID NO: 97840 - protein, 562 aa, Emericella nidulans; identical to SEQ ID NO: 97087

SEQ ID NO: 97841 - DNA, 1563 bp, Cryptococcus neoformans var; identical to SEQ ID NO: 97088
  CDS (1)..(1563)

SEQ ID NO: 97842 - protein, 520 aa, Cryptococcus neoformans var; identical to SEQ ID NO: 97089

SEQ ID NO: 97843 - DNA, 1704 bp, Torulaspora delbrueckii
  CDS (1)..(1704)
atgtctactacagagcatacaccagttgaccatttgtcgccagctgtgtctgcatcaggttctgggttatctaccccatctaataaagccgaaagagatgatataaaagatttcgacgctgccgctgatagagaagctgccgttgatataccaaagagaccagcttcttcttacatcggtgtctccattttgtgtttaatggttgcttttggtggtttcgtcttcggttgggatactggtactatttctggttttgtgaacttgtctgatttcctccaaagattcggtcaaagaagcaaggacggtgtttactacctgtccaaggttagaatgggtttaattgtttctatcttcaacattggttgcgctatcggtggtattattctatccaagattggtgatatatatggtcgccgtatcggtctagttgctgttactgtcatttatgtcgttggtatcttgattcaaatctgttctttcaacaaatggtaccaatactttatcggtagaattatctctggtctaggtgttggtggtatcgctgttttgtctccaatgttgatttccgaagtttctccaaagcaaattagaggtactctagtcgcttgttaccaactgatgatcactctaggtatcttcttgggttactgtactaactacggtaccaagacatacaatgactccactcaatggagagtcggtctaggtctatgtttcgcttgggctatctttatgattggtggtatgcttttcgttcctgaatctccacgttacctggtcgagcatggtaatattgaagaggccaagcgctctctatccaggtccaacaaactttctgttgatgatccagctgtgctagctgaattggatgccatttccgctggtgtggaagccgaaaaattggcaggtagcgcttcctggggtgaattgttctccactaagaccaaggttttccaacgtttgattatgggtgtcatgcttcaatctctacaacaattgactggtgataactacttcttctactacggtaccactgtcttcaagtctgtcggtttgaaagattctttccaaacttctatcattattggtgttgtcaacttcttctccactttcgtcggtatcttctgtatcgaaagatttggtcgtcgtacttgtttgctatggggtgccgcttccatggtctgttgtttcgtcgtgtttgcatctgtcggtgttacgaagctatggccagaaggtcctagccatcaagatatctcttccaagggtgctggtaactgtatgatcgtctttaccatgtttttcatcttctgtttcgctacctcttgggctggtggttgttacgttatcgtctctgaatctttcccattgagagttaagtctaagggtatggctattgctaccgctgctaactggctatggggtttcttaattgctttcttcactccattcattactggtgccattaacttctactacggttacgtcttcatgggatgtctagttttcggttacttctacgttttcttctttgttccagaaactaaaggtttgaccttggaagaagtggagaccatgtggctcgaaggtgtcctaccatggaagtctgctgcttgggttccaccagacagaagaggtgctgactacaacgctgaagaaatggctcacgatgataagccaatgtacaagagatttttctccaaataa

SEQ ID NO: 97844 - protein, 567 aa, Torulaspora delbrueckii; identical to SEQ ID NO: 97091

SEQ ID NO: 97845 - DNA, 1644 bp, Emericella nidulans
  CDS (1)..(1644)
atgggtgtcgagtcttcttcttaccatggggagtctatcaccccggctcctgctccccagccgcaacaatactccagccaggagtcgattgggagcaccaagcctgaacccggggtcgatactcctatcccccgcatcactttgcgagccaccatcatgggcttgttcgtctccatgggtggcttgcttttcggatacgacactggtcagatctctggtttccaggaaatgtctgacttccttgaacgttacggtgaactccagtccgatggttcatattccttcagccacgtccggtccggtctgattgtcagtcttctgtctatcggaacgcttattggtgctctctgtggtgctcctctcgctgataagctgggccggaaatggtccatcactgtctggtgtattatcctcatggtcggaatcattgttcagatttccgccccttccggtaactgggtccaaatcgtcatgggccgctggaccactggtcttggtgtcggcggatgctccctggttgttcccatgtaccaaggagagagtgcccccaagcacgtccgtggtgccatgatcagttcctaccagctgttcgtcacgcttggtatcttcctagcatactgtatcaaccttggaacggagagcttggatggtagtgcccaatggcgtatcactctaggtctgaccttcctgttcgcactcatccttggtctcggcatggccatgtttcctgaaagccctcgcttcaactaccgtcacggcaagattgacactgcccgtacgactatggcccgtctttatggtgtcccagagaaccacgtcgtcatcgtccgcgagctggctgaaatccaatcgcagctcgacgctgaaaaggagcagtcccagaaatggaacgaattcatcaccgccccacgcatgctgtaccgtattcttctgggtattgttctccaagctctgcagcagctcactggcgccaactacttcttctactatggtaccaccatcttccagggtgccggtatctccaactctttcatcactcaggtcattctcggagctatcaattttggaaccacctttggtggtctctacgttgttgagaactttggtcgccgcaagtccctcattgctggtgcttccttgatgttcatctgcttcatgatcttcgcctccatcggacactttatgctcgacgttgagcaccctgagaacacccccggacccggcaagggcatggttgtcgtcgcctctttcttcgttctcttctacgctacgacctggggtcccatcgtctggtccatcgttgctgagctcttcccctccaaataccgtgccaagggtatggctctcgccactgcttccaactggctttggaacttcctcattggtttcttcactcccttcatcaccggagccatcgatttcgcgtacggctacgtcttcgcgggctgtctcctcgtcgctgtcttcgtggtctacttcttcgttattgagggtaaagaccgaactctcgaggagctcgactggatgtacgtcaaccacgtcaaaccctgggagagcagcaagtacgagatcccgcggatcacctaccacgatgacgctcgcggagccaggaaggagaatactgagcacgctgaagttgcttag

SEQ ID NO: 97846 - protein, 547 aa, Emericella nidulans
MGVESSSYHGESITPAPAPQPQQYSSQESIGSTKPEPGVDTPIPRITLRATIMGLFVSMGGLLFGYDTGQISGFQEMSDFLERYGELQSDGSYSFSHVRSGLIVSLLSIGTLIGALCGAPLADKLGRKWSITVWCIILMVGIIVQISAPSGNWVQIVMGRWTTGLGVGGCSLVVPMYQGESAPKHVRGAMISSYQLFVTLGIFLAYCINLGTESLDGSAQWRITLGLTFLFALILGLGMAMFPESPRFNYRHGKIDTARTTMARLYGVPENHVVIVRELAEIQSQLDAEKEQSQKWNEFITAPRMLYRILLGIVLQALQQLTGANYFFYYGTTIFQGAGISNSFITQVILGAINFGTTFGGLYVVENFGRRKSLIAGASLMFICFMIFASIGHFMLDVEHPENTPGPGKGMVVVASFFVLFYATTWGPIVWSIVAELFPSKYRAKGMALATASNWLWNFLIGFFTPFITGAIDFAYGYVFAGCLLVAVFVVYFFVIEGKDRTLEELDWMYVNHVKPWESSKYEIPRITYHDDARGARKENTEHAEVA

SEQ ID NO: 97847 - DNA, 1722 bp, Saccharomyces mikatae IFO 1815; identical to SEQ ID NO: 97094
  CDS (1)..(1722)

SEQ ID NO: 97848 - protein, 573 aa, Saccharomyces mikatae IFO 1815; identical to SEQ ID NO: 97095

SEQ ID NO: 97849 - DNA, 1590 bp, Sclerotinia sclerotiorum; identical to SEQ ID NO: 97098
  CDS (1)..(1590)

SEQ ID NO: 97850 - protein, 529 aa, Sclerotinia sclerotiorum; identical to SEQ ID NO: 97099

SEQ ID NO: 97851 - DNA, 1539 bp, Sclerotinia sclerotiorum; identical to SEQ ID NO: 97100
  CDS (1)..(1539)

SEQ ID NO: 97852 - protein, 512 aa, Sclerotinia sclerotiorum; identical to SEQ ID NO: 97101

SEQ ID NO: 97853 - DNA, 1647 bp, Trichoderma reesei; identical to SEQ ID NO: 97102
  CDS (1)..(1647)

SEQ ID NO: 97854 - protein, 548 aa, Trichoderma reesei; identical to SEQ ID NO: 97103

SEQ ID NO: 97855 - DNA, 1626 bp, Pichia angusta; identical to SEQ ID NO: 97104
  CDS (1)..(1626)

SEQ ID NO: 97856 - protein, 541 aa, Pichia angusta; identical to SEQ ID NO: 97105

SEQ ID NO: 97857 - DNA, 1545 bp, Aspergillus niger; identical to SEQ ID NO: 97106
  CDS (1)..(1545)

SEQ ID NO: 97858 - protein, 514 aa, Aspergillus niger; identical to SEQ ID NO: 97107

SEQ ID NO: 97859 - DNA, 1752 bp, Aspergillus niger; identical to SEQ ID NO: 97108
  CDS (1)..(1752)

SEQ ID NO: 97860 - protein, 583 aa, Aspergillus niger; identical to SEQ ID NO: 97109

SEQ ID NO: 97861 - DNA, 1593 bp, Aspergillus niger; identical to SEQ ID NO: 97110
  CDS (1)..(1593)

SEQ ID NO: 97862 - protein, 530 aa, Aspergillus niger; identical to SEQ ID NO: 97111

SEQ ID NO: 97863 - DNA, 1584 bp, Emericella nidulans
  CDS (1)..(1584)
atggcagacgcggtgattgctggtcagcgcgtggaggccccggtcacatggaaggcgtaccttatgtgcgtgttcgcggcctttggtggtatattcttcggctacgactctggctatattaatggagttatgggcatggattatttcatccaagaatttacaggaaaggtcaaaagcgaaactcccgccgcgcagtttgtgatttcatcgtcgaataaatcccttatcacctctatcctgtctgcggggacgttctttggcgctattattgccggtgacctggcagagtggtacggccgtcgcatcacgattatcaatggctgcggagtctttatggctggtgtggcttttcagattgcctctaccaccgtgcccatgcttgtcgtcggccgattgatcgcaggcgttggtgtcggttttgtctctgcgatcatcattctgtacatgtctgagatttctcctcgaaggttccgtggtgctatcgtatcgggctatcagttttgcatcaccattggtttgatgctggcctcctgcgtgaactatgggacggagaaccggaatgattcgggctcataccgtatcccgattgccctccaactcctctgggcgatcattcttgggataggtctgttcgtccttccagagtctccccgttattatgttcggaaaaacaatctggctgaagcagccaaaaccctcgctcgcgtgcgaggccagcccccggagtcagagtatatcacgcaagagctggcagaaatcgtggccaacaatgaatacgagatgcaggttattccccagggcggctattttgctacgtggttgaactgcttccgtggaggtctccggtctcctaacagcaaccttcgtcgtgttatccttgggacctctcttcagatgatgcaacaatggactggagtgaacttcgtcttctattttggtactacgtttttccagaacctcggtaccattgacgaccctttcctcatcagcatgatcaccacgattgtcaatgtcttttctactccgatctccttttacacgatggagaagctcggtcgtcgccctctactgctttggggcgctctgggcatggtcgtctgccaatttattgtggcgatcgctggaaccgtggatggagacaacagtaaaaccgtctcggcgcaaatctcgtttatctgcatttatatctttttctttgcttccacttggggccctggcgcttgggtcgttattggcgagattttcccgctgcccattcgttctcgtggcgttgcgctatcaacagcctccaactggctttggaactgcattattgcagttatcacaccgtacatggttgatatcgacaaggggaacctcaagtcccgagtgttctttatctggggatccctgtgtgcctgcgcatttgtctatgtctacttcctgattcccgagacaaaaggcctcaccctcgaacaagtcgacaagatgatggaggagactactcctcgcacatctgccaaatggaagcctcactctacctttgcgaccgagatgggtatgactgagaaaaatgcgagtacaaccgtggaaagcgctgcctaa

SEQ ID NO: 97864 - protein, 527 aa, Emericella nidulans
MADAVIAGQRVEAPVTWKAYLMCVFAAFGGIFFGYDSGYINGVMGMDYFIQEFTGKVKSETPAAQFVISSSNKSLITSILSAGTFFGAIIAGDLAEWYGRRITIINGCGVFMAGVAFQIASTTVPMLVVGRLIAGVGVGFVSAIIILYMSEISPRRFRGAIVSGYQFCITIGLMLASCVNYGTENRNDSGSYRIPIALQLLWAIILGIGLFVLPESPRYYVRKNNLAEAAKTLARVRGQPPESEYITQELAEIVANNEYEMQVIPQGGYFATWLNCFRGGLRSPNSNLRRVILGTSLQMMQQWTGVNFVFYFGTTFFQNLGTIDDPFLISMITTIVNVFSTPISFYTMEKLGRRPLLLWGALGMVVCQFIVAIAGTVDGDNSKTVSAQISFICIYIFFFASTWGPGAWVVIGEIFPLPIRSRGVALSTASNWLWNCIIAVITPYMVDIDKGNLKSRVFFIWGSLCACAFVYVYFLIPETKGLTLEQVDKMMEETTPRTSAKWKPHSTFATEMGMTEKNASTTVESAA

SEQ ID NO: 97865 - DNA, 1569 bp, Uromyces fabae; identical to SEQ ID NO: 97426
  CDS (1)..(1569)

SEQ ID NO: 97866 - protein, 522 aa, Uromyces fabae; identical to SEQ ID NO: 97427

SEQ ID NO: 97867 - DNA, 1413 bp, Lactobacillus casei
  CDS (1)..(1413): transl_table=11
atgtatcaatcaaaaacacacaatcatcgatttaccggtcaccttgcgagtgcgaagacacggttgcggctagtagcattgatttcaacgatgggtggcctgctttttggctatgacactggggtgatcaatggcgcattgccttttatttcttcggaactgaaacttgcccctggatcacagggttgggtcaccagtagcttgacgctgggtgctgcttttggtgctatcttagtcggtcgtttaagtgatcgctatgggcgcaggcggctcatcaccatgttagcgggcttattttttctggcaacggtagcctcgtcactttccccgagtgctggctggctgattggcgcacggctgatccttggattagccgttggcggcgtctctgtgctggttccaagctttttagcagagattgccccaacgagtcatcgtgggcggttagtcacacaaaatgagctgatggtcgtgactggccagttacttgcttttgttctcaatgcctttttaggaaccacttttggtaacgttcctggtatctggcgctggatgattgtattggcagtcattccggcaattatcttaggtatcgggacttattttgttccggaatctcctcgttggttaatgatgaaaggacggccggcagcagcacgttcaagtttggaagtgttgcgatctgctgctgaagtgccagcagagattgaccatttgaaacagaatcttgccgaagatgctaaacataagcaggcgagtgttcgagcattgaaaaccaaatggattcgccgactggttctgattggcatcggcctaggcgtcattcagcaaattgctggtatcaatgtcatgatgtattatggcacctcaattttacaaatgacgggttttgggcgagatagcgccttgatcgccaacattgccaatggggttactgccgttgctgcaacgattgtgacgttgcaattgttgaagcatgttccgcggcggccaatgctgattgtgggattgattggctcaaccgtggcgattactggtgtcaccttcgctagtcgactaccagcgggttcgccattccgggcatttgcgacaatcgggatgatgatgctgttcttggcgttcttccaaggcgctatcagtccaatgacttggctgctgatgtctgaaatcttccctgaacaggttcggggcatagggatgggcgctgcaaccttctgcttgtggttagctaactttggtgttggcgttctgttcccgattggtctggcccaaataggcatgttctggacattcgtttgcttcatcgggacaaatttgatttcattgcttttcgttctgatttttgtgccggaaacggctggacgctccctcgaaactttgcaccgagaggagaaagcccgcttaaatcattaa

SEQ ID NO: 97868 - protein, 470 aa, Lactobacillus casei
MYQSKTHNHRFTGHLASAKTRLRLVALISTMGGLLFGYDTGVINGALPFISSELKLAPGSQGWVTSSLTLGAAFGAILVGRLSDRYGRRRLITMLAGLFFLATVASSLSPSAGWLIGARLILGLAVGGVSVLVPSFLAEIAPTSHRGRLVTQNELMVVTGQLLAFVLNAFLGTTFGNVPGIWRWMIVLAVIPAIILGIGTYFVPESPRWLMMKGRPAAARSSLEVLRSAAEVPAEIDHLKQNLAEDAKHKQASVRALKTKWIRRLVLIGIGLGVIQQIAGINVMMYYGTSILQMTGFGRDSALIANIANGVTAVAATIVTLQLLKHVPRRPMLIVGLIGSTVAITGVTFASRLPAGSPFRAFATIGMMMLFLAFFQGAISPMTWLLMSEIFPEQVRGIGMGAATFCLWLANFGVGVLFPIGLAQIGMFWTFVCFIGTNLISLLFVLIFVPETAGRSLETLHREEKARLNH

SEQ ID NO: 97869 - DNA, 1725 bp, Saccharomyces cerevisiae; identical to SEQ ID NO: 97114
  CDS (1)..(1725)

SEQ ID NO: 97870 - protein, 574 aa, Saccharomyces cerevisiae; identical to SEQ ID NO: 97115

SEQ ID NO: 97871 - DNA, 1674 bp, Schizosaccharomyces pombe; identical to SEQ ID NO: 97116
  CDS (1)..(1674)

SEQ ID NO: 97872 - protein, 557 aa, Schizosaccharomyces pombe; identical to SEQ ID NO: 97117

SEQ ID NO: 97873 - DNA, 1596 bp, Schizosaccharomyces pombe; identical to SEQ ID NO: 97118
  CDS (1)..(1596)

SEQ ID NO: 97874 - protein, 531 aa, Schizosaccharomyces pombe; identical to SEQ ID NO: 97119

SEQ ID NO: 97875 - DNA, 1668 bp, Schizosaccharomyces pombe; identical to SEQ ID NO: 97120
  CDS (1)..(1668)

SEQ ID NO: 97876 - protein, 555 aa, Schizosaccharomyces pombe; identical to SEQ ID NO: 97121

SEQ ID NO: 97877 - DNA, 1674 bp, Schizosaccharomyces pombe; identical to SEQ ID NO: 97122
  CDS (1)..(1674)

SEQ ID NO: 97878 - protein, 557 aa, Schizosaccharomyces pombe; identical to SEQ ID NO: 97123

SEQ ID NO: 97879 - DNA, 1641 bp, Schizosaccharomyces pombe; identical to SEQ ID NO: 97124
  CDS (1)..(1641)

SEQ ID NO: 97880 - protein, 546 aa, Schizosaccharomyces pombe; identical to SEQ ID NO: 97125

SEQ ID NO: 97881 - DNA, 1608 bp, Schizosaccharomyces pombe; identical to SEQ ID NO: 97126
  CDS (1)..(1608)

SEQ ID NO: 97882 - protein, 535 aa, Schizosaccharomyces pombe; identical to SEQ ID NO: 97127

SEQ ID NO: 97883 - DNA, 1638 bp, Candida albicans; identical to SEQ ID NO: 97128
  CDS (1)..(1638): transl_table=12

SEQ ID NO: 97884 - protein, 545 aa, Candida albicans; identical to SEQ ID NO: 97129

SEQ ID NO: 97885 - DNA, 1605 bp, Chlorella kessleri; identical to SEQ ID NO: 97450
  CDS (1)..(1605)

SEQ ID NO: 97886 - protein, 534 aa, Chlorella kessleri; identical to SEQ ID NO: 97451

SEQ ID NO: 97887 - DNA, 1641 bp, Saccharomyces cerevisiae; identical to SEQ ID NO: 97130
  CDS (1)..(1641)

SEQ ID NO: 97888 - protein, 546 aa, Saccharomyces cerevisiae; identical to SEQ ID NO: 97131

SEQ ID NO: 97889 - DNA, 1704 bp, Saccharomyces cerevisiae; identical to SEQ ID NO: 97132
  CDS (1)..(1704)

SEQ ID NO: 97890 - protein, 567 aa, Saccharomyces cerevisiae; identical to SEQ ID NO: 97133

SEQ ID NO: 97891 - DNA, 1695 bp, Saccharomyces cerevisiae; identical to SEQ ID NO: 97134
  CDS (1)..(1695)

SEQ ID NO: 97892 - protein, 564 aa, Saccharomyces cerevisiae; identical to SEQ ID NO: 97135

SEQ ID NO: 97893 - DNA, 1623 bp, Saccharomyces cerevisiae; identical to SEQ ID NO: 97136
  CDS (1)..(1623)

SEQ ID NO: 97894 - protein, 540 aa, Saccharomyces cerevisiae; identical to SEQ ID NO: 97137

SEQ ID NO: 97895 - DNA, 1704 bp, Saccharomyces cerevisiae; identical to SEQ ID NO: 97138
  CDS (1)..(1704)

SEQ ID NO: 97896 - protein, 567 aa, Saccharomyces cerevisiae; identical to SEQ ID NO: 97139

SEQ ID NO: 97897 - DNA, 1704 bp, Saccharomyces cerevisiae; identical to SEQ ID NO: 97140
  CDS (1)..(1704)

SEQ ID NO: 97898 - protein, 567 aa, Saccharomyces cerevisiae; identical to SEQ ID NO: 97141

SEQ ID NO: 97899 - DNA, 1695 bp, Saccharomyces cerevisiae; identical to SEQ ID NO: 97142
  CDS (1)..(1695)

SEQ ID NO: 97900 - protein, 564 aa, Saccharomyces cerevisiae; identical to SEQ ID NO: 97143

SEQ ID NO: 97901 - DNA, 1713 bp, Saccharomyces cerevisiae; identical to SEQ ID NO: 97144
  CDS (1)..(1713)

SEQ ID NO: 97902 - protein, 570 aa, Saccharomyces cerevisiae; identical to SEQ ID NO: 97145

SEQ ID NO: 97903 - DNA, 1626 bp, Saccharomyces cerevisiae; identical to SEQ ID NO: 97146
  CDS (1)..(1626)

SEQ ID NO: 97904 - protein, 541 aa, Saccharomyces cerevisiae; identical to SEQ ID NO: 97147

SEQ ID NO: 97905 - DNA, 1704 bp, Saccharomyces cerevisiae; identical to SEQ ID NO: 97148
  CDS (1)..(1704)

SEQ ID NO: 97906 - protein, 567 aa, Saccharomyces cerevisiae; identical to SEQ ID NO: 97149

SEQ ID NO: 97907 - DNA, 1731 bp, Saccharomyces cerevisiae; identical to SEQ ID NO: 97150
  CDS (1)..(1731)

SEQ ID NO: 97908 - protein, 576 aa, Saccharomyces cerevisiae; identical to SEQ ID NO: 97151

SEQ ID NO: 97909 - DNA, 1779 bp, Saccharomyces cerevisiae; identical to SEQ ID NO: 97152
  CDS (1)..(1779)

SEQ ID NO: 97910 - protein, 592 aa, Saccharomyces cerevisiae; identical to SEQ ID NO: 97153

SEQ ID NO: 97911 - DNA, 1713 bp, Saccharomyces cerevisiae; identical to SEQ ID NO: 96986
  CDS (1)..(1713)

SEQ ID NO: 97912 - protein, 570 aa, Saccharomyces cerevisiae; identical to SEQ ID NO: 96987

SEQ ID NO: 97913 - DNA, 1710 bp, Saccharomyces cerevisiae; identical to SEQ ID NO: 97154
  CDS (1)..(1710)

SEQ ID NO: 97914 - protein, 569 aa, Saccharomyces cerevisiae; identical to SEQ ID NO: 97155

SEQ ID NO: 97915 - DNA, 1728 bp, Schizosaccharomyces pombe
  CDS (1)..(1728)
atgtcaatctcttccaaggattttcaaaatgtaacgtcagcgggtttcgctgatgatactttcgctgccgatacatttgctgctgataaaaaaagtccatttgaatcctcggtttttgaaaacaaaacccaggtgcttcctgtggacagcgtgtctagattatctaacggagctcgaagtcgcagcaattctaacatttctttatctgagccacacgcacttaacgacactgttgaagatcaaccagttagcaaatgggtttgggtgcttgcttttgctgccggtatcggtggtctactgtttggctatgatacaggtgtcatttcaggtgctcttgtagttataggtactagcttgggcggacatgaattaacaaatggtggtaaagaatttatcacctctgcaacatctcttggtgcacttttaggagggataattgctggtgcccttgccgacttttttggtagaaaaccggtaattgcaatagctagtatcatcatcatagttggttccatagtacaggttacggctcaccatctttggcatatgattgtaggtcgctttgttatcggttggggcgttggcattgcatcacttattattcctttgtacctaagtgaaatcgctccgtctaaaatacgcggaaggttggttatcatatatgttttattaattacagctggtcaagtaattgcctatggaattgatacagcttttgaacacgtccataatggttggcgctggatggttggtttagcaatggttcctgcagctttccaattattcattcttatttggctacccgaatctcctcgtttgttagttaaaaaagaaagatctcaggaggcttataacactctggctcgaatctatcctactgctcacccttacgaaataaagactaagctctatttaattcaagaaggagttcgtgatcctttttcaggatctagatggcaaaagattgtgaaaacttttaaagaattatatttcaatccttcaaatttccgtgcattgatactggcttgcggactgcaagcgatgcaacaactttccggatttaattcattaatgtatttttctagtactatttttgaggttgttggctttaacaatcctactgctactggtcttatcattgcagctactaattttgtatttaccattgttgcctttggtgtgattgatttttttggtcgaagaatcttgctcctgttgaccgtatggggaatgattgctgctttaattgtatgcgcggtggcttttcattttttgccgaaagacgagaatggcaattatacttctggtcaatcaaatgcttgggctatcgttgttttaatttcgatgattgtttacgttgcgtcgtatgcctctggacttggaaatctcccttggcaacaatccgagctttttcctatgtccgttagaggtctaggcactggcatgtctactgctgttaactgggctggtaatcttggtataggtgcttcgttcttaacattgatgagtgaaataacacccacaggaacgtttgccctttatggaggcctttgctttttaggatggcttggtgcacttttctgctatcctgatttaaccgattataccatcgaagaaattggggagctgcttaaacatggatttggagttcgtgaaagtatgcgacatctcaaacgcgttcgacaagagcgagcttggtctcgtgaagataaagagcaaaataactag

SEQ ID NO: 97916 - protein, 575 aa, Schizosaccharomyces pombe
MSISSKDFQNVTSAGFADDTFAADTFAADKKSPFESSVFENKTQVLPVDSVSRLSNGARSRSNSNISLSEPHALNDTVEDQPVSKWVWVLAFAAGIGGLLFGYDTGVISGALVVIGTSLGGHELTNGGKEFITSATSLGALLGGIIAGALADFFGRKPVIAIASIIIIVGSIVQVTAHHLWHMIVGRFVIGWGVGIASLIIPLYLSEIAPSKIRGRLVIIYVLLITAGQVIAYGIDTAFEHVHNGWRWMVGLAMVPAAFQLFILIWLPESPRLLVKKERSQEAYNTLARIYPTAHPYEIKTKLYLIQEGVRDPFSGSRWQKIVKTFKELYFNPSNFRALILACGLQAMQQLSGFNSLMYFSSTIFEVVGFNNPTATGLIIAATNFVFTIVAFGVIDFFGRRILLLLTVWGMIAALIVCAVAFHFLPKDENGNYTSGQSNAWAIVVLISMIVYVASYASGLGNLPWQQSELFPMSVRGLGTGMSTAVNWAGNLGIGASFLTLMSEITPTGTFALYGGLCFLGWLGALFCYPDLTDYTIEEIGELLKHGFGVRESMRHLKRVRQERAWSREDKEQNN

SEQ ID NO: 97917 - DNA, 1674 bp, Schizosaccharomyces pombe
  CDS (1)..(1674)
atggatttcaacaatattccccttgcgaccattaagtccagcgatgataagggtaaagactttatcgtggaaatgaccactcgtccttctgaaaccaagaagaaggttcctttttctgaggacatgcgtgaaatcccttctttaccgaacgaggaagaagcgaatgcaacggatccacaagccaacgaggtcgctgatgaaaacggtgaaggatttgaagctgaaaaaatcagtagttggatttgggtgctgtcggctgttgcaggtatttctggtttgctgttcggttatgacactggtgttatttcaggcgctctcgctgtcctcggtagcgatcttggtcacgtccttagctctggccaaaaagaattgattacctctgccacttccttcgccgcccttatatctgcaaccacttcaggatggcttgctgattgggtcggtcgcaaacggcttttgctatgtgcagatgcaatttttgtcatcggatctgttattatggctgcttcgcggaatgttgcaatgatggttgttggtcgttttattgtaggttatggaattggtcttacttctcttattgtcccaatgtatattactgagttggctcctgctcgtttgcgcggacgacttgtcatcatttacgtggtcttcattaccggtgggcagctgattgcctactcacttaatgctgcttttgaacatgtacatcaaggttggagaattatgtttggaattggtgcggcccccgccttaggtcagcttatttcgcttttctggactccggagtctccaaggtatttgcttagacataaccatgttgaaaaagtctacaagattttgtctcgaatccatcccgaagcaaagccagctgaaattgcatataaagtctcattgattcaagagggcgtcaaagttgattttcctgaagggaataagtttcaacatttctttcattctttaaaagtacttttcacggttccttcaaatagaagatccctttttattggttgcttccttcaatggttccaacaattttctggcactaatgcaattcaatatttctctgcaatcattttccaaagtgttggatttaaaaattctatctctgtcagtattgttgtcggtgctactaactttgttttcacaatagtcgcattcatgtttattgaccgtattggaagaagacgaattttgctttgtacttcagccgtgatgattgcaggtttggcgctttgtgcaatcgcttatcattttcttcctgcagacaccacccaaaacacaaacagtggttggcaatatgtcgtattagcatccatcattattttccttgctagctatgcttctggaatcggaaatattccctggcaacaagccgaattgtttcctatggaagtcagagcccttggtgctggattctcaactgctatcaactgggttggaaatctcatcattagtgcttcctttttgacaatgatggagtctatcacaccaacgggtacatttgcattgtttgctggattttgttttgttggactcgtgacaagctactttacttatcccgaacttgcaggaatgtctattgaaaatatacacaagctgcttgaaaaaggtttttggcaagctgtaaaggaaagtactaaacgcgttagaaaaggaagaatagatgaagcttga

SEQ ID NO: 97918 - protein, 557 aa, Schizosaccharomyces pombe
MDFNNIPLATIKSSDDKGKDFIVEMTTRPSETKKKVPFSEDMREIPSLPNEEEANATDPQANEVADENGEGFEAEKISSWIWVLSAVAGISGLLFGYDTGVISGALAVLGSDLGHVLSSGQKELITSATSFAALISATTSGWLADWVGRKRLLLCADAIFVIGSVIMAASRNVAMMVVGRFIVGYGIGLTSLIVPMYITELAPARLRGRLVIIYVVFITGGQLIAYSLNAAFEHVHQGWRIMFGIGAAPALGQLISLFWTPESPRYLLRHNHVEKVYKILSRIHPEAKPAEIAYKVSLIQEGVKVDFPEGNKFQHFFHSLKVLFTVPSNRRSLFIGCFLQWFQQFSGTNAIQYFSAIIFQSVGFKNSISVSIVVGATNFVFTIVAFMFIDRIGRRRILLCTSAVMIAGLALCAIAYHFLPADTTQNTNSGWQYVVLASIIIFLASYASGIGNIPWQQAELFPMEVRALGAGFSTAINWVGNLIISASFLTMMESITPTGTFALFAGFCFVGLVTSYFTYPELAGMSIENIHKLLEKGFWQAVKESTKRVRKGRIDEA

SEQ ID NO: 97919 - DNA, 1839 bp, Saccharomyces cerevisiae
  CDS (10)..(1839)
atggctgaaatgaagaattcgacagctgctagttccagatggacgaagagtcgtctctcccatttctttccctcgtacactaatagcagtggtatgggggccgcctcaactgatcaatcttctacgcagggagaagaactgcaccataggaagcactgtgaagaagacaatgatggtcaaaaaccgaaaaagtctcccgtatccacctctacaatgcaaataaaatctagacaggatgaggacgaggatgacggtcgaattgtcattaaaccagttaacgatgaagatgatacatcagtgattataactttcaatcagtcaatatccccttttattattacattgacattcgttgcgtccatttctgggttcatgtttggttatgatactggttacatatcgagtgcgctaatttctatcaatagagatttagacaacaaagttttaacttatggagaaaaagaattaattacggccgccacatcattgggcgctttgattacaagtgtgggcgctggtactgctgctgatgtgtttggaagaagaccatgtttaatgttctccaatctgatgtttttgatcggagcaattttacaaattaccgcgcacaagttttggcaaatggcggccggtagactgattatgggtttcggtgtcggtattggttctttgatttctcctctttttattagtgaaattgctcctaagatgatcaggggtaggttaaccgttataaattccctatggctgacaggtggtcaattgattgcttacggttgtggtgcgggcctgaaccacgtcaaaaacggttggagaatcttagttggtttgtccttgatacctactgttttgcagttttcttttttctgttttttgccggatacaccaagatactacgtaatgaaaggcgatttaaagagagcaaaaatggttctcaaacgaagttacgtaaacactgaagatgaaataattgatcaaaaagttgaagaattatctagcttaaatcaatcgataccaggaaaaaatccaataacaaaattctggaatatggtcaaggaattgcacactgtgccttcaaatttcagagctttgattattggttgtggtctacaagccattcaacaattcacaggttggaattccttaatgtatttctccggtacaatatttgaaactgttggattcaaaaattcttctgccgtttctattattgtctcaggtactaattttgtgttcacattaatagcatttttctgtattgataaaatcggccgtaggtacattttactgattggactacctggtatgactgtggcgctggttatatgtgctatagcgttccatttcctaggtattaagtttaacggtgctgatgcagtagtggcatctgatggattttcatcttggggcattgtcattatcgtatttattattgtgtatgcagccttttatgccctcggtatcggcactgttccatggcaacaatcggaattatttccacaaaacgtcagaggtgtagggacatcctacgctactgccaccaattgggcaggttctttagtcattgcgtctacgttcttgactatgttacaaaatattacaccaacgggtacattttcattctttgccggtgtagcatgtttatcaaccattttttgttacttttgttatccagaactatcaggattggagttagaggaagttcaaacaattttaaaggacggattcaatatcaaagcctctaaagctctagctaaaaagaggaaacaacaggtggccgaaggtgctgcccatcataaactcaaattcgaacctacacaggaaattgtagaaagttag

SEQ ID NO: 97920 - protein, 609 aa, Saccharomyces cerevisiae
MKNSTAASSRWTKSRLSHFFPSYTNSSGMGAASTDQSSTQGEELHHRKHCEEDNDGQKPKKSPVSTSTMQIKSRQDEDEDDGRIVIKPVNDEDDTSVIITFNQSISPFIITLTFVASISGFMFGYDTGYISSALISINRDLDNKVLTYGEKELITAATSLGALITSVGAGTAADVFGRRPCLMFSNLMFLIGAILQITAHKFWQMAAGRLIMGFGVGIGSLISPLFISEIAPKMIRGRLTVINSLWLTGGQLIAYGCGAGLNHVKNGWRILVGLSLIPTVLQFSFFCFLPDTPRYYVMKGDLKRAKMVLKRSYVNTEDEIIDQKVEELSSLNQSIPGKNPITKFWNMVKELHTVPSNFRALIIGCGLQAIQQFTGWNSLMYFSGTIFETVGFKNSSAVSIIVSGTNFVFTLIAFFCIDKIGRRYILLIGLPGMTVALVICAIAFHFLGIKFNGADAVVASDGFSSWGIVIIVFIIVYAAFYALGIGTVPWQQSELFPQNVRGVGTSYATATNWAGSLVIASTFLTMLQNITPTGTFSFFAGVACLSTIFCYFCYPELSGLELEEVQTILKDGFNIKASKALAKKRKQQVAEGAAHHKLKFEPTQEIVES

SEQ ID NO: 97921 - DNA, 1701 bp, Kluyveromyces lactis; identical to SEQ ID NO: 97158
  CDS (1)..(1701)

SEQ ID NO: 97922 - protein, 566 aa, Kluyveromyces lactis; identical to SEQ ID NO: 97159

SEQ ID NO: 97923 - DNA, 1704 bp, Kluyveromyces lactis; identical to SEQ ID NO: 97160
  CDS (1)..(1704)

SEQ ID NO: 97924 - protein, 567 aa, Kluyveromyces lactis; identical to SEQ ID NO: 97161

SEQ ID NO: 97925 - DNA, 1785 bp, Neurospora crassa; identical to SEQ ID NO: 97162
  CDS (1)..(1785)

SEQ ID NO: 97926 - protein, 594 aa, Neurospora crassa; identical to SEQ ID NO: 97163

SEQ ID NO: 97927 - DNA, 2292 bp, Saccharomyces cerevisiae
  CDS (1)..(2292)
atgaacgatagccaaaactgcctacgacagagggaagaaaatagtcatctgaatcctggaaatgacttcggccaccaccagggtgcagaatgtacgataaatcataacaacatgccacaccgcaatgcatacacagaatctacgaatgacacggaagcaaagtccatagtgatgtgcgacgatcctaacgcataccaaatttcctacacaaataatgagccggcgggagatggagctatagaaaccacgtccattctactatcgcaaccgctgccgctgcgatcgaatgtgatgtctgtcttggtaggcatatttgttgccgtggggggcttcttgtttgggtatgacactggacttataaacagtatcacggatatgccgtatgttaaaacctacattgctccgaaccattcatatttcaccactagccaaatagccatactcgtatcattcctctccctaggaacatttttcggtgcgttaatcgctccctatatttcagattcatatggtaggaagccaacaattatgtttagtaccgctgttatcttttccatcggaaactcattacaggtggcatccggtggcttggtgctattaatcgtcggaagagtgatctcaggtatcgggatcgggataatctctgctgtggttcctctttatcaagctgaagctgcgcagaagaaccttagaggtgccatcatttccagttatcagtgggctatcactattgggttactcgtgtccagtgcagtatcgcaaggaactcattccaaaaatggcccgtcttcatatagaataccaattggtttgcagtacgtttggtcaagtattttagctgtgggcatgatattccttccagagagtccaagatattacgtcttgaaggatgaactcaataaagctgcaaaatcgttatcctttttaagaggcctcccgatcgaagatccaagactcttagaggagcttgttgaaataaaagccacttacgattatgaagcatcgttcggcccgtcaacacttttagattgtttcaaaacaagtgaaaatagacccaaacagattttacgaatatttactggtatcgccatacaagcttttcaacaggcatctggtatcaattttatattctactatggagttaattttttcaacaacacaggggtggacaactcttacttggtttcttttatcagctatgccgtcaacgtcgccttcagtataccgggtatgtatttagtggatcgaattggtagaagaccagtccttcttgctggaggtgtcataatggcaatagcaaatttagtcattgccatcgttggtgtttccgagggaaaaactgttgttgctagtaaaattatgattgcttttatatgccttttcattgctgcattttcggcgacatggggtggtgtcgtgtgggtggtatctgctgaactgtacccacttggtgtcagatcgaaatgtaccgccatatgcgctgccgcaaattggctagttaatttcacctgtgccctgattacaccttacattgttgatgtcggatcacacacttcttcaatggggcccaaaatattcttcatttggggcggcttaaatgtcgtggccgttatcgttgtttatttcgctgtttatgaaacgaggggattgactttggaagagattgacgagttatttagaaaggccccaaatagcgtcatttctagcaaatggaacaaaaaaataaggaaaaggtgcttagcctttcccatttcacaacaaatagagatgaaaactaatatcaagaacgctggaaagttggacaacaacaacagtccaattgtacaggatgacagccacaacataatcgatgtggatggattcttggagaaccaaatacagtccaatgatcatatgattgcggcggataaaggaagtggctcgttagtaaacatcatcgatactgcccccctaacatctacagagtttaaacccgtggaacatccgccagtaaattacgtcgacttggggaatggtttgggtctgaatacatacaatagaggtcctccttctatcatttctgactctactgatgagttctatgaggaaaatgactcttcttattacaataacaacactgaacgaaatggagctaacagcgtcaatacatatatggctcaactaatcaatagctcatctactacaagcaacgacacatcgttctctccatcacacaatagcaatgcaagaacgtcctctaattggacgagtgacctcgctagtaagcacagccaatacacttccccccaataa

SEQ ID NO: 97928 - protein, 763 aa, Saccharomyces cerevisiae
MNDSQNCLRQREENSHLNPGNDFGHHQGAECTINHNNMPHRNAYTESTNDTEAKSIVMCDDPNAYQISYTNNEPAGDGAIETTSILLSQPLPLRSNVMSVLVGIFVAVGGFLFGYDTGLINSITDMPYVKTYIAPNHSYFTTSQIAILVSFLSLGTFFGALIAPYISDSYGRKPTIMFSTAVIFSIGNSLQVASGGLVLLIVGRVISGIGIGIISAVVPLYQAEAAQKNLRGAIISSYQWAITIGLLVSSAVSQGTHSKNGPSSYRIPIGLQYVWSSILAVGMIFLPESPRYYVLKDELNKAAKSLSFLRGLPIEDPRLLEELVEIKATYDYEASFGPSTLLDCFKTSENRPKQILRIFTGIAIQAFQQASGINFIFYYGVNFFNNTGVDNSYLVSFISYAVNVAFSIPGMYLVDRIGRRPVLLAGGVIMAIANLVIAIVGVSEGKTVVASKIMIAFICLFIAAFSATWGGVVWVVSAELYPLGVRSKCTAICAAANWLVNFTCALITPYIVDVGSHTSSMGPKIFFIWGGLNVVAVIVVYFAVYETRGLTLEEIDELFRKAPNSVISSKWNKKIRKRCLAFPISQQIEMKTNIKNAGKLDNNNSPIVQDDSHNIIDVDGFLENQIQSNDHMIAADKGSGSLVNIIDTAPLTSTEFKPVEHPPVNYVDLGNGLGLNTYNRGPPSIISDSTDEFYEENDSSYYNNNTERNGANSVNTYMAQLINSSSTTSNDTSFSPSHNSNARTSSNWTSDLASKHSQYTSPQ

SEQ ID NO: 97929 - DNA, 2655 bp, Saccharomyces cerevisiae
  CDS (1)..(2655)
atggatcctaatagtaacagttctagcgaaacattacgccaagagaaacagggtttcctagacaaagctcttcagagggtgaagggcatagcactgcgacgaaacaatagtaacaaagatcatacaacagatgatacgacaggtagcatacgaacccctacgagcttgcagcggcaaaattctgacaggcaatctaatatgacatccgtgtttacggatgacatttctaccatagacgacaactcaattttattttcagagcctcctcagaaacaatctatgatgatgtctatatgcgtaggtgtttttgttgcagttggcggatttttatttggttatgatacaggtctgatcaacagtattacatctatgaactatgtgaagtcacacgtagcacctaatcacgattcatttaccgcccaacaaatgtccattttggtgtcatttttgtcattgggaactttttttggggctttaactgcaccatttatatctgattcgtatggcaggaagcctactatcattttcagtacaattttcatcttctctatcggaaattctttacaggtaggtgctggaggaatcacattattgattgtgggaagggtcatttcaggtatcggtataggcgcaatttcagcggttgttccattataccaagcagaagctacacataaatcattaagaggtgctattatttctacttaccaatgggccattacctggggcttgctcgtgtcaagtgcagtgtcgcaagggacacacgcaagaaacgacgcatcttcgtatcggattcccatagggttgcaatatgtctggtcgtcatttctcgctatcgggatgttctttctccctgagagtccacgctattacgttttgaaagacaagctagatgaagcagctaaatctttatcgtttttaagaggtgtaccagtccatgattctgggttactggaagaactagttgaaataaaggcaacatatgattacgaggcatcttttggttcttcgaacttcattgattgttttatttcaagtaaaagtagaccaaagcaaactctaaggatgtttacgggaattgcccttcaagcatttcaacaattttcaggtatcaactttatattttactacggtgtcaatttcttcaataagacaggagtcagtaatagttatctggtttcatttataacctatgctgttaatgttgtctttaatgttcctggtttgttttttgtggaattttttggtagacgtaaggtgctggttgttgggggtgttatcatgactatagccaactttattgtggccattgttgggtgttccttaaagactgtagcggccgcaaaagttatgatagcatttatatgtctattcatagctgccttttctgctacatggggtggtgttgtttgggttatttcagcagaactgtacccattgggtgtgagatctaaatgtacggctatatgcgctgctgctaactggcttgtaaactttatttgtgctttaattaccccttatattgtagatactgggtcgcatacatcatcattaggtgcaaaaatattcttcatttggggctccttaaatgcgatgggggtgatagttgtttacttgaccgtttatgaaacgaagggtttgacattagaagagattgatgaattatatattaagtcatccactggtgtcgtgtcaccaaaatttaataaagatattagggaacgcgcacttaaattccaatacgatcctttgcaaagattagaagacggaaagaacacttttgttgctaaaagaaataattttgacgatgaaacaccaagaaatgattttcgaaatacgatatcgggcgaaatagatcatagtcccaatcaaaaagaagttcattctatcccagaacgtgttgatattcctactagtacagaaattcttgaaagcccgaacaaaagtagtggtatgacagtccctgtgtcaccttctctgcaagacgttccaatcccgcaaacaacagagcctgctgaaattcgaaccaaatatgtggacctaggaaatgggcttggtcttaatacgtataatagagggcctccctcactctcaagcgactcaagcgaagattacacagaagatgaaataggcgggccctcatctcaaggcgaccaaagtaatagaagtactatgaatgatattaatgattatatggcacgtctcattcacagtacttctactgcaagtaacacgacagataagttctccggtaaccaaagtacccttcgttaccacacggcttcctcacattcggatacaactgaagaggacagcaatttgatggacctgggaaacgggcttgccttgaatgcttataacagaggtccaccttcaattttaatgaattccagtgatgaagaggcaaatggtggtgagacgtctgataatttgaacacagctcaagacttggctggtatgaaggaacgaatggcgcagtttgcgcagagctatattgacaagagaggcggtctggaacctgaaactcaatctaatattttgagcacttctctctccgtgatggctgacactaatgaacataataatgaaatcctccactcaagcgaagaaaacgccactaatcaacctgtaaatgaaaataatgatttgaaataa

SEQ ID NO: 97930 - protein, 884 aa, Saccharomyces cerevisiae
MDPNSNSSSETLRQEKQGFLDKALQRVKGIALRRNNSNKDHTTDDTTGSIRTPTSLQRQNSDRQSNMTSVFTDDISTIDDNSILFSEPPQKQSMMMSICVGVFVAVGGFLFGYDTGLINSITSMNYVKSHVAPNHDSFTAQQMSILVSFLSLGTFFGALTAPFISDSYGRKPTIIFSTIFIFSIGNSLQVGAGGITLLIVGRVISGIGIGAISAVVPLYQAEATHKSLRGAIISTYQWAITWGLLVSSAVSQGTHARNDASSYRIPIGLQYVWSSFLAIGMFFLPESPRYYVLKDKLDEAAKSLSFLRGVPVHDSGLLEELVEIKATYDYEASFGSSNFIDCFISSKSRPKQTLRMFTGIALQAFQQFSGINFIFYYGVNFFNKTGVSNSYLVSFITYAVNVVFNVPGLFFVEFFGRRKVLVVGGVIMTIANFIVAIVGCSLKTVAAAKVMIAFICLFIAAFSATWGGVVWVISAELYPLGVRSKCTAICAAANWLVNFICALITPYIVDTGSHTSSLGAKIFFIWGSLNAMGVIVVYLTVYETKGLTLEEIDELYIKSSTGVVSPKFNKDIRERALKFQYDPLQRLEDGKNTFVAKRNNFDDETPRNDFRNTISGEIDHSPNQKEVHSIPERVDIPTSTEILESPNKSSGMTVPVSPSLQDVPIPQTTEPAEIRTKYVDLGNGLGLNTYNRGPPSLSSDSSEDYTEDEIGGPSSQGDQSNRSTMNDINDYMARLIHSTSTASNTTDKFSGNQSTLRYHTASSHSDTTEEDSNLMDLGNGLALNAYNRGPPSILMNSSDEEANGGETSDNLNTAQDLAGMKERMAQFAQSYIDKRGGLEPETQSNILSTSLSVMADTNEHNNEILHSSEENATNQPVNENNDLK

SEQ ID NO: 97931 - DNA, 1476 bp, Escherichia coli O157
  CDS (1)..(1476): transl_table=11
atgaatacccagtataattccagttatatattttcgattaccttagtcgctacattaggtggtttattatttggctacgacaccgccgttatttccggtactgttgagtcactcaataccgtctttgttgctccacaaaacttaagtgaatccgctgccaactccctgttagggttttgcgtggccagcgctctgattggttgcatcatcggcggtgccctcggtggttattgcagtaaccgcttcggtcgtcgtgattcacttaagattgctgctgtcctgttttttatttctggtgtaggttctgcctggccagaacttggttttacctctataaacccggacaacacagtgcctgtttatctggcaggttatgtcccggaatttgttatttatcgtattattggcggtattggcgttggtttagcctcaatgctttcaccaatgtatattgcggaacttgctcctgctcatattcgcgggaaactggtttcatttaaccagtttgcgattattttcgggcagcttttagtttactgcgtaaactattttattgcgcgttccggtgatgccagctggctgaatactgacggctggcgttatatgtttgcctcggaatgtatccctgcactgctgttcttaatgctgctgtataccgtgccagaaagtcctcgctggctgatgtcacgcggcaagcaagaacaggcggaaggtatcctgcgcaaaattatgggcaacacgcttgcaactcaggcagtacaggaaattaaacactccctggatcatggccgcaaaaccggtggtcgtctgctgatgtttggcgtgggcgtgattgtcatcggcgttatgctctccatcttccagcaatttgtcggcatcaatgtggtgctgtactacgcgccggaagtgttcaaaacgctgggggccagcacggatatcgcgctgttgcagaccattattgtcggagttatcaacctcaccttcaccgttctggcaattatgacggtggataaatttggtcgtaagccactgcaaattatcggcgcactcggaatggcaatcggtatgtttagcctcggtaccgcgttttacactcaggcaccgggtattgtggcgctactgtcgatgctgttctatgttgccgcctttgccatgtcctggggtccggtatgctgggtactgctgtcggaaatcttcccgaatgctattcgaggtaaagcgctggcaatcgcggtggcggcccagtggctggcgaactacttcgtctcctggaccttcccgatgatggacaaaaactcctggctggtggcccatttccacaacggtttctcctactggatttacggttgtatgggcgttctggcagcactgtttatgtggaaatttgtcccggaaaccaaaggtaaaacccttgaggagctggaagccctctgggaaccggaaacgaagaaaacacaacaaactgctacgctgtaa

SEQ ID NO: 97932 - protein, 491 aa, Escherichia coli O157
MNTQYNSSYIFSITLVATLGGLLFGYDTAVISGTVESLNTVFVAPQNLSESAANSLLGFCVASALIGCIIGGALGGYCSNRFGRRDSLKIAAVLFFISGVGSAWPELGFTSINPDNTVPVYLAGYVPEFVIYRIIGGIGVGLASMLSPMYIAELAPAHIRGKLVSFNQFAIIFGQLLVYCVNYFIARSGDASWLNTDGWRYMFASECIPALLFLMLLYTVPESPRWLMSRGKQEQAEGILRKIMGNTLATQAVQEIKHSLDHGRKTGGRLLMFGVGVIVIGVMLSIFQQFVGINVVLYYAPEVFKTLGASTDIALLQTIIVGVINLTFTVLAIMTVDKFGRKPLQIIGALGMAIGMFSLGTAFYTQAPGIVALLSMLFYVAAFAMSWGPVCWVLLSEIFPNAIRGKALAIAVAAQWLANYFVSWTFPMMDKNSWLVAHFHNGFSYWIYGCMGVLAALFMWKFVPETKGKTLEELEALWEPETKKTQQTATL

SEQ ID NO: 97933 - DNA, 1542 bp, Oryza sativa
  CDS (1)..(1542)
atggccggcggcgccatgaccgacaccgatggcgctcacaagaactacccggggaagatgaccatcttcgtcttcctcgcctgcctcgtcgcctcctccggcggcctcatcttcggctacgacatcggcatctccggcggcgtgacgtcgatggactcgttcctgatcaagttcttcccgtcggtgtacgccaaggagaaggagatggtggagacgaaccagtactgcaagttcgacagcgagctgctcaccctcttcacctcgtcgctctacctcgccgcgctcatcgcctcgctcttcgcttccgtcatcacccgcaagttcggccgcaggatcaccatgctcggcggcggcgtcatcttcctcgtcggcgccatcctcaacggagccgccgccgacgtcgccatgctcatcatcggccgcatcctcctcggcatcggcgtcggcttcagcaaccaggctgtgccactgtacctgtcggagatggcgccggcgaggatgcggggcatgctgaacatcagcttccagctcatgatcaccgtcggcatcctcgccgccaacctcatcaactacttcaccgacaagatcgccggagggtgggggtggcgcgtcagcctcggcctcgccgccgtcccggccgtcatcatggccggcggctccctcttcctccccgacacccccaactcgctcctctcccgcggcaaggagaacgaggcgcgcgccatgctccgccgcatccgtggcaccgacgacgtcggcccggagtacgacgacctcgtcgccgccagcgaggcgtccaaggccatcgagaacccgtggcgcacgctcctcgagcgccggtacaggccgcagctggtgatgtcggtgctgatcccgacgctgcagcagctcaccggcatcaacgtcgtcatgttctacgcgccggtcctcttcaagaccatcggattcggcggcacggcctcgctcatgtccgccgtcatcaccggcctcgtcaacatgttcgccaccttcgtctccatcgccaccgtcgaccgcctcggccgccgcaagctcctccttcagggcggcgtccaaatgatctttgcgcagttcattcttgggacgctgatcgccgtcaagttcgggacggcgggcgtggcgaacatctcgcggggttacgccatcgtggtggtgctgtgcatctgcgtgttcgtgtcggcgttcgcgtggtcgtggggacccctcgggtggctggttcccagcgagatcttcccgctggagatcaggtcggcggcgcagagcgtggtggtggtgttcaacatggccttcaccttcatcatcgcgcagatcttcctgatgatgctgtgccacctcaagttcggcctcttctacttcttcggcgccatggagctcatcatgacggggttcgtcttcttcttcctgccggagacgaaggggattcccatcgaggagatggacaggatctggggtaagcactggtactggagacggttcgtcggcgctggggccggcggcaaggtcgagattacctccacagtatga

SEQ ID NO: 97934 - protein, 513 aa, Oryza sativa
MAGGAMTDTDGAHKNYPGKMTIFVFLACLVASSGGLIFGYDIGISGGVTSMDSFLIKFFPSVYAKEKEMVETNQYCKFDSELLTLFTSSLYLAALIASLFASVITRKFGRRITMLGGGVIFLVGAILNGAAADVAMLIIGRILLGIGVGFSNQAVPLYLSEMAPARMRGMLNISFQLMITVGILAANLINYFTDKIAGGWGWRVSLGLAAVPAVIMAGGSLFLPDTPNSLLSRGKENEARAMLRRIRGTDDVGPEYDDLVAASEASKAIENPWRTLLERRYRPQLVMSVLIPTLQQLTGINVVMFYAPVLFKTIGFGGTASLMSAVITGLVNMFATFVSIATVDRLGRRKLLLQGGVQMIFAQFILGTLIAVKFGTAGVANISRGYAIVVVLCICVFVSAFAWSWGPLGWLVPSEIFPLEIRSAAQSVVVVFNMAFTFIIAQIFLMMLCHLKFGLFYFFGAMELIMTGFVFFFLPETKGIPIEEMDRIWGKHWYWRRFVGAGAGGKVEITSTV

SEQ ID NO: 97935 - DNA, 1563 bp, Oryza sativa; identical to SEQ ID NO: 97168
  CDS (1)..(1563)

SEQ ID NO: 97936 - protein, 520 aa, Oryza sativa; identical to SEQ ID NO: 97169

SEQ ID NO: 97937 - DNA, 1569 bp, Oryza sativa; identical to SEQ ID NO: 97302
  CDS (1)..(1569)

SEQ ID NO: 97938 - protein, 522 aa, Oryza sativa; identical to SEQ ID NO: 97303

SEQ ID NO: 97939 - DNA, 1521 bp, Oryza sativa
  CDS (1)..(1521)
atgacgatcgatttgtccatgcccgggagctccgggctcctggacgacgtaggggggaagaagcacatgaatttcttcagcaaccgctacgtgctcgcgctcacgggcgccgcaggaatcggcgggttcctctttggctacgacacaggtgtcatatctggagcccttttgtatattcgggatgactttccagcagtcagagacaattatttcttacaggagacaatcgttagcatggcattggtaggagccatcattggagcagctggcggcggctggatcaatgatacatacggccgtaggaagtctactcttgtggctgacatgctgtttgcacttggctcacttgttatgtgtgctgctggtggtccttacattctgattcttggaaggcttcttgttggcttgggtgtgggtatagcatcagtcacagcgccagtttacattgctgaagctgctccttcggaaattaggggaggtttggtgtcaactaatgtactcatgattactggtggtcaattcttctcctacctcatcaatcttggctttactgaggttcctggaacatggcgctggatgctcggagttgctgctgtgcctgcaattctacagtttgttctgatgctttttttgccagaatctccccgttggcttttctggaaggatgagaaagcaaaagctatttctgtcctagagaagatttatgactctgaccgtctagaggaagaggtagagcttcttgcttcttcttcaatgcatgaatttcagtctgatggtactgggagctatttggacattttcaagtcaaaggaactaaggctagcattttttgctggagctggtcttcaggcgttccagcaatttactggcatcaacactgtcatgtactacagcccaacaattgtccagatggctgggtttacctccaacaagttggcattgctcctttccctcatagtcgctggtatgaatgccgctgggaccattgttggaatctacctgattgaccgctgtggccggcgtcgcctggcccttacaagcttggctggtgtggtggtctccctcgccatcctagcaatggccttcatactgcagtcatcatcagatatctgttcgaatgcactcaatggtgcctgccaaggtgcactgggatggttcgcggtggcgggactcgctctatacatcgccttcttctccccaggcatggggccagttccatgggcagtgaactccgagatctaccccgaggcataccgtggaatgtgtggtggcatgtcagccactgtcaactgggtatctaacctgattgtggcacaaacattcctctcgatcgtcgggttggttgggaccggcctgaccttcctgatcatcgccggaatagcggtgctggccttcatcttcgtggctctctacgtgccggagactaaaggcctcagctttgagcaggttgagctcctgtggaaggagagagcatggggaaaccagggcaatcgccagagccttttgggcgctgcaccgtag

SEQ ID NO: 97940 - protein, 506 aa, Oryza sativa
MTIDLSMPGSSGLLDDVGGKKHMNFFSNRYVLALTGAAGIGGFLFGYDTGVISGALLYIRDDFPAVRDNYFLQETIVSMALVGAIIGAAGGGWINDTYGRRKSTLVADMLFALGSLVMCAAGGPYILILGRLLVGLGVGIASVTAPVYIAEAAPSEIRGGLVSTNVLMITGGQFFSYLINLGFTEVPGTWRWMLGVAAVPAILQFVLMLFLPESPRWLFWKDEKAKAISVLEKIYDSDRLEEEVELLASSSMHEFQSDGTGSYLDIFKSKELRLAFFAGAGLQAFQQFTGINTVMYYSPTIVQMAGFTSNKLALLLSLIVAGMNAAGTIVGIYLIDRCGRRRLALTSLAGVVVSLAILAMAFILQSSSDICSNALNGACQGALGWFAVAGLALYIAFFSPGMGPVPWAVNSEIYPEAYRGMCGGMSATVNWVSNLIVAQTFLSIVGLVGTGLTFLIIAGIAVLAFIFVALYVPETKGLSFEQVELLWKERAWGNQGNRQSLLGAAP

SEQ ID NO: 97941 - DNA, 1536 bp, Oryza sativa; identical to SEQ ID NO: 97304
  CDS (1)..(1536)

SEQ ID NO: 97942 - protein, 511 aa, Oryza sativa; identical to SEQ ID NO: 97305

SEQ ID NO: 97943 - DNA, 1509 bp, Oryza sativa; identical to SEQ ID NO: 96990
  CDS (1)..(1509)

SEQ ID NO: 97944 - protein, 502 aa, Oryza sativa; identical to SEQ ID NO: 96991

SEQ ID NO: 97945 - DNA, 1413 bp, Brassica napus; identical to SEQ ID NO: 97170
  CDS (1)..(1413)

SEQ ID NO: 97946 - protein, 470 aa, Brassica napus; identical to SEQ ID NO: 97171

SEQ ID NO: 97947 - DNA, 1599 bp, Brassica napus; identical to SEQ ID NO: 97172
  CDS (1)..(1599)

SEQ ID NO: 97948 - protein, 532 aa, Brassica napus; identical to SEQ ID NO: 97173

SEQ ID NO: 97949 - DNA, 1551 bp, Brassica napus; identical to SEQ ID NO: 97174
  CDS (1)..(1551)

SEQ ID NO: 97950 - protein, 516 aa, Brassica napus; identical to SEQ ID NO: 97175

SEQ ID NO: 97951 - DNA, 1527 bp, Brassica napus; identical to SEQ ID NO: 97176
  CDS (1)..(1527)

SEQ ID NO: 97952 - protein, 508 aa, Brassica napus; identical to SEQ ID NO: 97177

SEQ ID NO: 97953 - DNA, 1524 bp, Brassica napus; identical to SEQ ID NO: 97178
  CDS (1)..(1524)

SEQ ID NO: 97954 - protein, 507 aa, Brassica napus; identical to SEQ ID NO: 97179

SEQ ID NO: 97955 - DNA, 1569 bp, Brassica napus; identical to SEQ ID NO: 97180
  CDS (1)..(1569)

SEQ ID NO: 97956 - protein, 522 aa, Brassica napus; identical to SEQ ID NO: 97181

SEQ ID NO: 97957 - DNA, 1596 bp, Brassica napus; identical to SEQ ID NO: 97182
  CDS (1)..(1596)

SEQ ID NO: 97958 - protein, 531 aa, Brassica napus; identical to SEQ ID NO: 97183

SEQ ID NO: 97959 - DNA, 1635 bp, Brassica napus; identical to SEQ ID NO: 97184
  CDS (1)..(1635)

SEQ ID NO: 97960 - protein, 544 aa, Brassica napus; identical to SEQ ID NO: 97185

SEQ ID NO: 97961 - DNA, 1494 bp, Brassica napus; identical to SEQ ID NO: 97186
  CDS (1)..(1494)

SEQ ID NO: 97962 - protein, 497 aa, Brassica napus; identical to SEQ ID NO: 97187

SEQ ID NO: 97963 - DNA, 1428 bp, Brassica napus; identical to SEQ ID NO: 97188
  CDS (1)..(1428)

SEQ ID NO: 97964 - protein, 475 aa, Brassica napus; identical to SEQ ID NO: 97189

SEQ ID NO: 97965 - DNA, 1428 bp, Brassica napus; identical to SEQ ID NO: 97190
  CDS (1)..(1428)

SEQ ID NO: 97966 - protein, 475 aa, Brassica napus; identical to SEQ ID NO: 97191

SEQ ID NO: 97967 - DNA, 1413 bp, Triticum aestivum; identical to SEQ ID NO: 97516
  CDS (1)..(1413)

SEQ ID NO: 97968 - protein, 470 aa, Triticum aestivum; identical to SEQ ID NO: 97517

SEQ ID NO: 97969 - DNA, 1488 bp, Triticum aestivum; identical to SEQ ID NO: 97192
  CDS (1)..(1488)

SEQ ID NO: 97970 - protein, 495 aa, Triticum aestivum; identical to SEQ ID NO: 97193

SEQ ID NO: 97971 - DNA, 1530 bp, Triticum aestivum; identical to SEQ ID NO: 97194
  CDS (1)..(1530)

SEQ ID NO: 97972 - protein, 509 aa, Triticum aestivum; identical to SEQ ID NO: 97195

SEQ ID NO: 97973 - DNA, 1524 bp, Glycine max; identical to SEQ ID NO: 97196
  CDS (1)..(1524)

SEQ ID NO: 97974 - protein, 507 aa, Glycine max; identical to SEQ ID NO: 97197

SEQ ID NO: 97975 - DNA, 1524 bp, Glycine max; identical to SEQ ID NO: 97198
  CDS (1)..(1524)

SEQ ID NO: 97976 - protein, 507 aa, Glycine max; identical to SEQ ID NO: 97199

SEQ ID NO: 97977 - DNA, 1659 bp, Glycine max; identical to SEQ ID NO: 97200
  CDS (1)..(1659)

SEQ ID NO: 97978 - protein, 552 aa, Glycine max; identical to SEQ ID NO: 97201

SEQ ID NO: 97979 - DNA, 1452 bp, Glycine max; identical to SEQ ID NO: 97202
  CDS (1)..(1452)

SEQ ID NO: 97980 - protein, 483 aa, Glycine max; identical to SEQ ID NO: 97203

SEQ ID NO: 97981 - DNA, 1524 bp, Triticum aestivum; identical to SEQ ID NO: 97204
  CDS (1)..(1524)

SEQ ID NO: 97982 - protein, 507 aa, Triticum aestivum; identical to SEQ ID NO: 97205

SEQ ID NO: 97983 - DNA, 1509 bp, Zea mays
  CDS (1)..(1509)
atggcgaggagcaggacgtcgggcggcggcgagtacgagagcggcagcgaccacgacggctcgctgcagaagccgctgctgcccaacagcgggagctggtaccggatggggatggggtcgcgccagtccagcctcaacgccgccggcacctcctccatggccgtcctgcgcgagtcccacgtctccgccttcctctgcacgctcatcgtcgcgctcggccccatccagttcggcttcaccggcggctactcctccccgacgcaggccagcatcatccgggacctcaacctctccatctccgagttctcggtgttcggctcgctgtccaacgtgggcgccatggtcggggcgatcgccagcggccagatggccgagtacgttggccgcaaagggtcgttgatgattgcagcaattccaaacgtcattggttggcttgcgatctcctttgcaaaagactcttcatttctgtatatgggacgcttgcttgaaggattcggtgtcggtatcatttcctatgtggtaccggtatacatagcagagatatctccacaaaacatgagaggggctcttggctctgtgaaccagttatctgtaacccttggtatcatgtttgcctatttgctcggcttgtttgttccttggaggcttcttgcagtaataggaaccttgccctgcatagtgttgatacctggccttttcttcattccggaatctccaagatggctggcaaagatgaatatgatggatgattgcgagacttctctacaagttctgagaggattcgatgctgacatcactgcagaattgaatgatataaagagagcagtaatgtcagcaaacaaaagggctacaattcgtttccaagagttgaaccaaaagaaataccgaacgcccctaattataggaattggtctacttgtgctgcaacagctaagtggaataaatggtatactattttatgcaagtagcatcttcaaagctgccggtctgaaggacagtgacttggacacctttgcacttggagctattcaggttcttgccacttttgttacaaccatgttcttggacagagctgggcggcgaatcctccttattatttcttctgctgggatgactctaagtcttcttgtagttgctattgtattttacatcaaggataatatttcacatgactctgacttgtatgacatcttaagtatggtgtccttggttggtgtcgtggcttatgtcattgctttctccttcggtatgggtgccattccttggatcataatgtctgagatcctcccagttagcatcaagagtcttgcaggaagcttcgcgacccttgccaactggttgacatcctttggaataacaatgacggcaaatttgctgatcagctggagtgctggaggtacgtttacctcctacatgattgtgagtgccttcactctcgtgttcgtaatcgtttgggtgccagagacaaagggaagaaccctcgaagagatacaatggtcgttccgctga

SEQ ID NO: 97984 - protein, 502 aa, Zea mays; identical to SEQ ID NO: 97277

SEQ ID NO: 97985 - DNA, 1488 bp, Hordeum vulgare; identical to SEQ ID NO: 97206
  CDS (1)..(1488)

SEQ ID NO: 97986 - protein, 495 aa, Hordeum vulgare; identical to SEQ ID NO: 97207

SEQ ID NO: 97987 - DNA, 1512 bp, Brassica napus; identical to SEQ ID NO: 97208
  CDS (1)..(1512)

SEQ ID NO: 97988 - protein, 503 aa, Brassica napus; identical to SEQ ID NO: 97209

SEQ ID NO: 97989 - DNA, 1389 bp, Brassica napus; identical to SEQ ID NO: 97210
  CDS (1)..(1389)

SEQ ID NO: 97990 - protein, 462 aa, Brassica napus; identical to SEQ ID NO: 97211

SEQ ID NO: 97991 - DNA, 1644 bp, Brassica napus; identical to SEQ ID NO: 97212
  CDS (1)..(1644)

SEQ ID NO: 97992 - protein, 547 aa, Brassica napus; identical to SEQ ID NO: 97213

SEQ ID NO: 97993 - DNA, 1524 bp, Brassica napus; identical to SEQ ID NO: 97214
  CDS (1)..(1524)

SEQ ID NO: 97994 - protein, 507 aa, Brassica napus; identical to SEQ ID NO: 97215

SEQ ID NO: 97995 - DNA, 1569 bp, Brassica napus; identical to SEQ ID NO: 97216
  CDS (1)..(1569)

SEQ ID NO: 97996 - protein, 522 aa, Brassica napus; identical to SEQ ID NO: 97217

SEQ ID NO: 97997 - DNA, 1428 bp, Brassica napus; identical to SEQ ID NO: 97218
  CDS (1)..(1428)

SEQ ID NO: 97998 - protein, 475 aa, Brassica napus; identical to SEQ ID NO: 97219

SEQ ID NO: 97999 - DNA, 1527 bp, Brassica napus; identical to SEQ ID NO: 97220
  CDS (1)..(1527)

SEQ ID NO: 98000 - protein, 508 aa, Brassica napus; identical to SEQ ID NO: 97221

SEQ ID NO: 98001 - DNA, 1635 bp, Brassica napus; identical to SEQ ID NO: 97222
  CDS (1)..(1635)

SEQ ID NO: 98002 - protein, 544 aa, Brassica napus; identical to SEQ ID NO: 97223

SEQ ID NO: 98003 - DNA, 1524 bp, Brassica napus; identical to SEQ ID NO: 97224
  CDS (1)..(1524)

SEQ ID NO: 98004 - protein, 507 aa, Brassica napus; identical to SEQ ID NO: 97225

SEQ ID NO: 98005 - DNA, 1683 bp, Glycine max; identical to SEQ ID NO: 97226
  CDS (1)..(1683)

SEQ ID NO: 98006 - protein, 560 aa, Glycine max; identical to SEQ ID NO: 97227

SEQ ID NO: 98007 - DNA, 1467 bp, Glycine max; identical to SEQ ID NO: 97228
  CDS (1)..(1467)

SEQ ID NO: 98008 - protein, 488 aa, Glycine max; identical to SEQ ID NO: 97229

SEQ ID NO: 98009 - DNA, 1518 bp, Glycine max; identical to SEQ ID NO: 97230
  CDS (1)..(1518)

SEQ ID NO: 98010 - protein, 505 aa, Glycine max; identical to SEQ ID NO: 97231

SEQ ID NO: 98011 - DNA, 1494 bp, Glycine max; identical to SEQ ID NO: 97232
  CDS (1)..(1494)

SEQ ID NO: 98012 - protein, 497 aa, Glycine max; identical to SEQ ID NO: 97233

SEQ ID NO: 98013 - DNA, 1569 bp, Glycine max; identical to SEQ ID NO: 97234
  CDS (1)..(1569)

SEQ ID NO: 98014 - protein, 522 aa, Glycine max; identical to SEQ ID NO: 97235

SEQ ID NO: 98015 - DNA, 1536 bp, Glycine max; identical to SEQ ID NO: 97236
  CDS (1)..(1536)

SEQ ID NO: 98016 - protein, 511 aa, Glycine max; identical to SEQ ID NO: 97237

SEQ ID NO: 98017 - DNA, 1557 bp, Glycine max; identical to SEQ ID NO: 97238
  CDS (1)..(1557)

SEQ ID NO: 98018 - protein, 518 aa, Glycine max; identical to SEQ ID NO: 97239

SEQ ID NO: 98019 - DNA, 1668 bp, Glycine max
  CDS (1)..(1668)
atgcgcgctcggtccctggtagccgctgcttctcttgcgccgctcctgggtcgtcttctcagaacaaaaagtagtgtgtgctgtgtggaaaggttctcgctggcgaactttggagaagttttctatcgttttgccatgcggggacggcagcgagtgtcatcaagggaacacatacttggccacgataaagatgaaaatttagcttcagttcgtataccaaatgccaaaccttgttggcggcggtctttgcggcatgtaattgtggcttctctttcttcattcttgtatggataccatattggagtagtcaatgaaaccttagagagcatttctatagatcttggctttagtgggaataccatggctgagggtcttgtagtaagtatatgcttaggaggtgcttttgttggatctctgttcagtggatggattgcagatggtgttgggcgtagaagaagtttccagttgtgtgctttacctatgataatcggggctggaatgagtgcaacagcaaaaactctgtggggcatgcttttgggaaggttatttgttggtactggaatgggacttggccctcctgttgcagctctttatgtgacggaggtctcacctccagctgtacgagagccttttggggccttaacccaaattgcaacatgtcttggacgcatgggttctctctttattggaattccagccaaggaaatagttacctggtggcggatttgtttctgggtatctgtcattcctgctacaatgcttgccctttttatggaaatcggtgcagagagtcctcattggcttttcaagagaggaagaaccattgaagctgaagctgcatttgagaagctcttgggaggagtacatgtgaaacctgcaatgactgaactgtcaaagtctgacagaggtgatggatctgattcagtaaaactttcagaattaatctacggccgctatttcagagtgatgttcattggatctacactttttgcgctgcagcagctatctggcataaatgctgttttctatttctcttcaactgtctttgaaagttttggtgtaccatctgatattgcaaacacatgtgtaggagtttgcaatttattgggtatctgcaggcttaactcctttatttttgtttatgtgttgatttgtaattactctttattcctctcaaccttgttttctaataccgattcagggtcagtagttgcaatgattctgatggataaacttggaaggaaagtgctgctcctgggtagctttctgggcatggggttatcaatgggtctacaagtcatcgctgcaagttcttttgcatcaggatttggatcaatgtatttatctgttggtggcatgttactgtttgtgctgtcatttgctttcggcgctggtccagttccttgtcttatcatgtctgaaatactacccagcaatatcagagcaaaggcaatggcaatttgcctggctgtgcattgggtgataaacttcttcgtgggtctattttttttgcgcttgctggagctaattggggcgcaactcctgtatagtatttttgggttttgttgtttgatagcggtggtttttgtgaagaaaaatattctggaaacaaaagggaagtcacttcaggaaattgaaattgcacttcttgcacaagaagcaaactaa

SEQ ID NO: 98020 - protein, 555 aa, Glycine max
MRARSLVAAASLAPLLGRLLRTKSSVCCVERFSLANFGEVFYRFAMRGRQRVSSREHILGHDKDENLASVRIPNAKPCWRRSLRHVIVASLSSFLYGYHIGVVNETLESISIDLGFSGNTMAEGLVVSICLGGAFVGSLFSGWIADGVGRRRSFQLCALPMIIGAGMSATAKTLWGMLLGRLFVGTGMGLGPPVAALYVTEVSPPAVREPFGALTQIATCLGRMGSLFIGIPAKEIVTWWRICFWVSVIPATMLALFMEIGAESPHWLFKRGRTIEAEAAFEKLLGGVHVKPAMTELSKSDRGDGSDSVKLSELIYGRYFRVMFIGSTLFALQQLSGINAVFYFSSTVFESFGVPSDIANTCVGVCNLLGICRLNSFIFVYVLICNYSLFLSTLFSNTDSGSVVAMILMDKLGRKVLLLGSFLGMGLSMGLQVIAASSFASGFGSMYLSVGGMLLFVLSFAFGAGPVPCLIMSEILPSNIRAKAMAICLAVHWVINFFVGLFFLRLLELIGAQLLYSIFGFCCLIAVVFVKKNILETKGKSLQEIEIALLAQEAN

SEQ ID NO: 98021 - DNA, 1461 bp, Glycine max; identical to SEQ ID NO: 97240
  CDS (1)..(1461)

SEQ ID NO: 98022 - protein, 486 aa, Glycine max; identical to SEQ ID NO: 97241

SEQ ID NO: 98023 - DNA, 1467 bp, Glycine max; identical to SEQ ID NO: 97244
  CDS (1)..(1467)

SEQ ID NO: 98024 - protein, 488 aa, Glycine max; identical to SEQ ID NO: 97245

SEQ ID NO: 98025 - DNA, 1572 bp, Glycine max; identical to SEQ ID NO: 97246
  CDS (1)..(1572)

SEQ ID NO: 98026 - protein, 523 aa, Glycine max; identical to SEQ ID NO: 97247

SEQ ID NO: 98027 - DNA, 1533 bp, Glycine max
  CDS (1)..(1533)
atgcggggacgacagcgagtgtcatccagggagcacatacttggccatgataaagatgaaaatttagcttcagttcgtataccaaatgccaaaccttgttggcggcgctctttgcgacatgtaattgtggcttctctttcttcattcttgtatggataccatattggagtagtcaatgaaaccttagagagcatttctatagatcttggctttagtgggaataccatggctgagggtcttgtagtaagtatatgcttaggaggtgcttttgttggatctctgttcagtggatggattgcagatggtgttgggcgtagaagaagtttccagttgtgtgctttacctatgataatcggggctggaatgagtgcaacagcaaaaactctgtggggcatgcttttgggaaggttatttgttggtactggaatgggacttggccctcctgttgcagctctttatgtgactgaggtctcacctccagctgtacgaggtgcttttggggccttaacccaaattgcaacatgtcttggactcatgggttctctctttattggaattccagccaaggaaatagttggctggtggcggatttgtttctgggtatctgtcattcctgctacaatgcttgccctttttatggagatctgtgcagagagtcctcattggcttttcaagagaggaagaaccattgaagctgaagctgcatttgagaagctcttggggggagtacatgtgaaacctgcaatgactgaactgtcaaagtctgacagaggtgatggatctgattcagtaaaactttcagaattaatctacggccgctatttcagagtgatgttcattggatctacactttttgcgctgcagcagctatctggcataaatgctgttttctatttctcttcaactgtctttgaaagttttggtgtaccatctgatattgcaaactcatgtgtaggagtttgcaatttattgggtatctgcaggcttaactcctttatttttgtttatgtgttgatttgtaattactctttattcctctcaaccttgttttctaataccgattcagggtctgtagttgcaatgattctgatggataaacttggaaggaaagtgcttctcctgggtagctttctgggcatggggttatcaatgggtctacaagtcattgctgcaagttcttttgcatctggatttggatcaatgtatctatctgttggtggcatgttactgtttgtgctgtcatttgctttcggcgctggtccagttccttctcttatcatgtctgaaatactacccggcaatatcagagcaaaggcaatggcaatttgcctggctgtgcattgggtgataaacttcttcgtgggtctattttttttgcgcttgctggagctaattggggcgcaactcctgtatagtatttttggttcatgttgtttgatagcggtggtttttgtgaagaaatatattctggaaacaaaagggaagtcacttcaggaaattgaaattgcacttcttgcacaagaagcaaactaa

SEQ ID NO: 98028 - protein, 510 aa, Glycine max
MRGRQRVSSREHILGHDKDENLASVRIPNAKPCWRRSLRHVIVASLSSFLYGYHIGVVNETLESISIDLGFSGNTMAEGLVVSICLGGAFVGSLFSGWIADGVGRRRSFQLCALPMIIGAGMSATAKTLWGMLLGRLFVGTGMGLGPPVAALYVTEVSPPAVRGAFGALTQIATCLGLMGSLFIGIPAKEIVGWWRICFWVSVIPATMLALFMEICAESPHWLFKRGRTIEAEAAFEKLLGGVHVKPAMTELSKSDRGDGSDSVKLSELIYGRYFRVMFIGSTLFALQQLSGINAVFYFSSTVFESFGVPSDIANSCVGVCNLLGICRLNSFIFVYVLICNYSLFLSTLFSNTDSGSVVAMILMDKLGRKVLLLGSFLGMGLSMGLQVIAASSFASGFGSMYLSVGGMLLFVLSFAFGAGPVPSLIMSEILPGNIRAKAMAICLAVHWVINFFVGLFFLRLLELIGAQLLYSIFGSCCLIAVVFVKKYILETKGKSLQEIEIALLAQEAN

SEQ ID NO: 98029 - DNA, 1506 bp, Glycine max
  CDS (1)..(1506)
atgactggggggggtatcactatgcaatcgacgccgggaagctcaggatacttggatttgtatccagagcggaagatgtcctttttcaaaaatccttacattctcggactggctgctgtcgccggcatcggtggtctcctcttcggctacgacactggtgtgatatcaggggctcttttatacattaaggatgattttgaggaggttagaaacagcaatcttctccaggaaacaatagtcagcatggctattgccggggcaatcgtgggagcagcattgggtggttggattaatgatgcctatggtcgaaagaaggccaccctctttgccgatgttatctttaccgccggagcaataatcatggcttctgctccagatccttatgttctcattttgggacgccttctggttggtttgggtgtgggcatagcttctgtcactgctcccgtttatattgcagaagcatcaccttccgaaataaggggttcattagtcagcacaaatgtcctcatgataaccggtggacagtttctttcctatcttgttaacctcgcttttactggtgttcctggtacttggcgatggatgcttggtgtttctggtgtgcctgctgttgttcagtttgttctcatgctcttcctccctgaatccccaagatggctttttgtcaagaataggaaaaatgaagccgttgatgtgctttctaagatctttgacgttgctcgcttagaagacgaagtcgatttcctcactgctcaatccgagcaagagcgccaaagaaggtcaaatatcaaattctgggatgtttttagatccaaagaaatcagactggcattcctcgtcggtgccggacttctggcttttcagcagttcacgggtattaacacagtcatgtactacagcccgacaattgtccaaatggcagggttccatgctaatgaattggctcttcttctatcccttatagttgccggcatgaatgcagccggaacaattcttggcatttaccttatcgaccatgctggacgaaaaaaattagctctttctagtctgggaggagtaattgtatctttggtcatcttggcctttgcattttataagcaatcatccacgtcaaatgagttgtatggatggcttgcagttgtaggcttagccttgtatattggttttttctcgccaggaatggggcctgtgccatggactctgagttcagagatatatccggaagaatatcgaggtatctgtgggggcatgtcagctactgtgtgttgggtctcaaatttgattgtctcagagacctttctttcaattgcggagggtatagggattggttcaacttttctgattattggtgtcatagctgtggttgcatttgtatttgtgcttgtttatgttccagagaccaaaggattgacctttgatgaagtggaagtaatatggagggagagagcttggggcaagaaccccaacacacaaaaccttcttgagcagggaagtagttcctaa

SEQ ID NO: 98030 - protein, 501 aa, Glycine max; identical to SEQ ID NO: 97243

SEQ ID NO: 98031 - DNA, 1542 bp, Zea mays; identical to SEQ ID NO: 97248
  CDS (1)..(1542)

SEQ ID NO: 98032 - protein, 513 aa, Zea mays; identical to SEQ ID NO: 97249

SEQ ID NO: 98033 - DNA, 1557 bp, Glycine max; identical to SEQ ID NO: 97250
  CDS (1)..(1557)

SEQ ID NO: 98034 - protein, 518 aa, Glycine max; identical to SEQ ID NO: 97251

SEQ ID NO: 98035 - DNA, 1533 bp, Zea mays; identical to SEQ ID NO: 97252
  CDS (1)..(1533)

SEQ ID NO: 98036 - protein, 510 aa, Zea mays; identical to SEQ ID NO: 97253

SEQ ID NO: 98037 - DNA, 1503 bp, Zea mays; identical to SEQ ID NO: 97254
  CDS (1)..(1503)

SEQ ID NO: 98038 - protein, 500 aa, Zea mays; identical to SEQ ID NO: 97255

SEQ ID NO: 98039 - DNA, 1611 bp, Zea mays; identical to SEQ ID NO: 97256
  CDS (1)..(1611)

SEQ ID NO: 98040 - protein, 536 aa, Zea mays; identical to SEQ ID NO: 97257

SEQ ID NO: 98041 - DNA, 1596 bp, Zea mays; identical to SEQ ID NO: 97258
  CDS (1)..(1596)

SEQ ID NO: 98042 - protein, 531 aa, Zea mays; identical to SEQ ID NO: 97259

SEQ ID NO: 98043 - DNA, 1572 bp, Zea mays; identical to SEQ ID NO: 97262
  CDS (1)..(1572)

SEQ ID NO: 98044 - protein, 523 aa, Zea mays; identical to SEQ ID NO: 97263

SEQ ID NO: 98045 - DNA, 1509 bp, Zea mays; identical to SEQ ID NO: 97264
  CDS (1)..(1509)

SEQ ID NO: 98046 - protein, 502 aa, Zea mays; identical to SEQ ID NO: 97265

SEQ ID NO: 98047 - DNA, 1458 bp, Zea mays; identical to SEQ ID NO: 97266
  CDS (1)..(1458)

SEQ ID NO: 98048 - protein, 485 aa, Zea mays; identical to SEQ ID NO: 97267

SEQ ID NO: 98049 - DNA, 1572 bp, Zea mays; identical to SEQ ID NO: 97270
  CDS (1)..(1572)

SEQ ID NO: 98050 - protein, 523 aa, Zea mays; identical to SEQ ID NO: 97271

SEQ ID NO: 98051 - DNA, 1602 bp, Zea mays; identical to SEQ ID NO: 97272
  CDS (1)..(1602)

SEQ ID NO: 98052 - protein, 533 aa, Zea mays; identical to SEQ ID NO: 97273

SEQ ID NO: 98053 - DNA, 1545 bp, Zea mays; identical to SEQ ID NO: 97274
  CDS (1)..(1545)

SEQ ID NO: 98054 - protein, 514 aa, Zea mays; identical to SEQ ID NO: 97275

SEQ ID NO: 98055 - DNA, 1620 bp, Zea mays; identical to SEQ ID NO: 97278
  CDS (1)..(1620)

SEQ ID NO: 98056 - protein, 539 aa, Zea mays; identical to SEQ ID NO: 97279

SEQ ID NO: 98057 - DNA, 1521 bp, Zea mays
  CDS (1)..(1521)
atgagcttccgggaccaggagagtggcggggaggatgggggcaggacgtcctccgcctccgacctgcggaagccgctcatcaacaccgggagctggtaccgcatgccgccggcgggtggcgtgatgggctcgcggcaatccagcctcatggagcgcttgggctcctctgcgttctctctccgcgacgtcgctatctcggccacgctctgcacgcttattgtcgcgctaggtcccatccagttcggtttcacatgcggctactcctcgcccacgcaggacgccatcattgctgatctcggcctctccctctctgagttctccctcttcggttcattatctaatgtaggggcgatggtaggcgccatctccagtgggcaacttgcagagtatatcggccgcaaggggtctctcatgatcgctgcgattccaaacataattgggtggctcgcgatatcattcgcaaaagattcctctttcttgtttatgggtcggctgctagaaggatttggagtcggtgtaatatcgtatacagtaccggtttatattgcagaaatcgctcctcaggatcagaggggagctcttggttctgtcaatcagctctccgtcacgattggtatattgcttgcctacttgtttggcatgtttgttccctggagaattcttgctgttctaggcattttaccttgttcaatcctgattcctggactgttctttgtgcctgaatccccaaggtggttggcaaaaatggggaagatggaggattttgaatattcattgcaagttctgagaggatttcagacagatatcacagcagaagtaaatgaaataaagagatcattagcatcatcgaggaggaggacaaccataaggttcgctgatatcaaacagaagagatacagtgttccccttgtgataggaatcggtctccttgtcctgcagcagctaagtggtgtcaatggcattctattttatgctgcgagcatcttcaaagctgctggtattacaaacagtaatctagcaacatttggtttaggggctgttcaggtgattgctactggagtgacaacctggttgactgacaaagctggtcgaaggcttcttctcattatttccaccacaggaatggtcattactcttgttattgtttctgtgtcattttttgtgaaggacaacatagctgctggttcgcacttatactctgtaatgagtatgctttcactggctggacttgtggcatttgtgattgcattttctcttggcttgggagcgattccgtggatcattatgtctgagatccttcctgttaacatcaagagccttgctggaagtgttgcgaccctggcgaactggctgacagcatgggccattacaatgacggcaagcctgatgttgaactggagcagtggaggaacatttgctatctacgccgtcgtgtctaccatggccctcattttcgtgtgcttgtgggtgcctgagaccaagggaagaacgctagaggaaatcgccttctcattccgctga

SEQ ID NO: 98058 - protein, 506 aa, Zea mays; identical to SEQ ID NO: 97261

SEQ ID NO: 98059 - DNA, 1575 bp, Zea mays; identical to SEQ ID NO: 97280
  CDS (1)..(1575)

SEQ ID NO: 98060 - protein, 524 aa, Zea mays; identical to SEQ ID NO: 97281

SEQ ID NO: 98061 - DNA, 1458 bp, Zea mays; identical to SEQ ID NO: 97268
  CDS (1)..(1458)

SEQ ID NO: 98062 - protein, 485 aa, Zea mays; identical to SEQ ID NO: 97269

SEQ ID NO: 98063 - DNA, 1602 bp, Zea mays; identical to SEQ ID NO: 97282
  CDS (1)..(1602)

SEQ ID NO: 98064 - protein, 533 aa, Zea mays; identical to SEQ ID NO: 97283

SEQ ID NO: 98065 - DNA, 1458 bp, Zea mays; identical to SEQ ID NO: 97284
  CDS (1)..(1458)

SEQ ID NO: 98066 - protein, 485 aa, Zea mays; identical to SEQ ID NO: 97285

SEQ ID NO: 98067 - DNA, 1533 bp, Zea mays; identical to SEQ ID NO: 97286
  CDS (1)..(1533)

SEQ ID NO: 98068 - protein, 510 aa, Zea mays; identical to SEQ ID NO: 97287

SEQ ID NO: 98069 - DNA, 1563 bp, Zea mays; identical to SEQ ID NO: 97288
  CDS (1)..(1563)

SEQ ID NO: 98070 - protein, 520 aa, Zea mays; identical to SEQ ID NO: 97289

SEQ ID NO: 98071 - DNA, 25 bp, Artificial sequence
  primer
atgtccggtgttaataatacatccg

SEQ ID NO: 98072 - DNA, 25 bp, Artificial sequence
  primer
ttagctggaaaagaacctcttgtag

SEQ ID NO: 98073 - protein, 580 aa, Artificial sequence
  consensus sequence
  Variant (3)..(4): Xaa in position 3 to 4 is any amino acid
  Variant (7)..(7): Xaa in position 7 is any amino acid
  Variant (9)..(9): Xaa in position 9 is any amino acid
  Variant (11)..(13): Xaa in position 11 to 13 is any amino acid
  Variant (15)..(43): Xaa in position 15 to 43 is any amino acid
  Variant (44)..(65): Xaa in position 44 to 65 is any or no amino acid
  Variant (67)..(77): Xaa in position 67 to 77 is any amino acid
  Variant (80)..(106): Xaa in position 80 to 106 is any amino acid
  Variant (107)..(118): Xaa in position 107 to 118 is any or no amino acid
  Variant (120)..(120): Xaa in position 120 is any amino acid
  Variant (121)..(127): Xaa in position 121 to 127 is any or no amino acid
  Variant (129)..(131): Xaa in position 129 to 131 is any amino acid
  Variant (133)..(133): Xaa in position 133 is any amino acid
  Variant (135)..(135): Xaa in position 135 is any amino acid
  Variant (137)..(142): Xaa in position 137 to 142 is any amino acid
  Variant (144)..(147): Xaa in position 144 to 147 is any amino acid
  Variant (149)..(150): Xaa in position 149 to 150 is any amino acid
  Variant (152)..(154): Xaa in position 152 to 154 is any amino acid
  Variant (157)..(162): Xaa in position 157 to 162 is any amino acid
  Variant (164)..(168): Xaa in position 164 to 168 is any amino acid
  Variant (170)..(181): Xaa in position 170 to 181 is any amino acid
  Variant (182)..(222): Xaa in position 182 to 222 is any or no amino acid
  Variant (225)..(239): Xaa in position 225 to 239 is any amino acid
  Variant (241)..(244): Xaa in position 241 to 244 is any amino acid
  Variant (247)..(247): Xaa in position 247 is any amino acid
  Variant (250)..(302): Xaa in position 250 to 302 is any amino acid
  Variant (303)..(340): Xaa in position 303 to 340 is any or no amino acid
  Variant (343)..(344): Xaa in position 343 to 344 is any amino acid
  Variant (346)..(346): Xaa in position 346 is any amino acid
  Variant (348)..(349): Xaa in position 348 to 349 is any amino acid
  Variant (350)..(351): Xaa in position 350 to 351 is any or no amino acid
  Variant (353)..(356): Xaa in position 353 to 356 is any amino acid
  Variant (358)..(389): Xaa in position 358 to 389 is any amino acid
  Variant (390)..(420): Xaa in position 390 to 420 is any or no amino acid
  Variant (424)..(425): Xaa in position 424 to 425 is any amino acid
  Variant (427)..(463): Xaa in position 427 to 463 is any amino acid
  Variant (464)..(486): Xaa in position 464 to 486 is any or no amino acid
  Variant (488)..(500): Xaa in position 488 to 500 is any amino acid
  Variant (502)..(503): Xaa in position 502 to 503 is any amino acid
  Variant (505)..(518): Xaa in position 505 to 518 is any amino acid
  Variant (519)..(519): Xaa in position 519 is any or no amino acid
  Variant (521)..(562): Xaa in position 521 to 562 is any amino acid
  Variant (563)..(572): Xaa in position 563 to 572 is any or no amino acid
  Variant (575)..(575): Xaa in position 575 is any amino acid
  Variant (577)..(577): Xaa in position 577 is any amino acid
  Variant (578)..(578): Xaa in position 578 is any or no amino acid
GGXXFGXDXGXXXGXXXXXXXXXXXXXXXXXXXXXXXXXXXXXXXXXXXXXXXXXXXXXXXXXXXGXXXXXXXXXXXGRXXXXXXXXXXXXXXXXXXXXXXXXXXXXXXXXXXXXXXXGXXXXXXXXRXXXGXGXGXXXXXXPXXXXEXXPXXXRGXXXXXXQXXXXXGXXXXXXXXXXXXXXXXXXXXXXXXXXXXXXXXXXXXXXXXXXXXXXXXXXXXXWRXXXXXXXXXXXXXXXGXXXXPEXPRXXXXXXXXXXXXXXXXXXXXXXXXXXXXXXXXXXXXXXXXXXXXXXXXXXXXXXXXXXXXXXXXXXXXXXXXXXXXXXXXXXXXXXXXXXXQQXXGXNXXXXYXXXXFXXXXXXXXXXXXXXXXXXXXXXXXXXXXXXXXXXXXXXXXXXXXXXXXXXXXXXXXXXXXXXXGRRXXLXXXXXXXXXXXXXXXXXXXXXXXXXXXXXXXXXXXXXXXXXXXXXXXXXXXXXXXXXXXXFXXXXXXXXXXXXXEXXPXXXXXXXXXXXXXXXNXXXXXXXXXXXXXXXXXXXXXXXXXXXXXXXXXXXXXXXXXXXXXXXXXXXXETXGXXLE

SEQ ID NO: 98074 - protein, 29 aa, Artificial sequence
  protein pattern
  Variant (2)..(4): Xaa in position 2 to 4 is any amino acid
  Variant (6)..(6): Xaa in position 6 is any amino acid
  Variant (7)..(7): Xaa in position 7 is Ala, Gly or Ser
  Variant (8)..(8): Xaa in position 8 is Ala, Ile, Leu or Val
  Variant (10)..(15): Xaa in position 10 to 15 is any amino acid
  Variant (17)..(19): Xaa in position 17 to 19 is any amino acid
  Variant (20)..(20): Xaa in position 20 is Ala, Gly, Ser or Thr
  Variant (22)..(23): Xaa in position 22 to 23 is any amino acid
  Variant (25)..(27): Xaa in position 25 to 27 is any amino acid
RXXXGXXXGXXXXXXPXXXXEXXPXXXRG

SEQ ID NO: 98075 - DNA, 1650 bp, Saccharomyces cerevisiae
  CDS (1)..(1650)
atgtccccttctaaaatgaatgctacagtaggatctacttccgaagttgaacaaaaaatcagacaagaattggctcttagtgacgaagtcaccaccatcagacgcaatgctccagctgccgttttgtatgaagatggtctaaaagaaaataaaactgtcatttcatcaagcggtgcattgatcgcttattccggtgttaaaaccggaagatctccaaaggacaaacgtattgttgaagaacctacctcgaaagacgaaatttggtggggtccggtcaataaaccatgttctgaaagaacatggtctatcaaccgtgaaagagctgcagattacttgagaacaagagaccacatttatattgtcgatgcatttgcaggatgggatccaaaatacagaatcaaagtccgcgttgtttgtgccagggcttaccacgctttattcatgacaaatatgcttattagacctacagaagaagaattagcccattttggagaacctgattttactgtctggaacgctggtcagttcccagccaatttacacacccaggatatgtcttcaaagagtactatagaaattaacttcaaagcaatggaaatgatcattttaggtaccgaatacgccggtgaaatgaaaaaaggtattttcacagttatgttttacttgatgcctgtgcaccataacgttttaactttgcactcttccgccaaccagggtattcaaaacggtgacgttactttattctttggcctaagtggtaccgggaaaaccactttatccgcagacccacatagattgttgatcggcgatgatgaacattgttggtccgaccatggtgtcttcaatatcgaaggtggttgttacgccaagtgtattaatttatctgccgaaaaggagcctgaaattttcgacgctatcaagtttggttctgtattagaaaacgttatctatgacgagaagtcgcatgtagtcgactatgacgactcttctattactgaaaatactagatgtgcctacccaattgactacattccaagtgccaagattccatgtttggcggactctcatccaaagaacattatcctgctaacttgtgatgcttcgggtgttttaccaccagtatctaaattgactcctgaacaagtcatgtaccatttcatctctggttacacttctaaaatggctggtactgagcaaggtgtcactgaacctgaaccaacattttcatcttgtttcggacaacccttcctagccttgcaccctattagatacgcaaccatgttagctacaaagatgtctcaacataaagctaatgcgtacttaatcaacaccggctggactggttcttcctacgtatctggtggtaaacgttgcccattgaagtacacaagggccattctggattctattcatgatggttcgttagccaatgaaacgtacgaaactttaccgattttcaatcttcaagtacctaccaaggttaacggtgttccagctgagcttttgaatcctgctaaaaactggtctcaaggtgaatccaaatacagaggtgcagttaccaacttggccaacttgtttgttcaaaatttcaagatttatcaagacagagccacaccagatgtattagccgctggtcctcaattcgagtaa

SEQ ID NO: 98076 - protein, 549 aa, Saccharomyces cerevisiae; identical to SEQ ID NO: 83129

SEQ ID NO: 98077 - DNA, 1992 bp, Oryza sativa (japonica cultivar-group); identical to SEQ ID NO: 82890
  CDS (1)..(1992)

SEQ ID NO: 98078 - protein, 663 aa, Oryza sativa (japonica cultivar-group); identical to SEQ ID NO: 82891

SEQ ID NO: 98079 - DNA, 1914 bp, Oryza sativa (japonica cultivar-group); identical to SEQ ID NO: 82892
  CDS (1)..(1914)

SEQ ID NO: 98080 - protein, 637 aa, Oryza sativa (japonica cultivar-group); identical to SEQ ID NO: 82893

SEQ ID NO: 98081 - DNA, 1686 bp, Agrobacterium tumefaciens str. C58; identical to SEQ ID NO: 82896
  CDS (1)..(1686): transl_table=11

SEQ ID NO: 98082 - protein, 561 aa, Agrobacterium tumefaciens str. C58; identical to SEQ ID NO: 82897

SEQ ID NO: 98083 - DNA, 2013 bp, Arabidopsis thaliana; identical to SEQ ID NO: 82870
  CDS (1)..(2013)

SEQ ID NO: 98084 - protein, 670 aa, Arabidopsis thaliana; identical to SEQ ID NO: 82901

SEQ ID NO: 98085 - DNA, 1692 bp, Escherichia coli CFT073; identical to SEQ ID NO: 82902
  CDS (1)..(1692): transl_table=11

SEQ ID NO: 98086 - protein, 563 aa, Escherichia coli CFT073; identical to SEQ ID NO: 82903

SEQ ID NO: 98087 - DNA, 1623 bp, Shigella flexneri 2a str. 2457T; identical to SEQ ID NO: 82904
  CDS (1)..(1623): transl_table=11

SEQ ID NO: 98088 - protein, 540 aa, Shigella flexneri 2a str. 2457T; identical to SEQ ID NO: 82905

SEQ ID NO: 98089 - DNA, 1647 bp, Magnaporthe grisea 70-15; identical to SEQ ID NO: 82906
  CDS (1)..(1647)

SEQ ID NO: 98090 - protein, 548 aa, Magnaporthe grisea 70-15; identical to SEQ ID NO: 82907

SEQ ID NO: 98091 - DNA, 1740 bp, Gibberella zeae PH-1; identical to SEQ ID NO: 82908
  CDS (1)..(1740)

SEQ ID NO: 98092 - protein, 579 aa, Gibberella zeae PH-1; identical to SEQ ID NO: 82909

SEQ ID NO: 98093 - DNA, 1662 bp, Debaryomyces hansenii CBS767; identical to SEQ ID NO: 82910
  CDS (1)..(1662)

SEQ ID NO: 98094 - protein, 553 aa, Debaryomyces hansenii CBS767; identical to SEQ ID NO: 82911

SEQ ID NO: 98095 - DNA, 1671 bp, Yarrowia lipolytica CLIB122; identical to SEQ ID NO: 82912
  CDS (1)..(1671)

SEQ ID NO: 98096 - protein, 556 aa, Yarrowia lipolytica CLIB122; identical to SEQ ID NO: 82913

SEQ ID NO: 98097 - DNA, 1671 bp, Aspergillus nidulans FGSC A4; identical to SEQ ID NO: 82914
  CDS (1)..(1671)

SEQ ID NO: 98098 - protein, 556 aa, Aspergillus nidulans FGSC A4; identical to SEQ ID NO: 82915

SEQ ID NO: 98099 - DNA, 1662 bp, Candida albicans SC5314; identical to SEQ ID NO: 82916
  CDS (1)..(1662): transl_table=12

SEQ ID NO: 98100 - protein, 553 aa, Candida albicans SC5314; identical to SEQ ID NO: 82917

SEQ ID NO: 98101 - DNA, 1659 bp, Ustilago maydis 521; identical to SEQ ID NO: 82918
  CDS (1)..(1659)

SEQ ID NO: 98102 - protein, 552 aa, Ustilago maydis 521; identical to SEQ ID NO: 82919

SEQ ID NO: 98103 - DNA, 1542 bp, Desulfitobacterium hafniense Y51; identical to SEQ ID NO: 82922
  CDS (1)..(1542): transl_table=11

SEQ ID NO: 98104 - protein, 513 aa, Desulfitobacterium hafniense Y51; identical to SEQ ID NO: 82923

SEQ ID NO: 98105 - DNA, 1656 bp, Saccharophagus degradans 2-40; identical to SEQ ID NO: 82924
  CDS (1)..(1656): transl_table=11

SEQ ID NO: 98106 - protein, 551 aa, Saccharophagus degradans 2-40; identical to SEQ ID NO: 82925

SEQ ID NO: 98107 - DNA, 1599 bp, Rubrobacter xylanophilus DSM 9941; identical to SEQ ID NO: 82928
  CDS (1)..(1599): transl_table=11

SEQ ID NO: 98108 - protein, 532 aa, Rubrobacter xylanophilus DSM 9941; identical to SEQ ID NO: 82929

SEQ ID NO: 98109 - DNA, 1611 bp, Mesorhizobium sp. BNC1; identical to SEQ ID NO: 82930
  CDS (1)..(1611): transl_table=11

SEQ ID NO: 98110 - protein, 536 aa, Mesorhizobium sp. BNC1; identical to SEQ ID NO: 82931

SEQ ID NO: 98111 - DNA, 1542 bp, Shewanella sp. MR-4
  CDS (1)..(1542): transl_table=11
atggcggatggattaaaccgcgttcattacaacccctcaacagcacaactggtcgaatttgccctgctacgcggcgaaggtgaattaaccgccaatggtgcgctggttgccaaaaccggtacccgcactggtcgctctcctggcgatcgttttattgttaaagaacccagttcagcggctgacatcgaatggggcccagtcaaccaagcatttgaacccggtgcttttgaaggattatgggcgcgtgtagaagcattcctcgccgataaagagttgtttgtatctgacctcgaagtcggtgcagacccagaacattaccagccagtgcgcgtgacgactcaatacgcttggcaccaactgttcgcccgcaacctttttatcatcccagaagaatttaaccgtcaagacaagcctgtatggcaaatcatcaacgcaccagacttcgtctgcgttcctgagcgtgatggtaccaattcagatgcggcggtgatcttaaactttgccgagcgcaaagtgttgctagcgggcctgaaatacgctggcgaaatgaagaagtcgatgttctctgtacaaaacttcctgctgccagcccaaggcgtattgccaatgcactgctcggctaacgtaggtaaagacggcgacactaccctattcttcggtctgtcaggcacgggtaaaactacgctgtctgcggatccaaaacgcttcctgatcggtgacgatgagcacggctgggcaccaggcggtgtattcaacatcgaaggcggctgctacgccaagtgtatcgacctgagccaaaagaacgagccagtgatttgggatgcgattcgcttcggtactgtgctagaaaacgtggtaatggacgaacaccgcgtgcctaactacaaagacagcagcctgacggaaaacacccgtgcggcttacccactcgagcatatcgctcagcgtaaagaagacaaccgtggcgccgagccgcacgcagtggtgttcttaacctgcgacgtgtctggcgtattaccaccagtttctatcctgagcaaagagcaagcggcttaccacttcctctctggttacaccgctaaagtcggttcgactgaaatcggttcaacctcggcgattcagtcgaccttctctacctgcttcggcgcgcctttcttcccacgtcctgcgggcgtgtatgctgagctgctgatgaagcgtatcgagtcattcggtagccaagtatacctagttaacactggctggactggcggcccacacggtattggtaaacgtttcgacatcccaacgacgcgcgccatcgtcgatgcgattgtcagcggtgagctgaaaaacgcagaaaccgtacacttagacacgctgaatctggccgtgcctgtcgcggtacccggtgtagacactaacctactcaacccagtgaacacttggagcgataaggcactgtacgccgaatacgcccaaaaactggccgaagccttcactaagaacttcgctaagtaccaagtgtcagatgccatccgtaacgctggcccaaaggcataa

SEQ ID NO: 98112 - protein, 513 aa, Shewanella sp. MR-4
MADGLNRVHYNPSTAQLVEFALLRGEGELTANGALVAKTGTRTGRSPGDRFIVKEPSSAADIEWGPVNQAFEPGAFEGLWARVEAFLADKELFVSDLEVGADPEHYQPVRVTTQYAWHQLFARNLFIIPEEFNRQDKPVWQIINAPDFVCVPERDGTNSDAAVILNFAERKVLLAGLKYAGEMKKSMFSVQNFLLPAQGVLPMHCSANVGKDGDTTLFFGLSGTGKTTLSADPKRFLIGDDEHGWAPGGVFNIEGGCYAKCIDLSQKNEPVIWDAIRFGTVLENVVMDEHRVPNYKDSSLTENTRAAYPLEHIAQRKEDNRGAEPHAVVFLTCDVSGVLPPVSILSKEQAAYHFLSGYTAKVGSTEIGSTSAIQSTFSTCFGAPFFPRPAGVYAELLMKRIESFGSQVYLVNTGWTGGPHGIGKRFDIPTTRAIVDAIVSGELKNAETVHLDTLNLAVPVAVPGVDTNLLNPVNTWSDKALYAEYAQKLAEAFTKNFAKYQVSDAIRNAGPKA

SEQ ID NO: 98113 - DNA, 1650 bp, Alkalilimnicola ehrlichei MLHE-1; identical to SEQ ID NO: 82936
  CDS (1)..(1650): transl_table=11

SEQ ID NO: 98114 - protein, 549 aa, Alkalilimnicola ehrlichei MLHE-1; identical to SEQ ID NO: 82937

SEQ ID NO: 98115 - DNA, 1593 bp, Hyphomonas neptunium ATCC 15444; identical to SEQ ID NO: 82938
  CDS (1)..(1593): transl_table=11

SEQ ID NO: 98116 - protein, 530 aa, Hyphomonas neptunium ATCC 15444; identical to SEQ ID NO: 82939

SEQ ID NO: 98117 - DNA, 1542 bp, Pseudomonas aeruginosa UCBPP-PA14; identical to SEQ ID NO: 82942
  CDS (1)..(1542): transl_table=11

SEQ ID NO: 98118 - protein, 513 aa, Pseudomonas aeruginosa UCBPP-PA14; identical to SEQ ID NO: 82943

SEQ ID NO: 98119 - DNA, 1620 bp, Solibacter usitatus Ellin6076; identical to SEQ ID NO: 82946
  CDS (1)..(1620): transl_table=11

SEQ ID NO: 98120 - protein, 539 aa, Solibacter usitatus Ellin6076; identical to SEQ ID NO: 82947

SEQ ID NO: 98121 - DNA, 1611 bp, Actinobacillus pleuropneumoniae serovar 1 str. 4074; identical to SEQ ID NO: 82952
  CDS (1)..(1611): transl_table=11

SEQ ID NO: 98122 - protein, 536 aa, Actinobacillus pleuropneumoniae serovar 1 str. 4074; identical to SEQ ID NO: 82953

SEQ ID NO: 98123 - DNA, 1587 bp, Bacillus cereus G9241; identical to SEQ ID NO: 82956
  CDS (1)..(1587): transl_table=11

SEQ ID NO: 98124 - protein, 528 aa, Bacillus cereus G9241; identical to SEQ ID NO: 82957

SEQ ID NO: 98125 - DNA, 1587 bp, Bacillus anthracis str. A2012; identical to SEQ ID NO: 82958
  CDS (1)..(1587): transl_table=11
  misc_feature (1454)..(1454): s is g or c
  misc_feature (1455)..(1455): w is a or t

SEQ ID NO: 98126 - protein, 528 aa, Bacillus anthracis str. A2012; identical to SEQ ID NO: 82959
  misc_feature (485)..(485): The Xaa at location 485 stands for Arg, or Pro.

SEQ ID NO: 98127 - DNA, 1569 bp, Exiguobacterium sibiricum 255-15; identical to SEQ ID NO: 82960
  CDS (1)..(1569): transl_table=11

SEQ ID NO: 98128 - protein, 522 aa, Exiguobacterium sibiricum 255-15; identical to SEQ ID NO: 82961

SEQ ID NO: 98129 - DNA, 1611 bp, Croceibacter atlanticus HTCC2559; identical to SEQ ID NO: 82962
  CDS (1)..(1611): transl_table=11

SEQ ID NO: 98130 - protein, 536 aa, Croceibacter atlanticus HTCC2559; identical to SEQ ID NO: 82963

SEQ ID NO: 98131 - DNA, 1632 bp, Photobacterium sp. SKA34; identical to SEQ ID NO: 82974
  CDS (1)..(1632): transl_table=11

SEQ ID NO: 98132 - protein, 543 aa, Photobacterium sp. SKA34; identical to SEQ ID NO: 82975

SEQ ID NO: 98133 - DNA, 1611 bp, Flavobacteria bacterium BBFL7; identical to SEQ ID NO: 82980
  CDS (1)..(1611): transl_table=11

SEQ ID NO: 98134 - protein, 536 aa, Flavobacteria bacterium BBFL7; identical to SEQ ID NO: 82981

SEQ ID NO: 98135 - DNA, 1548 bp, marine gamma proteobacterium HTCC2207; identical to SEQ ID NO: 82982
  CDS (1)..(1548): transl_table=11

SEQ ID NO: 98136 - protein, 515 aa, marine gamma proteobacterium HTCC2207; identical to SEQ ID NO: 82983

SEQ ID NO: 98137 - DNA, 1578 bp, Rickettsiella grylli; identical to SEQ ID NO: 82984
  CDS (1)..(1578): transl_table=11

SEQ ID NO: 98138 - protein, 525 aa, Rickettsiella grylli; identical to SEQ ID NO: 82985

SEQ ID NO: 98139 - DNA, 1539 bp, Alteromonadales bacterium TW-7; identical to SEQ ID NO: 82990
  CDS (1)..(1539): transl_table=11

SEQ ID NO: 98140 - protein, 512 aa, Alteromonadales bacterium TW-7; identical to SEQ ID NO: 82991

SEQ ID NO: 98141 - DNA, 1803 bp, Aspergillus niger; identical to SEQ ID NO: 82996
  CDS (1)..(1803)

SEQ ID NO: 98142 - protein, 600 aa, Aspergillus niger; identical to SEQ ID NO: 82997

SEQ ID NO: 98143 - DNA, 1887 bp, Arabidopsis thaliana; identical to SEQ ID NO: 82998
  CDS (1)..(1887)

SEQ ID NO: 98144 - protein, 628 aa, Arabidopsis thaliana; identical to SEQ ID NO: 82999

SEQ ID NO: 98145 - DNA, 1671 bp, Aspergillus oryzae; identical to SEQ ID NO: 83000
  CDS (1)..(1671)

SEQ ID NO: 98146 - protein, 556 aa, Aspergillus oryzae; identical to SEQ ID NO: 83001

SEQ ID NO: 98147 - DNA, 2048 bp, Actinobacillus succinogenes; identical to SEQ ID NO: 83002
  CDS (259)..(1875): transl_table=11

SEQ ID NO: 98148 - protein, 538 aa, Actinobacillus succinogenes; identical to SEQ ID NO: 83003

SEQ ID NO: 98149 - DNA, 2250 bp, Oryza sativa; identical to SEQ ID NO: 83006
  CDS (70)..(1980)

SEQ ID NO: 98150 - protein, 636 aa, Oryza sativa; identical to SEQ ID NO: 83007

SEQ ID NO: 98151 - DNA, 2154 bp, Solanum lycopersicum; identical to SEQ ID NO: 83008
  CDS (93)..(2081)

SEQ ID NO: 98152 - protein, 662 aa, Solanum lycopersicum; identical to SEQ ID NO: 83009

SEQ ID NO: 98153 - DNA, 2249 bp, Flaveria pringlei; identical to SEQ ID NO: 83010
  CDS (83)..(2059)

SEQ ID NO: 98154 - protein, 658 aa, Flaveria pringlei; identical to SEQ ID NO: 83011

SEQ ID NO: 98155 - DNA, 2245 bp, Flaveria trinervia; identical to SEQ ID NO: 83012
  CDS (89)..(2077)

SEQ ID NO: 98156 - protein, 662 aa, Flaveria trinervia; identical to SEQ ID NO: 83013

SEQ ID NO: 98157 - DNA, 2258 bp, Flaveria trinervia; identical to SEQ ID NO: 83014
  CDS (84)..(2072)

SEQ ID NO: 98158 - protein, 662 aa, Flaveria trinervia; identical to SEQ ID NO: 83015

SEQ ID NO: 98159 - DNA, 2220 bp, Urochloa panicoides; identical to SEQ ID NO: 83016
  CDS (58)..(1932)

SEQ ID NO: 98160 - protein, 624 aa, Urochloa panicoides; identical to SEQ ID NO: 83017

SEQ ID NO: 98161 - DNA, 2254 bp, Urochloa panicoides; identical to SEQ ID NO: 83018
  CDS (45)..(1925)
  misc_feature (2225)..(2225): m is a or c

SEQ ID NO: 98162 - protein, 626 aa, Urochloa panicoides; identical to SEQ ID NO: 83019

SEQ ID NO: 98163 - DNA, 2016 bp, Arabidopsis thaliana; identical to SEQ ID NO: 83020
  CDS (1)..(2016)

SEQ ID NO: 98164 - protein, 671 aa, Arabidopsis thaliana; identical to SEQ ID NO: 83021

SEQ ID NO: 98165 - DNA, 2408 bp, Cucumis sativus; identical to SEQ ID NO: 83022
  CDS (36)..(2048)

SEQ ID NO: 98166 - protein, 670 aa, Cucumis sativus; identical to SEQ ID NO: 83023

SEQ ID NO: 98167 - DNA, 2338 bp, Zea mays; identical to SEQ ID NO: 83024
  CDS (58)..(2058)

SEQ ID NO: 98168 - protein, 666 aa, Zea mays; identical to SEQ ID NO: 83025

SEQ ID NO: 98169 - DNA, 1578 bp, Moorella thermoacetica; identical to SEQ ID NO: 83026
  CDS (1)..(1578): transl_table=11

SEQ ID NO: 98170 - protein, 525 aa, Moorella thermoacetica; identical to SEQ ID NO: 83027

SEQ ID NO: 98171 - DNA, 2295 bp, Anaerobiospirillum succiniciproducens; identical to SEQ ID NO: 83028
  CDS (370)..(1968): transl_table=11

SEQ ID NO: 98172 - protein, 532 aa, Anaerobiospirillum succiniciproducens; identical to SEQ ID NO: 83029

SEQ ID NO: 98173 - DNA, 1626 bp, Ashbya gossypii; identical to SEQ ID NO: 83030
  CDS (1)..(1626)

SEQ ID NO: 98174 - protein, 541 aa, Ashbya gossypii; identical to SEQ ID NO: 83031

SEQ ID NO: 98175 - DNA, 1587 bp, Bacillus anthracis; identical to SEQ ID NO: 83032
  CDS (1)..(1587): transl_table=11

SEQ ID NO: 98176 - protein, 528 aa, Bacillus anthracis; identical to SEQ ID NO: 83033

SEQ ID NO: 98177 - DNA, 1587 bp, Bacillus cereus; identical to SEQ ID NO: 83034
  CDS (1)..(1587): transl_table=11

SEQ ID NO: 98178 - protein, 528 aa, Bacillus cereus; identical to SEQ ID NO: 83035

SEQ ID NO: 98179 - DNA, 1587 bp, Bacillus cereus; identical to SEQ ID NO: 83036
  CDS (1)..(1587): transl_table=11

SEQ ID NO: 98180 - protein, 528 aa, Bacillus cereus; identical to SEQ ID NO: 83037

SEQ ID NO: 98181 - DNA, 1608 bp, Bacteroides fragilis
  CDS (1)..(1608): transl_table=11
atggcaaatttagatttaagcaagtacggtattacaggtgtaactgaaatcctgcacaacccgtcttacgatgttttgttcgctgaagaaacaaaaccaggtctggaaggctttgaaaaaggtcaagtaacagaattgggtgctgtaaacgtaatgactggcgtttacactggccgttctcctaaagataaattcttcgttaagaatgaagcttctgaaaattcagtatggtggacttctgaagaatacaagaacgacaacaaaccttgttcagaagaagcttgggctgacctgaaagctaaagccgttaaagaactttctaacaaacgcctgttcgttgttgatactttctgtggtgctaacgaaggtactcgcatgaaagtacgtttcatcatggaagtagcttggcaggcacacttcgtaactaacatgttcatccgcccgacagctgaagaacttgctaactacggagaacctgatttcgtatgcttcaacgcttctaaagcaaaagttgataactacaaagaactgggtctgaactcagaaactgctacagttttcaacctgaagactaaagaacaagttatcctgaatacttggtacggtggtgaaatgaagaaaggtatgttctcaatcatgaactacatgaacccgcttcgtggcatcgcttctatgcactgctctgctaacacagatatggaaggaactagctctgctatcttcttcggtttgtctggtacaggtaaaactactttgtctactgacccgaaacgtaaattgatcggtgacgacgaacacggatgggacaacgaaggtgtattcaactacgaaggtggttgctacgctaaggttatcaacctggataaagaaagcgaaccggatatcttcaacgctatcaaacgtgacgctctgttggagaacgtaacagtagctgctgatggcaaaatcaatttcgctgacaaatcagtaacagaaaacactcgtgtttcttatcctatctaccacatcgagaacatcgttaaaccggtgtctaaaggtcctcacgctaaacaagttatcttcttgtcagctgatgccttcggtgtattgcctccggtatctatcttgaacccggaacaagctcagtactacttcctgtctggatttacagctaaattggctggtacagaacgtggtatcactgaaccgactccgacattctctgcttgcttcggtgctgcattcttatcattgcacccaactaaatatgcagaagaattggttaagaagatggaaatgaccggtgctaaagcatacttggttaacactggatggaacggaagcggtaaacgtatttctatcaaagatactcgtggtatcatcgacgctatccttgacggttctatcgacaaagctcctactaaggttattcctttcttcgactttgttgttcctacagaacttccgggtgttgatccgaagatccttgatcctcgtgatacttacgctgatcctgcacagtggaatgaaaaagcaaaagaccttgccggtcgcttcatcaagaacttcgctaagttcactggaaacgaagctggtaagaagttggttgctgctggtccgaaactctaa

SEQ ID NO: 98182 - protein, 535 aa, Bacteroides fragilis; identical to SEQ ID NO: 83039

SEQ ID NO: 98183 - DNA, 1584 bp, Bacillus halodurans; identical to SEQ ID NO: 83040
  CDS (1)..(1584): transl_table=11

SEQ ID NO: 98184 - protein, 527 aa, Bacillus halodurans; identical to SEQ ID NO: 83041

SEQ ID NO: 98185 - DNA, 1584 bp, Bacillus licheniformis; identical to SEQ ID NO: 83042
  CDS (1)..(1584): transl_table=11

SEQ ID NO: 98186 - protein, 527 aa, Bacillus licheniformis; identical to SEQ ID NO: 83043

SEQ ID NO: 98187 - DNA, 1662 bp, Candida albicans; identical to SEQ ID NO: 83052
  CDS (1)..(1662): transl_table=12
  misc_feature (969)..(969): v is a, g or c
  misc_feature (970)..(970): v is a, g or c
  misc_feature (971)..(971): v is a, g or c

SEQ ID NO: 98188 - protein, 553 aa, Candida albicans; identical to SEQ ID NO: 83053
  misc_feature (323)..(323): The Xaa at location 323 stands for Asp, or Glu.
  misc_feature (324)..(324): The Xaa at location 324 stands for Ala, Arg, Gln, Glu, Gly, Lys, Pro, or Thr.

SEQ ID NO: 98189 - DNA, 1635 bp, Candida glabrata; identical to SEQ ID NO: 83054
  CDS (1)..(1635)

SEQ ID NO: 98190 - protein, 544 aa, Candida glabrata; identical to SEQ ID NO: 83055

SEQ ID NO: 98191 - DNA, 1611 bp, Colwellia psychrerythraea; identical to SEQ ID NO: 83056
  CDS (1)..(1611): transl_table=11

SEQ ID NO: 98192 - protein, 536 aa, Colwellia psychrerythraea; identical to SEQ ID NO: 83057

SEQ ID NO: 98193 - DNA, 1554 bp, Coxiella burnetii; identical to SEQ ID NO: 83058
  CDS (1)..(1554): transl_table=11

SEQ ID NO: 98194 - protein, 517 aa, Coxiella burnetii; identical to SEQ ID NO: 83059

SEQ ID NO: 98195 - DNA, 1623 bp, Escherichia coli O6
  CDS (1)..(1623): transl_table=11
atgcgcgttaacaatggtttgaccccgcaagaactcgaggcttatggtatcagtgacgtacatgatatcgtttacaacccaagctacgatctgctgtaccaggaagagctggacccgagcctgaccggttatgagcgcggggtgttaactaatctgggtgccgttgccgtcgataccgggatcttcaccggtcgttcaccgaaagataagtatatcgttcgtgacgataccactcgcgatactttctggtgggcagacaaaggcaaaggtaagaacgacaacaaacctctctctccggaaacctggcagcatctgaaaggcctggtgaccaggcagctttccggcaaacgtctgttcgttgtcgacgccttctgtggtgcgaacccggatactcgtctttccgtccgtttcatcaccgaagtggcctggcaggcgcattttgtcaaaaacatgtttattcgcccgagcgatgaagagctggcaggtttcaaaccagactttatcgttatgaacggcgcgaagtgcactaacccgcagtggaaagaacagggtctgaactccgaaaacttcgtggcgtttaacctgaccgagcgcatgcagctgattggcggcacctggtacggcggcgaaatgaagaaagggatgttctcgatgatgaactacctgctgccgctgaaaggtatcgcttctatgcactgctccgccaacgttggcgagaaaggcgatgttgcggtgttcttcggcctttccggcaccggtaaaaccaccctttccaccgacccgaaacgccgcctgattggcgatgacgagcacggctgggatgatgacggtgtgtttaacttcgaaggcggctgctacgcgaaaactatcaagctgtcgaaagaagcggaacctgaaatctacaacgctatccgtcgcgatgcgctgctggaaaacgtcaccgtgcgtgaagatggcacaatcgactttgatgatggttcaaaaaccgagaacacccgcgtttcttatccgatctatcacatcgataacatcgttaagccggtttccaaagcgggccacgcaacgaaagttatcttcctgacagcagacgcctttggtgtgctgccgccggtttctcgtctgactgccgatcaaacccagtaccacttcctctctggcttcaccgccaaactggccgggactgagcgtggcatcaccgaaccgacgccaaccttctccgcctgcttcggcgcggcgttcctgtcgctgcacccaactcagtacgcagaagtgctggtaaaacgtatgcaggcagcgggtgcgcaggcgtatctggttaacaccggctggaacggcactggcaaacgtatctccattaaagatacccgcgctattatcgacgccatcctcaacggttcgctggataacgcagaaaccttcactctgccgatgtttaacctggcgatcccaaccgaactgccgggcgtagacacgaagctcctcgatccgcgtaacacctacgcttctccggaacagtggcaggaaaaagccgaaacgctggcgaaactgtttatcgacaacttcgataaatacaccgacacccctgcgggtgccgcgctggtagcggctggtccgaagctgtaa

SEQ ID NO: 98196 - protein, 540 aa, Escherichia coli O6; identical to SEQ ID NO: 83061

SEQ ID NO: 98197 - DNA, 1623 bp, Escherichia coli; identical to SEQ ID NO: 82866
  CDS (1)..(1623): transl_table=11

SEQ ID NO: 98198 - protein, 540 aa, Escherichia coli; identical to SEQ ID NO: 82867

SEQ ID NO: 98199 - DNA, 1671 bp, Emericella nidulans; identical to SEQ ID NO: 83062
  CDS (1)..(1671)

SEQ ID NO: 98200 - protein, 556 aa, Emericella nidulans; identical to SEQ ID NO: 83063

SEQ ID NO: 98201 - DNA, 1587 bp, Geobacillus kaustophilus; identical to SEQ ID NO: 83064
  CDS (1)..(1587): transl_table=11

SEQ ID NO: 98202 - protein, 528 aa, Geobacillus kaustophilus; identical to SEQ ID NO: 83065

SEQ ID NO: 98203 - DNA, 1617 bp, Haemophilus ducreyi; identical to SEQ ID NO: 83066
  CDS (1)..(1617): transl_table=11

SEQ ID NO: 98204 - protein, 538 aa, Haemophilus ducreyi; identical to SEQ ID NO: 83067

SEQ ID NO: 98205 - DNA, 1602 bp, Idiomarina loihiensis; identical to SEQ ID NO: 83072
  CDS (1)..(1602): transl_table=11

SEQ ID NO: 98206 - protein, 533 aa, Idiomarina loihiensis; identical to SEQ ID NO: 83073

SEQ ID NO: 98207 - DNA, 1632 bp, Kluyveromyces lactis; identical to SEQ ID NO: 83074
  CDS (1)..(1632)

SEQ ID NO: 98208 - protein, 543 aa, Kluyveromyces lactis; identical to SEQ ID NO: 83075

SEQ ID NO: 98209 - DNA, 1584 bp, Oceanobacillus iheyensis; identical to SEQ ID NO: 83078
  CDS (1)..(1584): transl_table=11

SEQ ID NO: 98210 - protein, 527 aa, Oceanobacillus iheyensis; identical to SEQ ID NO: 83079

SEQ ID NO: 98211 - DNA, 1611 bp, Rhizobium meliloti
  CDS (1)..(1611): transl_table=11
atggatgagctcggcagccgcaatccctctatcggactggaatcgatcggattttccgacctgtcggtggtccgctacaacttcgaggcggcgcagctttacgaagaagccctggcccgcggtgaagccgaattgacggcccatggcgcgctttgcgcccgcaccggccagcacacgggccgctcgcccaaggacaagtatgtcgtgcgcgacgccaacacggccgaccagatctggtgggacaacaacagcgcgatttcgccggagcatttcgaggttcttcgtcgggacatgctcgcgcatgcaaagggcatgtcgctgtatgtccaggacctcgtcggcggtgccgacccggagaacgcgctgccgacgcgcgtcgttaccgagttcgcctggcactcgctgttcatccgcaatctgttgatccgcccggagcgcgaggcgcttccgtcttttcagccgaagctcacgatcatcgacctgccgagcttcaaggccgatcccgtacgccacggctgccgcagcgagacggtcatcgcctgcgacctgaccaacggcctcgtgctgatcggcggtacttcctatgcgggcgagatgaagaagtcggttttcaccgttctcaattacctgctgcccgagaagtcggtgatgccgatgcactgctcggccaatgtcgggcccgccggcgacacggcgatcttcttcggcctctcgggcaccggcaagacgacgctctccgccgatccgaaccgtaccctgatcggtgacgacgagcacggctggagcgaaaagggcgtcttcaatttcgagggcggctgctatgccaaggcgatccgcctttcggaagcggccgagcccgagatctttgcgacgacgcggcgcttcggtaccgtgatggagaacgtcgtcctcgacgagcggcgccttcctgacttcgacgacggctcgctgacggagaacacccgctgcgcctatccgctgcacttcattccgaacgccagcaagaccggcacggcgccgcagccgcgcacgatcatcatgctgacggcggacgccttcggggttctgccgccgatcgccaagctgacgccggaacaggccatgtatcacttcctctccggctacaccgccaaggttgccggcaccgaaaagggcgtgacggagccggaggcgactttctcgacctgcttcggcgcacccttcatgccgcgccatccgtccgaatacggcaatcttctcaaggacctcatcgccaggaacggcgtcacctgctggctcgtcaacaccggctggaccggcggcgcctttggcacgggaagccgcatgccgatcaaggtgacgcgcgcgcttctttcggcagcgctcgacggctcgctgaacaacgcctcgttccgcacggatgcgaatttcggcttcgcggtgccggtgtcggtaccgggcgtcgaggccggcattctcgacccgcgctcgacctgggcggatggcgtggcttatgacacccaggcacggcgcctcgtcgacatgttcattgccaacttcgccaagttcgagcgccatgtcgacggcagcgtgcgcgacgcagccccgggcgcgagggtggccgccgaataa

SEQ ID NO: 98212 - protein, 536 aa, Rhizobium meliloti; identical to SEQ ID NO: 83091

SEQ ID NO: 98213 - DNA, 1617 bp, Salmonella typhimurium; identical to SEQ ID NO: 83096
  CDS (1)..(1617): transl_table=11

SEQ ID NO: 98214 - protein, 538 aa, Salmonella typhimurium; identical to SEQ ID NO: 83097

SEQ ID NO: 98215 - DNA, 1620 bp, Selenomonas ruminantium; identical to SEQ ID NO: 83098
  CDS (1)..(1620): transl_table=11

SEQ ID NO: 98216 - protein, 539 aa, Selenomonas ruminantium; identical to SEQ ID NO: 83099

SEQ ID NO: 98217 - DNA, 1593 bp, Staphylococcus aureus; identical to SEQ ID NO: 83108
  CDS (1)..(1593): transl_table=11

SEQ ID NO: 98218 - protein, 530 aa, Staphylococcus aureus; identical to SEQ ID NO: 83109

SEQ ID NO: 98219 - DNA, 1590 bp, Thermus thermophilus; identical to SEQ ID NO: 83114
  CDS (1)..(1590): transl_table=11

SEQ ID NO: 98220 - protein, 529 aa, Thermus thermophilus [sequence omitted]

SEQ ID NO: 98221 - DNA, 1566 bp, Thermoanaerobacter tengcongensis; identical to SEQ ID NO: 83116
  CDS (1)..(1566): transl_table=11

SEQ ID NO: 98222 - protein, 521 aa, Thermoanaerobacter tengcongensis; identical to SEQ ID NO: 83117

SEQ ID NO: 98223 - DNA, 1629 bp, Vibrio parahaemolyticus; identical to SEQ ID NO: 83120
  CDS (1)..(1629): transl_table=11

SEQ ID NO: 98224 - protein, 542 aa, Vibrio parahaemolyticus; identical to SEQ ID NO: 83121

SEQ ID NO: 98225 - DNA, 1620 bp, Yersinia pestis
  CDS (1)..(1620): transl_table=11
atgagtgttaaaggaattaccccgcaggagctcgccgcctatggcatccataacgtcagcgagattgtttacaacccaagctatgatttactgtttgaagaagagactaaacccacgttggaaggatacgagcgtggcacactgacgactaccggcgcaatagcggtagataccggtatttttaccgggcgttcacccaaagataaatatattgtccgcgatgctatcactcaggataccgtgtggtgggccgatcagggcaaaggtaaaaatgataataagcctctgagccaagagatctggaaccatttgaaaggtctggtgacggaacaactctctggcaaacgcctctttgttgtcgatacattctgcggtgctaatgcggatacccgcctgcaagtccgctttatcacggaagtcgcttggcaggcacacttcgtcaaaaatatgtttatccgtccatcagatgaagaactggctcggtttgaacctgactttatcgtgatgaacggtgccaaatgcactaacccacaatggaaagagcagggcctgaattcagaaaactttgtcgcctttaatctgacagaacgtatgcagttgattggtggcacgtggtatggcggcgaaatgaagaaagggatgttctcaatgatgaactacctgctgccactgaaaggcattgcttcaatgcattgttcagctaacgtcggcgaaaaaggcgatgttgccatcttcttcggtctgtcgggtaccggtaaaaccactttatctaccgatccaaaacgcaagttgatcggtgatgatgaacatggctgggatgatgatggcgtctttaacttcgagggggggtgctacgctaaaaccatcaagttatctgaagaagcagagccagatatttaccacgccattaaacgcgacgccttgctggaaaacgtggtggtgctagcagacggtaccgttgattttaatgacggttctaaaactgaaaacacccgtgtctcttatccgatttaccacattgataacattgttaaaccggtgtccaaagcaggccatgcgaccaaggttatcttcctgactgccgatgcctttggtgtgctccccccagtatctcgtctgaccgcaaaccagactcaatatcacttcctctctggctttactgccaaactggcagggacagagcgtggcgtcacggagccaacaccaaccttctctgcttgctttggtgcggccttcctgtcgctgcacccaacgcagtacgctgaagtgctggttaagcgtatgcaagcggttggcgcacaagcctatctggtcaataccggttggaacgggacaggtaagcgtatttccatcaaggatacccgcgccattattgacgcaatcctaaacggggagattgataaggcagaaacctttacgctgccaatctttgatctggcagtccctatggcgttacccggtgtgaatcccgatatcctcgatcctcgcgacacctacgccgataaagcgcaatggcaagagaaagccgaagatttggcgaaacgctttgcgactaactttgataaatacacggatacccctgcgggggccgcgttggttagcgcggggccaaagatctaa

SEQ ID NO: 98226 - protein, 539 aa, Yersinia pestis; identical to SEQ ID NO: 83131

SEQ ID NO: 98227 - DNA, 2010 bp, Brassica napus; identical to SEQ ID NO: 83134
  CDS (1)..(2010)

SEQ ID NO: 98228 - protein, 669 aa, Brassica napus; identical to SEQ ID NO: 83135

SEQ ID NO: 98229 - DNA, 2004 bp, Zea mays; identical to SEQ ID NO: 83136
  CDS (1)..(2004)

SEQ ID NO: 98230 - protein, 667 aa, Zea mays; identical to SEQ ID NO: 83137

SEQ ID NO: 98231 - DNA, 1980 bp, Zea mays; identical to SEQ ID NO: 83138
  CDS (1)..(1980)

SEQ ID NO: 98232 - protein, 659 aa, Zea mays; identical to SEQ ID NO: 83139

SEQ ID NO: 98233 - DNA, 25 bp, Artificial sequence
  primer
atgtccccttctaaaatgaatgcta

SEQ ID NO: 98234 - DNA, 23 bp, Artificial sequence
  primer
ttactcgaattgaggaccagcgg

SEQ ID NO: 98235 - protein, 547 aa, Artificial sequence
  consensus sequence
  Variant (2)..(6): Xaa in position 2 to 6 is any amino acid
  Variant (8)..(22): Xaa in position 8 to 22 is any amino acid
  Variant (23)..(27): Xaa in position 23 to 27 is any or no amino acid
  Variant (30)..(34): Xaa in position 30 to 34 is any amino acid
  Variant (36)..(37): Xaa in position 36 to 37 is any amino acid
  Variant (43)..(43): Xaa in position 43 is any amino acid
  Variant (46)..(47): Xaa in position 46 to 47 is any amino acid
  Variant (49)..(57): Xaa in position 49 to 57 is any amino acid
  Variant (58)..(58): Xaa in position 58 is any or no amino acid
  Variant (60)..(61): Xaa in position 60 to 61 is any amino acid
  Variant (62)..(68): Xaa in position 62 to 68 is any or no amino acid
  Variant (70)..(87): Xaa in position 70 to 87 is any amino acid
  Variant (89)..(94): Xaa in position 89 to 94 is any amino acid
  Variant (95)..(95): Xaa in position 95 is any or no amino acid
  Variant (97)..(106): Xaa in position 97 to 106 is any amino acid
  Variant (107)..(107): Xaa in position 107 is any or no amino acid
  Variant (109)..(117): Xaa in position 109 to 117 is any amino acid
  Variant (119)..(122): Xaa in position 119 to 122 is any amino acid
  Variant (124)..(128): Xaa in position 124 to 128 is any amino acid
  Variant (132)..(133): Xaa in position 132 to 133 is any amino acid
  Variant (134)..(138): Xaa in position 134 to 138 is any or no amino acid
  Variant (141)..(165): Xaa in position 141 to 165 is any amino acid
  Variant (166)..(167): Xaa in position 166 to 167 is any or no amino acid
  Variant (169)..(182): Xaa in position 169 to 182 is any amino acid
  Variant (184)..(184): Xaa in position 184 is any amino acid
  Variant (187)..(187): Xaa in position 187 is any amino acid
  Variant (189)..(189): Xaa in position 189 is any amino acid
  Variant (195)..(196): Xaa in position 195 to 196 is any amino acid
  Variant (198)..(201): Xaa in position 198 to 201 is any amino acid
  Variant (203)..(204): Xaa in position 203 to 204 is any amino acid
  Variant (206)..(212): Xaa in position 206 to 212 is any amino acid
  Variant (213)..(213): Xaa in position 213 is any or no amino acid
  Variant (215)..(217): Xaa in position 215 to 217 is any amino acid
  Variant (219)..(219): Xaa in position 219 is any amino acid
  Variant (221)..(223): Xaa in position 221 to 223 is any amino acid
  Variant (224)..(224): Xaa in position 224 is any or no amino acid
  Variant (226)..(228): Xaa in position 226 to 228 is any amino acid
  Variant (242)..(242): Xaa in position 242 is any amino acid
  Variant (244)..(245): Xaa in position 244 to 245 is any amino acid
  Variant (247)..(247): Xaa in position 247 is any amino acid
  Variant (255)..(255): Xaa in position 255 is any amino acid
  Variant (257)..(259): Xaa in position 257 to 259 is any amino acid
  Variant (260)..(260): Xaa in position 260 is any or no amino acid
  Variant (263)..(263): Xaa in position 263 is any amino acid
  Variant (265)..(265): Xaa in position 265 is any amino acid
  Variant (273)..(273): Xaa in position 273 is any amino acid
  Variant (275)..(275): Xaa in position 275 is any amino acid
  Variant (278)..(278): Xaa in position 278 is any amino acid
  Variant (280)..(280): Xaa in position 280 is any amino acid
  Variant (283)..(283): Xaa in position 283 is any amino acid
  Variant (285)..(286): Xaa in position 285 to 286 is any amino acid
  Variant (289)..(293): Xaa in position 289 to 293 is any amino acid
  Variant (294)..(294): Xaa in position 294 is any or no amino acid
  Variant (299)..(306): Xaa in position 299 to 306 is any amino acid
  Variant (307)..(307): Xaa in position 307 is any or no amino acid
  Variant (309)..(310): Xaa in position 309 to 310 is any amino acid
  Variant (312)..(314): Xaa in position 312 to 314 is any amino acid
  Variant (320)..(321): Xaa in position 320 to 321 is any amino acid
  Variant (324)..(326): Xaa in position 324 to 326 is any amino acid
  Variant (328)..(332): Xaa in position 328 to 332 is any amino acid
  Variant (333)..(336): Xaa in position 333 to 336 is any or no amino acid
  Variant (338)..(348): Xaa in position 338 to 348 is any amino acid
  Variant (349)..(349): Xaa in position 349 is any or no amino acid
  Variant (351)..(352): Xaa in position 351 to 352 is any amino acid
  Variant (355)..(355): Xaa in position 355 is any amino acid
  Variant (361)..(361): Xaa in position 361 is any amino acid
  Variant (363)..(363): Xaa in position 363 is any amino acid
  Variant (365)..(367): Xaa in position 365 to 367 is any amino acid
  Variant (369)..(370): Xaa in position 369 to 370 is any amino acid
  Variant (374)..(374): Xaa in position 374 is any amino acid
  Variant (377)..(377): Xaa in position 377 is any amino acid
  Variant (379)..(381): Xaa in position 379 to 381 is any amino acid
  Variant (386)..(386): Xaa in position 386 is any amino acid
  Variant (388)..(389): Xaa in position 388 to 389 is any amino acid
  Variant (390)..(390): Xaa in position 390 is any or no amino acid
  Variant (393)..(394): Xaa in position 393 to 394 is any amino acid
  Variant (398)..(398): Xaa in position 398 is any amino acid
  Variant (402)..(403): Xaa in position 402 to 403 is any amino acid
  Variant (405)..(408): Xaa in position 405 to 408 is any amino acid
  Variant (410)..(411): Xaa in position 410 to 411 is any amino acid
  Variant (414)..(415): Xaa in position 414 to 415 is any amino acid
  Variant (417)..(428): Xaa in position 417 to 428 is any amino acid
  Variant (430)..(430): Xaa in position 430 is any amino acid
  Variant (435)..(435): Xaa in position 435 is any amino acid
  Variant (437)..(439): Xaa in position 437 to 439 is any amino acid
  Variant (440)..(446): Xaa in position 440 to 446 is any or no amino acid
  Variant (448)..(452): Xaa in position 448 to 452 is any amino acid
  Variant (455)..(458): Xaa in position 455 to 458 is any amino acid
  Variant (460)..(462): Xaa in position 460 to 462 is any amino acid
  Variant (464)..(464): Xaa in position 464 is any amino acid
  Variant (466)..(475): Xaa in position 466 to 475 is any amino acid
  Variant (476)..(478): Xaa in position 476 to 478 is any or no amino acid
  Variant (480)..(480): Xaa in position 480 is any amino acid
  Variant (482)..(483): Xaa in position 482 to 483 is any amino acid
  Variant (485)..(488): Xaa in position 485 to 488 is any amino acid
  Variant (489)..(489): Xaa in position 489 is any or no amino acid
  Variant (492)..(495): Xaa in position 492 to 495 is any amino acid
  Variant (496)..(496): Xaa in position 496 is any or no amino acid
  Variant (498)..(498): Xaa in position 498 is any amino acid
  Variant (500)..(514): Xaa in position 500 to 514 is any amino acid
  Variant (515)..(516): Xaa in position 515 to 516 is any or no amino acid
  Variant (518)..(520): Xaa in position 518 to 520 is any amino acid
  Variant (522)..(523): Xaa in position 522 to 523 is any amino acid
  Variant (526)..(536): Xaa in position 526 to 536 is any amino acid
  Variant (537)..(545): Xaa in position 537 to 545 is any or no amino acid
NXXXXXLXXXXXXXXXXXXXXXXXXXXGAXXXXXGXXTGRSPXDKXXVXXXXXXXXXXWXXXXXXXXXNXXXXXXXXXXXXXXXXXXLXXXXXXXVXXXXXXXXXXXRXXXXXXXXXAXXXXFXXXXXIRPXXXXXXXELXXXXXXXXXXXXXXXXXXXXXXXXXXXSXXXXXXXXXXXXXXIXGTXYXGEMKKXXFXXXXYXXPXXXXXXXXHXXXNXGXXXXDXXXFFGLSGTGKTTLSXDXXRXLIGDDEHXWXXXXGVXNXEGGCYAKXIXLSXEXEPXIXXAIXXXXXXLENVXXXXXXXXXDXXDXXXTENTRXXYPXXXIXXXXXXXXXPXXXXXXXXXXXXLXXDAXGVLPPXSXLXXXQXXYHFXSGXTXXXAGTEXGXXXEPXXTFSXCFGXXFXXXXPXXYAXXLXXXXXXXXXXXXLXNTGWXGXXXXXXXXXXRXXXXXTRXXXXAXXXGXLXXXXXXXXXXXXXFXLXXPXXXXXGVXXXXXLXPXXXXXXXXXXXXXXXXXLXXXFXXNFXXXXXXXXXXXXXXXXXXXXAG

SEQ ID NO: 98236 - protein, 32 aa, Artificial sequence; identical to SEQ ID NO: 83143
  protein pattern
  Variant (2)..(2): Xaa in position 2 is Thr or Val
  Variant (3)..(3): Xaa in position 3 is Ala or Thr
  Variant (4)..(4): Xaa in position 4 is Ile, Leu or Val
  Variant (18)..(18): Xaa in position 18 is Ala or Thr
  Variant (20)..(21): Xaa in position 20 to 21 is any amino acid
  Variant (23)..(23): Xaa in position 23 is any amino acid
  Variant (31)..(31): Xaa in position 31 is Cys or Gly

SEQ ID NO: 98237 - protein, 37 aa, Artificial sequence
  protein pattern
  Variant (2)..(3): Xaa in position 2 to 3 is any amino acid
  Variant (4)..(4): Xaa in position 4 is any or no amino acid
  Variant (7)..(7): Xaa in position 7 is any amino acid
  Variant (8)..(8): Xaa in position 8 is Gly or Ser
  Variant (13)..(13): Xaa in position 13 is Ile or Val
  Variant (14)..(14): Xaa in position 14 is Ala or Ser
  Variant (15)..(15): Xaa in position 15 is any amino acid
  Variant (17)..(19): Xaa in position 17 to 19 is any amino acid
  Variant (20)..(20): Xaa in position 20 is Glu or Gln
  Variant (21)..(21): Xaa in position 21 is Ala, Thr or Val
  Variant (22)..(22): Xaa in position 22 is any amino acid
  Variant (23)..(23): Xaa in position 23 is Phe or Tyr
  Variant (24)..(24): Xaa in position 24 is His or Tyr
  Variant (26)..(26): Xaa in position 26 is Ile or Leu
  Variant (29)..(29): Xaa in position 29 is Phe or Tyr
  Variant (31)..(31): Xaa in position 31 is Ala or Ser
  Variant (32)..(33): Xaa in position 32 to 33 is any amino acid
  Variant (34)..(34): Xaa in position 34 is Ala or Pro
LXXXDAXXVLPPXXXLXXXXXXXXFXSGXTXXXXGTE

SEQ ID NO: 98238 - protein, 28 aa, Artificial sequence
  protein pattern
  Variant (2)..(2): Xaa in position 2 is any or no amino acid
  Variant (4)..(4): Xaa in position 4 is any amino acid
  Variant (6)..(6): Xaa in position 6 is Phe, Ile, Leu or Val
  Variant (14)..(14): Xaa in position 14 is Ala, Cys, Thr or Val
  Variant (15)..(15): Xaa in position 15 is Ile, Leu or Val
  Variant (16)..(16): Xaa in position 16 is any amino acid
  Variant (18)..(19): Xaa in position 18 to 19 is any amino acid
  Variant (20)..(21): Xaa in position 20 to 21 is any or no amino acid
  Variant (24)..(24): Xaa in position 24 is any amino acid
  Variant (26)..(26): Xaa in position 26 is Phe, Trp or Tyr
  Variant (27)..(27): Xaa in position 27 is any amino acid
  Variant (28)..(28): Xaa in position 28 is Ala, Ser or Thr
GXVXNXEGGCYAKXXXLXXXXEPXIXXX

SEQ ID NO: 98239 - protein, 46 aa, Artificial sequence
  protein pattern
  Variant (2)..(3): Xaa in position 2 to 3 is any amino acid
  Variant (4)..(4): Xaa in position 4 is any or no amino acid
  Variant (6)..(6): Xaa in position 6 is any amino acid
  Variant (7)..(7): Xaa in position 7 is Ala or Pro
  Variant (11)..(11): Xaa in position 11 is Ala, Ser or Thr
  Variant (14)..(14): Xaa in position 14 is Ala or Gly
  Variant (15)..(15): Xaa in position 15 is Ala, Glu, Asn, Gln or Ser
  Variant (16)..(16): Xaa in position 16 is Ala or Pro
  Variant (18)..(18): Xaa in position 18 is Ile or Leu
  Variant (19)..(21): Xaa in position 19 to 21 is any amino acid
  Variant (22)..(22): Xaa in position 22 is Ala or Pro
  Variant (23)..(24): Xaa in position 23 to 24 is any amino acid
  Variant (27)..(28): Xaa in position 27 to 28 is any amino acid
  Variant (30)..(32): Xaa in position 30 to 32 is any amino acid
  Variant (33)..(33): Xaa in position 33 is Ile, Leu or Met
  Variant (34)..(39): Xaa in position 34 to 39 is any amino acid
  Variant (40)..(40): Xaa in position 40 is Ala, Gly or Val
  Variant (41)..(41): Xaa in position 41 is Phe, Trp or Tyr
  Variant (43)..(43): Xaa in position 43 is Ile, Leu or Val
GXXXPXXTFSXCFXXXFXXXXXXXYAXXLXXXXXXXXXXXXLXNTG

SEQ ID NO: 98240 - protein, 40 aa, Artificial sequence
  protein pattern
  Variant (2)..(15): Xaa in position 2 to 15 is any amino acid
  Variant (16)..(16): Xaa in position 16 is any or no amino acid
  Variant (18)..(18): Xaa in position 18 is any or no amino acid
  Variant (20)..(20): Xaa in position 20 is any or no amino acid
  Variant (22)..(22): Xaa in position 22 is any amino acid
  Variant (24)..(24): Xaa in position 24 is Ala or Gly
  Variant (27)..(27): Xaa in position 27 is Ile or Met
  Variant (30)..(30): Xaa in position 30 is Gly or Ser
  Variant (31)..(31): Xaa in position 31 is Ile, Leu, Met or Val
  Variant (33)..(33): Xaa in position 33 is Ala, Gly, Ser or Thr
  Variant (34)..(34): Xaa in position 34 is Ile, Leu, Met or Val
  Variant (35)..(35): Xaa in position 35 is Leu or Met
  Variant (36)..(36): Xaa in position 36 is any amino acid
  Variant (37)..(37): Xaa in position 37 is Phe or Tyr
  Variant (38)..(38): Xaa in position 38 is any amino acid
  Variant (39)..(39): Xaa in position 39 is Leu or Met
SXXXXXXXXXXXXXXXIXGXTXYXGEXKKXXFXXXXXXXP

SEQ ID NO: 98241 - protein, 20 aa, Artificial sequence
  protein pattern
  Variant (2)..(3): Xaa in position 2 to 3 is any or no amino acid
  Variant (5)..(7): Xaa in position 5 to 7 is any amino acid
  Variant (9)..(9): Xaa in position 9 is Glu or Gln
  Variant (13)..(13): Xaa in position 13 is Ala, Cys, Ser or Val
  Variant (14)..(14): Xaa in position 14 is Ala or Ser
  Variant (17)..(17): Xaa in position 17 is Ile, Leu or Met
  Variant (18)..(19): Xaa in position 18 to 19 is any amino acid
  Variant (20)..(20): Xaa in position 20 is Ile or Leu
DXXDXXXTXNTRXXYPXXXX

SEQ ID NO: 98242 - protein, 21 aa, Artificial sequence
  protein pattern
  Variant (3)..(3): Xaa in position 3 is Phe, Ile, Leu or Val
  Variant (4)..(4): Xaa in position 4 is any amino acid
  Variant (5)..(5): Xaa in position 5 is Ala, Asn, Thr or Val
  Variant (6)..(6): Xaa in position 6 is any amino acid
  Variant (7)..(7): Xaa in position 7 is Ser or Thr
  Variant (9)..(10): Xaa in position 9 to 10 is any amino acid
  Variant (16)..(16): Xaa in position 16 is any amino acid
  Variant (19)..(19): Xaa in position 19 is any amino acid
  Variant (20)..(20): Xaa in position 20 is any or no amino acid
GAXXXXXGXXTGRSPXDKXXV

SEQ ID NO: 98243 - DNA, 897 bp, Saccharomyces cerevisiae
  CDS (1)..(897)
atgtcaaccaacgcaaaagagtctgccggtaagaatatcaagtatccatggtggtacggaggtgcagcgggtatctttgctaccatggtgacacatcctcttgacttggccaaagtcagactgcaggcggctcctatgcccaagcccacactcttcaggatgttggagagtatcttggcgaatgaaggtgtggtggggttatattccggcctgagcgctgctgtgttgaggcaatgtacatacacgacggtgagattcggtgcatacgacttgttgaaagagaatgtgatcccacgcgagcaattgactaacatggcgtatcttttaccttgctccatgttcagtggtgccattggggggcttgcagggaattttgcagatgttgtaaatatcagaatgcaaaacgactctgctttggaggcagcgaagaggagaaactacaaaaacgctatcgatggtgtgtacaagatatatcgctacgagggtggactgaaaaccttgtttaccggttggaagcctaacatggttaggggcatactgatgacggcaagtcaggtcgttacgtatgacgtgtttaagaactacttggtcacaaaattagatttcgacgcatccaagaactatacacacttgacagcgtccctgttggctggcctggtggccaccactgtgtgctctccagcagacgtcatgaagacacgtatcatgaacggcagcggagaccatcaaccggctttgaagatccttgccgacgctgtccgcaaagagggcccatctttcatgttccgggggtggttgccaagtttcactagactgggtccattcacaatgttaattttctttgcaattgagcaattgaaaaaacatagggttggcatgccaaaggaagacaagtag

SEQ ID NO: 98244 - protein, 298 aa, Saccharomyces cerevisiae
MSTNAKESAGKNIKYPWWYGGAAGIFATMVTHPLDLAKVRLQAAPMPKPTLFRMLESILANEGVVGLYSGLSAAVLRQCTYTTVRFGAYDLLKENVIPREQLTNMAYLLPCSMFSGAIGGLAGNFADVVNIRMQNDSALEAAKRRNYKNAIDGVYKIYRYEGGLKTLFTGWKPNMVRGILMTASQVVTYDVFKNYLVTKLDFDASKNYTHLTASLLAGLVATTVCSPADVMKTRIMNGSGDHQPALKILADAVRKEGPSFMFRGWLPSFTRLGPFTMLIFFAIEQLKKHRVGMPKEDK

SEQ ID NO: 98245 - DNA, 921 bp, Oryza sativa (japonica cultivar-group)
  CDS (1)..(921)
atggcggacgcgaagcagcagcagcagcagcagacggcggcggccgccacgggggtctggaagacggtgaagcccttcgtcaacggcggggcctccgggatgctcgccacctgcgtcatccagcccatcgacatggtcaaggtgaagatccagctgggagagggatctgcagctcaggtcacaaagaacatgcttgctaatgagggtattggttccttttacaagggtttgtcagctggtttactaaggcaggcgacatatactactgctcgtcttggatccttcagggttctgacaaacaaagcaattgaaaagaatgatggaaagccattgcctttagttcagaaagcttttattggccttactgctggagctattggagcatgtgttggtagccctgctgatttggcactcattaggatgcaagctgattcgaccttgccaattgcacaacgccgtaactacaagaatgctttccatgcgctctaccgtattattgctgatgaaggtgtccttgccctttggaagggagcaggacctactgtggttagagctatggccctgaacatgggtatgcttgcttcctatgatcagagtgttgagctattcagagacaaacttggtgctggagaagtttcgactgtacttggagccagtgctgtttctgggttctttgcatcggcctgcagtctgccttttgactatgtgaagacacaaatccagaagatgcaacctgatgccagtgggaagtacccgtacaccggttctttggactgtgccatgaagaccttcaagagcggtggcccattcaagttctacactggcttccctgtgtactgtgtcaggattgctccccatgtgatgatgacatggatattcttgaatcaaatccagaagttcgagaagcagattggaatataa

SEQ ID NO: 98246 - protein, 306 aa, Oryza sativa (japonica cultivar-group)
MADAKQQQQQQTAAAATGVWKTVKPFVNGGASGMLATCVIQPIDMVKVKIQLGEGSAAQVTKNMLANEGIGSFYKGLSAGLLRQATYTTARLGSFRVLTNKAIEKNDGKPLPLVQKAFIGLTAGAIGACVGSPADLALIRMQADSTLPIAQRRNYKNAFHALYRIIADEGVLALWKGAGPTVVRAMALNMGMLASYDQSVELFRDKLGAGEVSTVLGASAVSGFFASACSLPFDYVKTQIQKMQPDASGKYPYTGSLDCAMKTFKSGGPFKFYTGFPVYCVRIAPHVMMTWIFLNQIQKFEKQIGI

SEQ ID NO: 98247 - DNA, 966 bp, Oryza sativa (japonica cultivar-group)
  CDS (1)..(966)
atggggctgaaggggttcgtggagggcggcgccgcctgcgtcgtggccggcagctgcacccacccgctcgatctcatcaaggtccggatgcagcttcacggcgaggggccccctgccccagcgctcgcgttccccggcggcggcgcgcaccaccaccaccaccaccacctgctgcagcagcagccgccgcgtaggcccgggccgatcgccgtgtgcgcgcagatcctccgcgcggaggggccaaccgggctgctctccggcgtgtcggcgaccatgctgcggcagacgctctactccacgacctgcatggggctgtacgacacgctcaagaggaggtgggagcgtgacgacggcggcggcggcggcccgctgccgctgcaccggaaggtcgcggcggggctcttctccggcggcgtcggcgcggccgtggggaacccggccgacgtggccatggtgcggatgcaggcggacgggcggctccccgcggcgcagcggcggaactaccggagcgtcgcggacgccatcgtccggatggcccgggacgagggcgtgtgcagcctgtggcgcgggtcgccgctcaccgtgaagcgcgccatgatcgtggcggcgtcgcagctggccacgtacgaccaggccaaggaggccatcctggcgcgccgcggccagggcgccgacgggctcgccacgcacgtcgcggccggcctcgccgccggcctcgtggccgcgtcggcgtccacccccgtcgacgtcgtcaagaccagggtcatgaacatgaaggtggtggccggcgcgccgccgccctactccggtgcgctcgactgcctgatcaagaccgtgcgttcggagggggcgatggcgctgtacaaggggttcgtcccgacggtgacgaggcaggggcccttcaccatcgtcctcttcgtgaccctcgagcaggttcggaagctgttgaagggcgtcgacttctga

SEQ ID NO: 98248 - protein, 321 aa, Oryza sativa (japonica cultivar-group)
MGLKGFVEGGAACVVAGSCTHPLDLIKVRMQLHGEGPPAPALAFPGGGAHHHHHHHLLQQQPPRRPGPIAVCAQILRAEGPTGLLSGVSATMLRQTLYSTTCMGLYDTLKRRWERDDGGGGGPLPLHRKVAAGLFSGGVGAAVGNPADVAMVRMQADGRLPAAQRRNYRSVADAIVRMARDEGVCSLWRGSPLTVKRAMIVAASQLATYDQAKEAILARRGQGADGLATHVAAGLAAGLVAASASTPVDVVKTRVMNMKVVAGAPPPYSGALDCLIKTVRSEGAMALYKGFVPTVTRQGPFTIVLFVTLEQVRKLLKGVDF

SEQ ID NO: 98249 - DNA, 930 bp, Oryza sativa (japonica cultivar-group)
  CDS (1)..(930)
atggcggaggcgaagcagcagcagcagcagccgcaggcggcgacggcggcggcggcgagcggggtgtggaagacggtgaagcccttcgccaacggcggcgcctccgggatgctcgccacctgcgtcatccagcccatcgacatggtcaaggtgaggatccagttgggtgagggctcggcggcttctgtcaccaagaaaatgcttgcaaatgagggaattagtgccttctacaagggcttgtctgctggtttgctcaggcaagcaacatacacaaccgctcgtctcggatcctttagggttctaacaaacaaagcggttgaagcaaatgatgggaagccactgcctctagtccagaaagctggtattggtctcaccgcaggagcaattggagcctgtgttggtagtcctgcggatttggcactcattaggatgcaggctgattcaacgttgccagcagcccaaagtcgcaattataagaatgcttttcatgcactttatcgtattgctgctgatgaaggtgttctagcactttggaagggcgcaggtccaactgtagtgagagctatgtcgctaaatatgggcatgcttgcctcctatgatcagagtgtggagttatttagagacacacttggtgctggagaagtcactactgtacttggggccagtgctgtttcagggttatgtgcgtctgcttgcagtttaccctttgattatgtgaagacacagattcaaaagatgcagcctgatgcctccgggaagtatccatacactgggtctcttgattgtgccatgaagaccttgaagagtggaggcccatttaagttctacactggctttcctgtgtactgtgtcaggattgcaccacatgccatgatgacttggatattcctaaatgagatccagaagctcgagaagcgtttaggcctctaa

SEQ ID NO: 98250 - protein, 309 aa, Oryza sativa (japonica cultivar-group)
MAEAKQQQQQPQAATAAAASGVWKTVKPFANGGASGMLATCVIQPIDMVKVRIQLGEGSAASVTKKMLANEGISAFYKGLSAGLLRQATYTTARLGSFRVLTNKAVEANDGKPLPLVQKAGIGLTAGAIGACVGSPADLALIRMQADSTLPAAQSRNYKNAFHALYRIAADEGVLALWKGAGPTVVRAMSLNMGMLASYDQSVELFRDTLGAGEVTTVLGASAVSGLCASACSLPFDYVKTQIQKMQPDASGKYPYTGSLDCAMKTLKSGGPFKFYTGFPVYCVRIAPHAMMTWIFLNEIQKLEKRLGL

SEQ ID NO: 98251 - DNA, 918 bp, Arabidopsis thaliana
  CDS (1)..(918)
atggagcggagccgagtgaccagagaagcaccgaccggaaccaggatcctgcttgcttcactctctgcgatggttgcagagtcagttacgtttccgattgatctcacaaagactagaatgcagctccatggttcgggatccgcttctggtgcgcatcggattggcgctttcggagtcgtatcggagattgcgagaaaggaaggagtgattggtctctacaaaggtctatctccggcgattatcagacacctgttctacacgcctatcagaatcattggatacgagaatttgaaaggactcatcgtcagatctgaaactaacaatagcgagtctcttcctctcgccacaaaggctctcgtcggaggattttctggtgttatagctcaggtagtggctagtccagctgatttggtcaaagtgagaatgcaagcagatggtagattggtgagccaaggcctgaaaccgaggtactcgggaccaatcgaggcttttaccaaaatcctacaatcagaaggagtaaaagggttatggaaaggtgttcttccaaacatccagagagcatttctagtgaatatgggagaactagcttgctatgatcacgccaaacactttgtcatcgataagaagattgctgaggataacatttttgcgcacactcttgcttctataatgtcgggtcttgcttcgacaagtttgagttgtccagctgatgtggtgaagacgaggatgatgaaccagggtgaaaatgctgtgtacagaaattcttacgactgtttggtgaagacggttaagtttgaaggaataagagctttgtggaaaggtttcttcccgacatgggcaaggcttggaccgtggcagttcgtgttttgggtctcctatgagaagtttagactgctggcaggaatctcttccttctag

SEQ ID NO: 98252 - protein, 305 aa, Arabidopsis thaliana
MERSRVTREAPTGTRILLASLSAMVAESVTFPIDLTKTRMQLHGSGSASGAHRIGAFGVVSEIARKEGVIGLYKGLSPAIIRHLFYTPIRIIGYENLKGLIVRSETNNSESLPLATKALVGGFSGVIAQVVASPADLVKVRMQADGRLVSQGLKPRYSGPIEAFTKILQSEGVKGLWKGVLPNIQRAFLVNMGELACYDHAKHFVIDKKIAEDNIFAHTLASIMSGLASTSLSCPADVVKTRMMNQGENAVYRNSYDCLVKTVKFEGIRALWKGFFPTWARLGPWQFVFWVSYEKFRLLAGISSF

SEQ ID NO: 98253 - DNA, 942 bp, Arabidopsis thaliana
  CDS (1)..(942)
atgggtctaaagggttttgctgaaggaggaatagcttcgattgttgcgggttgttcgacccacccgcttgatctaatcaaggtccgaatgcaacttcaaggcgaatcagctccgattcaaaccaatctccgaccagctcttgcttttcagacttcgaccaccgtcaacgcgcctcctctacgtgttggtgtaatcggagtcggatctcgtttaataagagaagaaggcatgcgtgctctgttttccggcgtctccgccaccgttcttcgtcaaactctgtattcaacgactcgtatgggtttatacgacatcatcaaaggagaatggaccgacccggaaacaaaaacgatgcctttaatgaaaaaaatcggtgccggagccatcgccggagcaatcggagccgccgttgggaatcctgctgacgtggcgatggtgaggatgcaagccgatggtcgtttaccgttgactgatagaagaaactacaaaagcgttttagacgcgatcacgcaaatgattcgcggtgaaggcgttacgtcgttgtggagaggatcgtctttgacgataaacagagcaatgcttgtgacgtcatcgcagttggcttcgtatgattctgttaaagagacgattttggagaaagggttgttgaaagatgggcttgggactcatgtgtcggcgagtttcgcggcggggtttgttgcgagcgttgcgagtaatcctgttgatgtgattaagacgagagtgatgaatatgaaggtggtggctggagttgctccgccgtataaaggagcggttgattgtgctttgaaaacggtgaaagcggaagggattatgtctttgtataaaggttttatcccgacggtttcgagacaagcaccgttcacggtggttttgtttgttacgcttgaacaagttaagaagttgttcaaggactatgacttttga

SEQ ID NO: 98254 - protein, 313 aa, Arabidopsis thaliana
MGLKGFAEGGIASIVAGCSTHPLDLIKVRMQLQGESAPIQTNLRPALAFQTSTTVNAPPLRVGVIGVGSRLIREEGMRALFSGVSATVLRQTLYSTTRMGLYDIIKGEWTDPETKTMPLMKKIGAGAIAGAIGAAVGNPADVAMVRMQADGRLPLTDRRNYKSVLDAITQMIRGEGVTSLWRGSSLTINRAMLVTSSQLASYDSVKETILEKGLLKDGLGTHVSASFAAGFVASVASNPVDVIKTRVMNMKVVAGVAPPYKGAVDCALKTVKAEGIMSLYKGFIPTVSRQAPFTVVLFVTLEQVKKLFKDYDF

SEQ ID NO: 98255 - DNA, 942 bp, Arabidopsis thaliana
  CDS (1)..(942)
atgggagtcaaaagtttcgttgaaggtgggattgcctctgtaatcgccggttgctctactcaccctctcgatctaatcaaggttcgtcttcagcttcacggtgaagcaccttccaccaccaccgtcactctcctccgtccagctctcgctttccccaattcttctcctgcagctttcctggaaacgacttcttcagtccccaaagtaggaccgatctcactcggaatcaacatagtcaaatcggaaggcgccgccgcgttattctcaggagtctccgctacacttctccgtcagacgttatattccaccaccaggatgggtctatacgaagtgcttaagaacaaatggactgatcctgagtcagggaagttgaatctgagtaggaagatcggtgcagggctagtcgctggtggaatcggagccgccgttggaaatccagctgacgtggcgatggttaggatgcaagctgacgggaggttacctttagcgcaacgtcgtaactacgccggagtaggagacgcaatcaggagcatggttaagggagaaggcgtaacgagcttgtggcgaggctcggcgttgacgattaaccgagcgatgattgtgacggcggctcagctagcgtcttacgatcagttcaaggaagggatattggagaatggtgtgatgaatgatgggctagggactcacgtggtagcgagttttgcggcggggtttgttgcttcggttgcgtctaatccggtggatgtgataaagacgagagtgatgaatatgaaggtgggagcgtacgacggcgcgtgggattgtgcggtgaagacggttaaagcggaaggagccatggctctttataaaggctttgttcctacagtttgtaggcaaggtcctttcactgttgttctcttcgttacgttggagcaagttaggaagctgcttcgagatttttga

SEQ ID NO: 98256 - protein, 313 aa, Arabidopsis thaliana
MGVKSFVEGGIASVIAGCSTHPLDLIKVRLQLHGEAPSTTTVTLLRPALAFPNSSPAAFLETTSSVPKVGPISLGINIVKSEGAAALFSGVSATLLRQTLYSTTRMGLYEVLKNKWTDPESGKLNLSRKIGAGLVAGGIGAAVGNPADVAMVRMQADGRLPLAQRRNYAGVGDAIRSMVKGEGVTSLWRGSALTINRAMIVTAAQLASYDQFKEGILENGVMNDGLGTHVVASFAAGFVASVASNPVDVIKTRVMNMKVGAYDGAWDCAVKTVKAEGAMALYKGFVPTVCRQGPFTVVLFVTLEQVRKLLRDF

SEQ ID NO: 98257 - DNA, 1014 bp, Arabidopsis thaliana
  CDS (1)..(1014)
atgggcttcaaaccatttcttgaaggtggcatcgccgcaatcatcgccggagctctgactcacccattagacctcatcaaagtccgtatgcagcttcaaggcgaacattctttctcgctcgaccaaaaccctaaccctaatcttagccttgatcataatcttcccgtgaaaccttaccgacccgttttcgctcttgactctctcatcggcagcatttccttattacccttacacattcacgcgccgtcttcttccacgcgctccgtcatgacccctttcgccgtaggggcacacattgtcaaaaccgaaggacccgccgctctcttctccggcgtctccgccaccatcctccgtcagatgctttactctgccacccgtatgggtatatacgactttcttaaacgaaggtggactgatcaactcaccggtaacttcccattggtaaccaagatcacagctggactcatcgcaggagccgttggatcagtcgtcgggaatcctgctgacgtggcgatggtgagaatgcaagccgacggaagcttgccgttaaaccgtcgcagaaactacaagagcgtcgtggacgcgatcgacaggatcgcaaggcaagaaggcgtttcaagtttatggcgtggctcatggctaaccgtgaaccgtgccatgatcgtgacagcttctcagctcgctacgtatgatcacgtcaaagaaatcttggtagctggtggccgtggaacgccgggagggataggaacgcatgtagcggcgagttttgcggcggggatcgtcgcggcggtggcgtcgaatcccatcgacgttgtgaagacgaggatgatgaatgcggataaggagatttacggtggaccgttggattgtgcggtgaagatggtggcagaggaaggaccaatggctttgtacaaagggcttgttccgacggcgacgaggcaaggaccgttcacgatgatcttgttccttaccttggaacaagttcgtggtctgttaaaagacgttaaattttga

SEQ ID NO: 98258 - protein, 337 aa, Arabidopsis thaliana
MGFKPFLEGGIAAIIAGALTHPLDLIKVRMQLQGEHSFSLDQNPNPNLSLDHNLPVKPYRPVFALDSLIGSISLLPLHIHAPSSSTRSVMTPFAVGAHIVKTEGPAALFSGVSATILRQMLYSATRMGIYDFLKRRWTDQLTGNFPLVTKITAGLIAGAVGSVVGNPADVAMVRMQADGSLPLNRRRNYKSVVDAIDRIARQEGVSSLWRGSWLTVNRAMIVTASQLATYDHVKEILVAGGRGTPGGIGTHVAASFAAGIVAAVASNPIDVVKTRMMNADKEIYGGPLDCAVKMVAEEGPMALYKGLVPTATRQGPFTMILFLTLEQVRGLLKDVKF

SEQ ID NO: 98259 - DNA, 897 bp, Arabidopsis thaliana
  CDS (1)..(897)
atggcggaagagaagaaagctccaatcagtgtctggactaccgtgaagcccttcgtcaatggcggtgcctctggtatgctcgctacttgcgttatccagccgatcgacatgattaaggtgaggattcaacttggtcagggatctgcagccagtataaccaccaacatgcttaagaatgagggcgttggtgccttctacaagggattatctgctgggttgctgaggcaagcaacttacacgacagcccgtcttggatcattcaagttgctgactgcaaaggcaattgagtctaatgatggaaagcctctaccgctgtatcagaaggcactatgtggtctgacagctggtgctattggtgcttgcgtcggtagtccagccgatctagcacttatcagaatgcaggccgataatactttgccgctagctcagcgcaggaattataccaatgctttccatgcgcttacccgtattagcgctgatgagggagttttagcactttggaaagggtgtgggcccactgtggtcagagctatggctttgaacatgggaatgcttgcatcttatgatcaaagtgctgaatacatgagagataatcttggtttcggggagatgtctacggtcgtaggagcaagtgctgtttctgggttctgcgctgcggcttgcagtctgccatttgactttgtcaaaactcagattcagaaaatgcaaccggatgctcaaggaaagtatccatacacaggttcgctcgattgtgcgatgaaaaccttaaaagaaggaggacctctgaaattttactcgggtttcccagtttactgtgtcaggattgcccctcacgtcatgatgacatggatcttcctaaaccagattacgaaatttcaaaagaagattggtatgtga

SEQ ID NO: 98260 - protein, 298 aa, Arabidopsis thaliana
MAEEKKAPISVWTTVKPFVNGGASGMLATCVIQPIDMIKVRIQLGQGSAASITTNMLKNEGVGAFYKGLSAGLLRQATYTTARLGSFKLLTAKAIESNDGKPLPLYQKALCGLTAGAIGACVGSPADLALIRMQADNTLPLAQRRNYTNAFHALTRISADEGVLALWKGCGPTVVRAMALNMGMLASYDQSAEYMRDNLGFGEMSTVVGASAVSGFCAAACSLPFDFVKTQIQKMQPDAQGKYPYTGSLDCAMKTLKEGGPLKFYSGFPVYCVRIAPHVMMTWIFLNQITKFQKKIGM

SEQ ID NO: 98261 - DNA, 918 bp, Arabidopsis thaliana
  CDS (1)..(918)
atggcggatttcaaaccaaggatcgagatttcgttccttgaaaccttcatttgcagcgctttcgctgcttgttttgctgagttatgtactataccgttggacacagccaaagttagacttcagcttcaaagaaagattcccactggagatggtgagaatttgcccaagtatagaggatcaattggtactctagctaccatagctagagaagaaggtatttcaggtctttggaaaggtgttattgcaggacttcatcgccaatgtatctatggtggcttaaggattgggttatatgagcctgtgaagacacttttggttggaagtgactttattggcgatattcctttatatcaaaagattcttgcagctttgttaactggagctatagctattattgtagctaatccaactgatcttgttaaagttcggcttcaatcagaaggaaagttaccggctggggttcctaggcgttatgcaggagctgtagacgcttatttcaccattgtgaagctggaaggagttagtgcgctatggactggacttggtcccaatattgcccggaatgctattgtaaatgctgcagagttagctagttatgatcaaataaaggagacaattatgaaaattccgttcttcagagacagtgttttaactcatctactagctggtttagctgcaggcttcttcgctgtctgcatcggttctccaattgatgtggtgaaatctagaatgatgggagactctacttaccgaaacacagtcgattgcttcatcaaaacgatgaagaccgaggggattatggcattctacaaaggatttctcccgaattttacacggctaggaacctggaatgccattatgttcctcacattagaacaagtgaaaaaagtgtttctaagagaagtcttgtacgattga

SEQ ID NO: 98262 - protein, 305 aa, Arabidopsis thaliana
MADFKPRIEISFLETFICSAFAACFAELCTIPLDTAKVRLQLQRKIPTGDGENLPKYRGSIGTLATIAREEGISGLWKGVIAGLHRQCIYGGLRIGLYEPVKTLLVGSDFIGDIPLYQKILAALLTGAIAIIVANPTDLVKVRLQSEGKLPAGVPRRYAGAVDAYFTIVKLEGVSALWTGLGPNIARNAIVNAAELASYDQIKETIMKIPFFRDSVLTHLLAGLAAGFFAVCIGSPIDVVKSRMMGDSTYRNTVDCFIKTMKTEGIMAFYKGFLPNFTRLGTWNAIMFLTLEQVKKVFLREVLYD

SEQ ID NO: 98263 - DNA, 864 bp, Drosophila melanogaster
  CDS (1)..(864)
atgggagaagacagttcgaggcgcctcccgcgctggtggtttggaggggtttgcgctgcaatcgcagtcaccggcacccatccgattgatctcatcaaggtacagctgcagacccaatcccaagcggaccggaagaccgtgggggagatccttaaaggcatacacgagcggagcggaatcttgggcttttacaatggcatttcggcctcctggtttcgccagctgacctataccaccactcgcttcgccttgtacgaggccggtaaggactacgtcgacacgcaaaaagttagttccaagatggccctggccacctttgcgggaatcgtcggtgggattgtgggtgtacccggggacgtggtcacagtgcgactccagaacgacgtcaagttgccggaggagaagcgacgtaactacaagcacgttttcgacggccttttccgcatctacaaagaggagggcgtgtccagtctcttccgcggcacagtgccggccgtttccagggcagtcctgctgaccatcggaacgaatgcagcctacgaccaagtaaagcagatgctcaagatcgcaacgggggcaggagagggagtaccactgcactttgccacatccacgatagctggatgcattgccgtggtgataacgcagccgctcgatgtgatcaagacgactttcatgaacgcccagccgggggagttctccgggatcggaggtgcttttctgagtaccgccaaacagggcccattggccttctacaagggattcattccggccctgatacgagtgtcacccaatacgattatcaccttcgttttgtacgagcaggcgcgaatgcgatttggatatctgccacctgacaagtag

SEQ ID NO: 98264 - protein, 287 aa, Drosophila melanogaster
MGEDSSRRLPRWWFGGVCAAIAVTGTHPIDLIKVQLQTQSQADRKTVGEILKGIHERSGILGFYNGISASWFRQLTYTTTRFALYEAGKDYVDTQKVSSKMALATFAGIVGGIVGVPGDVVTVRLQNDVKLPEEKRRNYKHVFDGLFRIYKEEGVSSLFRGTVPAVSRAVLLTIGTNAAYDQVKQMLKIATGAGEGVPLHFATSTIAGCIAVVITQPLDVIKTTFMNAQPGEFSGIGGAFLSTAKQGPLAFYKGFIPALIRVSPNTIITFVLYEQARMRFGYLPPDK

SEQ ID NO: 98265 - DNA, 954 bp, Drosophila melanogaster
  CDS (1)..(954)
atgagcgctacgagtgtccaggaggcgcccaagaaggcggtggccaccaatgccatcaagttcctcttcggcggcctctccggaatgggagccaccatggtggtgcagccgctagacttggtcaagacccgcatgcagatttctggagcgggcagtggcaagaaggagtaccgcagctcattgcactgcatccagaccatcgtgagcaaggaaggacctctggccctttaccagggcatcggagctgctctgctgagacaggcaacctacaccacgggaagattgggcatgtacacgtatctgaacgacctgttcagggagaagttccagaggagtcccggcatcacggacagcatggccatgggcacgatcgccggagcctgtggcgcctttattggcacgcccgcggaggtggccctggtgcgcatgacttccgacggcaggttgccggtggccgagcggaggaactacacgaatgtggccaacgccctggccaggatcaccagggaggagggacttacggctctgtggagaggcagtctgcccacagtgggtcgcgccatggtcgtgaacatgacccaactggccagctactcgcagttcaagacctacttccgccacggaccccttcagatggaggagggcatcaagctgcacttctgcgccagcatgctaagcggtctactgaccaccatcacctccatgccgctggacattgccaagacccgtatccagaacatgaagatggtcgatggcaagccggagtaccgcggcaccgccgacgtcctgctgcgcgtggcccgccaggagggagtctttgcgctgtggaagggattcacgccctactactgccgcctgggtccccacaccgtgctgaccttcattattctggagcagcttaaccagggctacaacaagtacgtcctgggctcgaacaagagcactggcctgtaa

SEQ ID NO: 98266 - protein, 317 aa, Drosophila melanogaster
MSATSVQEAPKKAVATNAIKFLFGGLSGMGATMVVQPLDLVKTRMQISGAGSGKKEYRSSLHCIQTIVSKEGPLALYQGIGAALLRQATYTTGRLGMYTYLNDLFREKFQRSPGITDSMAMGTIAGACGAFIGTPAEVALVRMTSDGRLPVAERRNYTNVANALARITREEGLTALWRGSLPTVGRAMVVNMTQLASYSQFKTYFRHGPLQMEEGIKLHFCASMLSGLLTTITSMPLDIAKTRIQNMKMVDGKPEYRGTADVLLRVARQEGVFALWKGFTPYYCRLGPHTVLTFIILEQLNQGYNKYVLGSNKSTGL

SEQ ID NO: 98267 - DNA, 1026 bp, Arabidopsis thaliana
  CDS (1)..(1026)
atgatcggagatatctccccgccggtgacttcaatcccaggttcgtcggatctttttgctctctgtatatgcctcaatttcaatcccaagatcatcgaatcttttgatttgctttcgcataaactaaaacatgaagggaatgaagaattgaggaagccacagaatctgattccgccgttttcaaaggtggtgtctcattttggcattagcggaatctccgtcgcattggccactggcgtgactcatcctctcgatgtagtgaaagtgagattgcagatgcagcatgtcggccaaagaggtccgttaattggaatgactggaatctttcttcaactgatgaagaatgaagggcgtaggtctttatacttggggttgactcctgctctcactagatcagtgctttacggaggtcttagattgggattatatgaacccaccaaggtttcttttgattgggcatttggatctaccaatgtcttggtcaagatagcatcaggcgcattcgccggggcgttttccactgcattaactaaccctgttgaagttgttaaggtaaggttgcagatgaatccaaacgcagttcccattgcagaagtgcgggaaatagtctctaaagaaggcataggagctttatggaaaggagttggtcctgccatggttagagctgcagcactaactgcctcacagcttgcaacatatgatgaagccaaacggattctggttaaacgaacttctttagaagaagggtttcatcttcatttgtgtgtggttgcaggtttagtaagcacactgataaccgcacccatggacatgattaaaacccgcttgatgttgcagcaaggttctgaaagcaccaaaacctacagaaacgggtttcattgcggttacaaggttgttcgcaaagaaggtcctctggcactttacaaaggaggctttgcaattttcgcacggctcgggccacaaacgatgatcacgttcatactatgcgagaagcttagatcactcgctggacttcacacaatgtag

SEQ ID NO: 98268 - protein, 341 aa, Arabidopsis thaliana
MIGDISPPVTSIPGSSDLFALCICLNFNPKIIESFDLLSHKLKHEGNEELRKPQNLIPPFSKVVSHFGISGISVALATGVTHPLDVVKVRLQMQHVGQRGPLIGMTGIFLQLMKNEGRRSLYLGLTPALTRSVLYGGLRLGLYEPTKVSFDWAFGSTNVLVKIASGAFAGAFSTALTNPVEVVKVRLQMNPNAVPIAEVREIVSKEGIGALWKGVGPAMVRAAALTASQLATYDEAKRILVKRTSLEEGFHLHLCVVAGLVSTLITAPMDMIKTRLMLQQGSESTKTYRNGFHCGYKVVRKEGPLALYKGGFAIFARLGPQTMITFILCEKLRSLAGLHTM

SEQ ID NO: 98269 - DNA, 843 bp, Drosophila melanogaster
  CDS (1)..(843)
atgccccaccaagagagaaaatcgatgtggttctttggcggattggcgagcgtaggtgcggccatggtgacccatccgctcgacctcatcaaggtcacgctgcagacgcaacagggtcacctgtcggtggcccagttgatccctaaactcgcccgcgaacagggagtactcgtcttctacaacggcctctccgcctcagtgttgcgccaattgacatactccactgcgagattcggggtgtatgaggccggaaagaagtacgtcaatacggacagctttggcggcaaggtggccctggcaggtgcatccggtctcgtcggaggaatcgttggaactccggctgacatggtcaatgtgcgcatgcagaacgacgtaaaactaccgccgcaacaacgacgcaactacaataatgccttcgatggactggttagggtctaccgccaggagggattcaagcgactcttttctggagccaccgcagcgactgcccgtggaatcctgatgacgattggccaaattgcattttacgaccagacgaagatctacctgctggccacgccttatttccaagacaacctggttacgcacttcaccgcctccctggtggccggaacgatagccaccactctcacccaaccgttggatgtgctgaagacgcggtccatgaacgcgaaacccggcgagttcaatggcctgtgggacatcgtgaagcacacggcgaaactgggtcccctcggcttctttaagggctatgtgccggcatttgtgcgtctgggtccacacacgatcatcacctttgtgttcctggagcaattgcgtctcaagtttggcaccttgaattag

SEQ ID NO: 98270 - protein, 280 aa, Drosophila melanogaster
MPHQERKSMWFFGGLASVGAAMVTHPLDLIKVTLQTQQGHLSVAQLIPKLAREQGVLVFYNGLSASVLRQLTYSTARFGVYEAGKKYVNTDSFGGKVALAGASGLVGGIVGTPADMVNVRMQNDVKLPPQQRRNYNNAFDGLVRVYRQEGFKRLFSGATAATARGILMTIGQIAFYDQTKIYLLATPYFQDNLVTHFTASLVAGTIATTLTQPLDVLKTRSMNAKPGEFNGLWDIVKHTAKLGPLGFFKGYVPAFVRLGPHTIITFVFLEQLRLKFGTLN

SEQ ID NO: 98271 - DNA, 915 bp, Drosophila melanogaster
  CDS (1)..(915)
atgtcgctcagaaggggtggattgatgtcctacaaccagcggcgtattgcccgctggtactttggaggtctggcgagctccatggctgccatggtgactcatccgattgacttgatcaaggtgcttatccaaactcaggcggagaagctatcggtattccagaccacccgcaagattgtcaaggaacagggacctctggccatgtacaatggcatctcggcctcaatgctgcgccaatacacgtacacattggcccgttttggcatttattcggtgggctctggagctatggacaccagcaccatggccggcaaaacatgtctagccgcgattgccggtggaattggcgggtttgtgggcgctcctgcagatctgatcaacgtccgcctgcagaacgatgtcaagttgccaccagagaagaggcgcaactataagcacgccatagacggactggtgcgaatcacccgcgaagagggatggaaaaatctcttcaatggctcctcgatgatcgcgctccgtggagcttttatgaccgtaggccagattgcgttctacgagcaaagcaagtcccaaatgataaaattgggaatgcccgattatatgggcacctacatcttagcatcaatgatctcctccgtggtggccaccaccttgacgcagcccatcgatgtggtgaagacacgtcgcatgaatgcagcacctggcgagtattctggattgggggatgtgtttgtaaagacttcgaaggagggacctctggctttcttcaagggatacgttccctctttgagtcgattattgccgcacacggtattattattcttgggcctcgagtatctgaggactcactttggatatctaccagagccaaaacagacaggtgcattttatcgatatgatgatgtcgatgactaa

SEQ ID NO: 98272 - protein, 304 aa, Drosophila melanogaster
MSLRRGGLMSYNQRRIARWYFGGLASSMAAMVTHPIDLIKVLIQTQAEKLSVFQTTRKIVKEQGPLAMYNGISASMLRQYTYTLARFGIYSVGSGAMDTSTMAGKTCLAAIAGGIGGFVGAPADLINVRLQNDVKLPPEKRRNYKHAIDGLVRITREEGWKNLFNGSSMIALRGAFMTVGQIAFYEQSKSQMIKLGMPDYMGTYILASMISSVVATTLTQPIDVVKTRRMNAAPGEYSGLGDVFVKTSKEGPLAFFKGYVPSLSRLLPHTVLLFLGLEYLRTHFGYLPEPKQTGAFYRYDDVDD

SEQ ID NO: 98273 - DNA, 954 bp, Strongylocentrotus purpuratus
  CDS (1)..(954)
atggttggcctaccaccgactgatatcaaaccatccgtggctgtgaagctggccagcgctgggctgggaggatgcatagctgatatgatcacctttccactggacacagctaaagtgcgcctacagatacaaggagagagtggatccgacgtaaagaaatcctcaacacagacgaccggtaaagaactacgggcgagcttccggtaccgtggcgtcttcggcacgatatggacgatcatccgccaagaaggccctcgggggctctacaacggtctcatcccgggactccagcgccagatgtgctttgcgtcggtccgcatcggtctctacgactctgtcaaaggcttctatgcagaatatggtggtgttaacatctttacgagaatcagtgcgggtatcacaaccggagcctgcgctgttctcactgcccaacccacggacgtggtcaagattcgtctccaggcgcagggtaatgcggttctaaatggcgcccccaagaggtacaccggtgctttaaacgcctatcagaccatcgcgaaggaagagggagttagagggctctggaaaggaacgatgcccaacattgtccgaaactctgtcgtcaacgccagtgaagtcgtggcctatgatctcataaaggaggctatccttaaacgcagatacctcaaagacgagttcccatgtcatttcattgcggcgttcggtgcggggtttgtcacaacgtgcgtcgcaacccccgtggacgttgtgaagacgaggttcatgaattctagccctggtcagtatcgtggagccacagaatgtgctactcagatgtttcagaaagagggtctcttagctttctataaaggattcacgccacaatttttgcgacttggttcttggaatatcgtgatgtttgtatgctacgaacaactcaaacgagccatgatactgtccacgcaacacaactaa

SEQ ID NO: 98274 - protein, 317 aa, Strongylocentrotus purpuratus
MVGLPPTDIKPSVAVKLASAGLGGCIADMITFPLDTAKVRLQIQGESGSDVKKSSTQTTGKELRASFRYRGVFGTIWTIIRQEGPRGLYNGLIPGLQRQMCFASVRIGLYDSVKGFYAEYGGVNIFTRISAGITTGACAVLTAQPTDVVKIRLQAQGNAVLNGAPKRYTGALNAYQTIAKEEGVRGLWKGTMPNIVRNSVVNASEVVAYDLIKEAILKRRYLKDEFPCHFIAAFGAGFVTTCVATPVDVVKTRFMNSSPGQYRGATECATQMFQKEGLLAFYKGFTPQFLRLGSWNIVMFVCYEQLKRAMILSTQHN

SEQ ID NO: 98275 - DNA, 1380 bp, Strongylocentrotus purpuratus
  CDS (1)..(1380)
atgacagggcaggtcatattcacccctggttcaggagccaatgcagcagtacccttagaccccgcatcaatgaaggtcccatcttccagcggagggggaggaggcggaggaggagtgtcgcccgcgacaacggaaaagaaagagcagtataccaccaggagagtggcaaggttttactttggtggttttgccggcgctggagcagcatgtgttactcatccattggatcttgtcaaagtccatttacagacgcagcaggctgtacagatgaatgcttctgggatggcggtacatatagtcaagaatgagggagttttagcactctacaatgggctcagtgcttcattatgccgacagctcagttactccatggctaggtttggtatatatgaggccatgaagcagaggttaacagcagacgaccccagcagacctctcccgttttatcagaagatgcttctggctggtttcgcaggagctgttgggggctttgtgggtacaccagcagatatgatcaacgtcaggatgcagaatgatatcaaactacaaccagcagaaaggagaaattataaacatgcccttgatgggctatggcaggtctacaaaaaagagggtgtagtaagcttatggaatggttggtctatggctgttgcaagaggcttccttatgacatttggacaggtgtcgctcttgggagaagagaagaaattagtattgagttccggttacttcaatgataacataatgacccacttcactgcaagtaccatggctggtacttgtgccacagtattaacacagccagctgatgtcatgaagacaagactaatgaatgccaaaccaggcgagtacaagaatgccttggactgttttatgagcgttgccaagctaggacctatgggcttcttcaagggattcattcctgcctttgtgcgactcggacctcacacgatcctcaccttcctcctgttcgaacaattcaggatacgattcgggattcagctgccatcatatgtgctgtgcctgcaacaatcaacttgcggtgagacattttccgacaccactggagagattctcagtccctcctatcccgctgactaccccaacctccaggagtgcgtttacctcgtcagggtgcttggtgcgttggacatcacattttacgtcaatgatctggagatcgaaaccactcctgggagcagtgataatgtcatcattggtccaggatcgactgttgatgtgaatggcgaaggagccgttcaatcgtcaggggacgctttcacagtaagctctgatcaagcgtggatctatttcacctcggatcgagatacgagcttcagaggatttaacatcacatatgattcaggtacatattactaa

SEQ ID NO: 98276 - protein, 459 aa, Strongylocentrotus purpuratus
MTGQVIFTPGSGANAAVPLDPASMKVPSSSGGGGGGGGVSPATTEKKEQYTTRRVARFYFGGFAGAGAACVTHPLDLVKVHLQTQQAVQMNASGMAVHIVKNEGVLALYNGLSASLCRQLSYSMARFGIYEAMKQRLTADDPSRPLPFYQKMLLAGFAGAVGGFVGTPADMINVRMQNDIKLQPAERRNYKHALDGLWQVYKKEGVVSLWNGWSMAVARGFLMTFGQVSLLGEEKKLVLSSGYFNDNIMTHFTASTMAGTCATVLTQPADVMKTRLMNAKPGEYKNALDCFMSVAKLGPMGFFKGFIPAFVRLGPHTILTFLLFEQFRIRFGIQLPSYVLCLQQSTCGETFSDTTGEILSPSYPADYPNLQECVYLVRVLGALDITFYVNDLEIETTPGSSDNVIIGPGSTVDVNGEGAVQSSGDAFTVSSDQAWIYFTSDRDTSFRGFNITYDSGTYY

SEQ ID NO: 98277 - DNA, 885 bp, Nasonia vitripennis
  CDS (1)..(885)
atgacggagcaagatagaactaaaaaattatcaaggtggtattttggtggattggcttctgcaggtgctgcttgtgtgacccatccattggatttacttaaagttcatttgcaaacacaacaagagggaaaattgtctattgttaagttaactgtgaacattgtgaagaaacagggaatcacagcactttataatggactgacagcttccttactacgtcagctgacatattctactgttagatttggtgtttacgaactaggaaaacagacaattgagtcacctggtaatccagcacctttttaccaaaaatttttgttagctggaatttctggcgccgctggtggtgtcgtcggtactcctggagacttgattaatgtaaggatgcaaaatgatatcaagttgccattagaaaaacgaagaaattacacatgggctggaaatggtctattacgcatttgcaaggaagacggaattaggacactttttaatggctgctctacagcaactggtagagcagttcttatgacaatggggcaattaagtttttatgatcaaattaaattaagtcttctgaaaactgattactttgatgatagtacgactacacatttcttgtcaagtttacttgcgggtgcgattgccacaactatgacacaaccactagatgtactgaaaacccgtgccatgaatgctaaacctggagaatataagaatatgatgcagctcattttatatacagctaaaatgggacctttaggatttttcaagggatatgttccagcatttgttcggcttgcaccgcaaacaattttaacgttcctgtttctcgagaatttgcgcttaaactttggattttatccaccaccgaaagtatcgccataa

SEQ ID NO: 98278 - protein, 294 aa, Nasonia vitripennis
MTEQDRTKKLSRWYFGGLASAGAACVTHPLDLLKVHLQTQQEGKLSIVKLTVNIVKKQGITALYNGLTASLLRQLTYSTVRFGVYELGKQTIESPGNPAPFYQKFLLAGISGAAGGVVGTPGDLINVRMQNDIKLPLEKRRNYTWAGNGLLRICKEDGIRTLFNGCSTATGRAVLMTMGQLSFYDQIKLSLLKTDYFDDSTTTHFLSSLLAGAIATTMTQPLDVLKTRAMNAKPGEYKNMMQLILYTAKMGPLGFFKGYVPAFVRLAPQTILTFLFLENLRLNFGFYPPPKVSP

SEQ ID NO: 98279 - DNA, 873 bp, Nasonia vitripennis
  CDS (1)..(873)
atgggcgagaagacagtgccgaatgccgtcaagttcgccatcggcggcacgtctggaatggcagccacgctgtttgtccagccgcttgacctcataaagaaccgcatgcagttgagcggaaagaaaacttccactgtatcggttatttcctcgattatgaaaaatgaaggtctgctggccatgtattctggactgtctgctggacttatgcgtcaagcaacttacactaccactaggcttggaatctacacatggctgtttgaaacagtatcgaaagatggcccaccaaacttcatcactaaagctggccttggtatgcttgccggctgcgtgggtgcttttgttggaaccccagctgaagtggcattaatcagaatgacagctgatggtagattgccactagccgaaagaagaaactataaaaatgtgtttgatgcactgtttcgtataacaagagaagaaggactgttcacattgtggagaggagcaattcccacaatgggccgtgcaatggtagttaacgcagctcaattagcttcatattcgcaagctaaacaagctcttcttgatacagggtatttcgaggaaaatataactttgcactttgcaagttctatgatttctggtctagtcacaactgcggcttcaatgcctgtggatattgctaaaacaagaatacaaaatatgaaaacaataaatgggaaaccagaatttactggtgccattgatgtattgaccaaggtggtgcgcaatgaaggattgtttgcattgtggaaaggattcttcccctactatgctcgtctgggaccccacactgttttgacattcatcttcttagaacaaatgacttctgcatacaaaaagtttgcatga

SEQ ID NO: 98280 - protein, 290 aa, Nasonia vitripennis
MGEKTVPNAVKFAIGGTSGMAATLFVQPLDLIKNRMQLSGKKTSTVSVISSIMKNEGLLAMYSGLSAGLMRQATYTTTRLGIYTWLFETVSKDGPPNFITKAGLGMLAGCVGAFVGTPAEVALIRMTADGRLPLAERRNYKNVFDALFRITREEGLFTLWRGAIPTMGRAMVVNAAQLASYSQAKQALLDTGYFEENITLHFASSMISGLVTTAASMPVDIAKTRIQNMKTINGKPEFTGAIDVLTKVVRNEGLFALWKGFFPYYARLGPHTVLTFIFLEQMTSAYKKFA

SEQ ID NO: 98281 - DNA, 936 bp, Magnaporthe grisea 70-15
  CDS (1)..(936)
atggcaacgccaccatccccggctccggcctcggcttcggaattggcccgaacgacttcggcccttcgtcctgcaacaccaaagccagcgcaaaagaaggtcgatgccatcaagtatcccttctgcatatcaacctcacaggttcgcttacagacgcgaacgggtgatatgccaaagagcatgagcggcacttttgttcatgtcgcccgccacaacggcgtgacgggtctctacgcaggcctgtctgcgtctcttcttcgccagctaacctattcgacaactcggtttggcgtctacgaagaggtaaagtcacggctgacggaaaggaacggtggccgacagccttccttcccgactctggttgccatctctgccgcatcaggattccttggtggcatttctggaaatgcagccgacgtcctgaacgtgaggatgcagcacgacgccgctctcccagtgaagcaacgaaggaattacaaacacgccttcgacggcatgatcaggatgctgagagaagaaggcggcatcaggagctggtttcggggcgtactgcccaacagtcttcgggcggcagcaatgacggcgtcccagctagcatcctatgacacgttcaaaaagctacttatcaatcacacgccgttggcagacaacctgtccactcacttcaccgctagcttcctggccggcgtgaccgcagccactgtcacaagccctgtcgatgtcatcaagacacgcgtcatgtcgtccaccagcgctacgtccagcataccaaagttggtgatggatatctatgccgcagagggaatgggctggatgttcaagggctgggtacccagctttttacgccttgggccgcagacaatttgtaccttcctcttcttggaggcccaccggaagatgtaccgcagagccaaactaatagaggagccattataa

SEQ ID NO: 98282 - protein, 311 aa, Magnaporthe grisea 70-15
MATPPSPAPASASELARTTSALRPATPKPAQKKVDAIKYPFCISTSQVRLQTRTGDMPKSMSGTFVHVARHNGVTGLYAGLSASLLRQLTYSTTRFGVYEEVKSRLTERNGGRQPSFPTLVAISAASGFLGGISGNAADVLNVRMQHDAALPVKQRRNYKHAFDGMIRMLREEGGIRSWFRGVLPNSLRAAAMTASQLASYDTFKKLLINHTPLADNLSTHFTASFLAGVTAATVTSPVDVIKTRVMSSTSATSSIPKLVMDIYAAEGMGWMFKGWVPSFLRLGPQTICTFLFLEAHRKMYRRAKLIEEPL

SEQ ID NO: 98283 - DNA, 1011 bp, Magnaporthe grisea 70-15
  CDS (1)..(1011)
atgtcaaacagcatcaaacaggcggctgaagcagttcgatccagaacatccgaagttatgggtggcgcaggaaaaggatctggaggcgagaccgcagcggttgccaatgacttcctgcatacgcctttcatgcgcgccgctttaccattcctgaatggtggtgccgccggcatgccgacatctgcgatttgtctgctcagcgacatgatcaaggttcgacttcaacttgccggtgaaggcatggcgggcggcgtcaagccaacaccgctctccgtcacgcgcgacattcttgctagtggtagggcgttggacctctacactggactctcggctggtctccttagacaagccgtatacacgacagcgcgcctaggtttctttgacacattcatgggcacgctcaccgcgaaggccaaagaaaatgggtcggcgattggcttcaaggagcgagctgcggccggcctctcggcaggtggtctcgcggctatgatcggcaaccctgcagaccttgcgcttatccgcatgcagagtgacggcctcaaacccaaggagtcgaggcaaaactacaagtcagtaatagatgctctggcgcgcatcaccaagaatgagggaatcgcagcactctggtcgggcgcaacgccaacagtggtgcgagccatggctctcaactttgggcagctcgcctttttcagtgaagccaaggcccaactcaagagccggaccgacttgaatccccgtgtgcagaccctcactgccagcgcggttgccgggtttttcgcctcgttcttttcgttgccctttgactttgtcaagacaagactgcagaagcaacagcgcggccccgacggaaagcttccgtataggaacatgattgactgcttcggccaggttgccaagcaggagggagcgttacggttctaccgtgggttctggacatactatgtccgcattgccccacatgccatggtcacactgatcgttgccgattacttgggctggataacaaaataa

SEQ ID NO: 98284 - protein, 336 aa, Magnaporthe grisea 70-15
MSNSIKQAAEAVRSRTSEVMGGAGKGSGGETAAVANDFLHTPFMRAALPFLNGGAAGMPTSAICLLSDMIKVRLQLAGEGMAGGVKPTPLSVTRDILASGRALDLYTGLSAGLLRQAVYTTARLGFFDTFMGTLTAKAKENGSAIGFKERAAAGLSAGGLAAMIGNPADLALIRMQSDGLKPKESRQNYKSVIDALARITKNEGIAALWSGATPTVVRAMALNFGQLAFFSEAKAQLKSRTDLNPRVQTLTASAVAGFFASFFSLPFDFVKTRLQKQQRGPDGKLPYRNMIDCFGQVAKQEGALRFYRGFWTYYVRIAPHAMVTLIVADYLGWITK

SEQ ID NO: 98285 - DNA, 924 bp, Magnaporthe grisea 70-15
  CDS (1)..(924)
atgtcaaccacgcttggagcctttatagccggcggcatcgctgcttgcggcgccgtgactgccacacatcctttcgagacggtcaagattcgcatgcagctgcagggcgagctccgagacaagggacaccagcctcacttctaccgcggccccttccatggtgtctccgtcatcgtccgaaacgaaggcctgggcggcatctaccgcggcatcagctgcgcctatgtctaccagatcctgctcaacggctgccgcctgggcttctacgagccaatgcgccagaccctgacgggcctcttctataatgataagaaccagcagaacttgggcataaatattttctgtggtgcctcctcaggtatcatcggcgccgctgctggaagccccttcttcttggtcaagacaagattgcagagttactcgccgtttctgccggtggggacacagcacgagtacaaaaacgccttggatggtatgcgacaaatatacggcgcagaaggagccaagggcatgtaccgaggagtgggggctgccatgatcaggaccggttttggcagttctgtgcagctcccgacatacttttttgccaagaggcgccttgtcaagcatttgggcatggaggaagggccggcgcttcatctcgcaagcagcacggttagcggtttcgttgtctgctgtgtcatgcacccgccagacaccatcatgtctcgcatgtacaaccagagtggaaacctttacagcggcgtgcttgactgctttgcaaagactgtcaagaccgagggtgtctttgccatctacaagggatttctgccacatctcgcccgtattctcccacatacaatactcacactgagcttggccgaacaaacaaacaagctgatgaggaggttagaagaccacatattgcctaccgaggctttgtaa

SEQ ID NO: 98286 - protein, 307 aa, Magnaporthe grisea 70-15
MSTTLGAFIAGGIAACGAVTATHPFETVKIRMQLQGELRDKGHQPHFYRGPFHGVSVIVRNEGLGGIYRGISCAYVYQILLNGCRLGFYEPMRQTLTGLFYNDKNQQNLGINIFCGASSGIIGAAAGSPFFLVKTRLQSYSPFLPVGTQHEYKNALDGMRQIYGAEGAKGMYRGVGAAMIRTGFGSSVQLPTYFFAKRRLVKHLGMEEGPALHLASSTVSGFVVCCVMHPPDTIMSRMYNQSGNLYSGVLDCFAKTVKTEGVFAIYKGFLPHLARILPHTILTLSLAEQTNKLMRRLEDHILPTEAL

SEQ ID NO: 98287 - DNA, 951 bp, Gibberella zeae PH-1
  CDS (1)..(951)
atggctaccgctcaagagaccatgagcaaaactacggaggcgtcaacgcctgcaaaagtgacggccgatgcgaagaaggcgatgataagatatcctttttggttcggaggaagtgccagtagtatggctgcctgcgttacccatcctttggatctagtcaaggttcgtcttcaaatgcgcactggcaatgcgcccaagaacatggtcggcacctttgtccacatcctccgcaatgacggccccctcggtctctacagtggtatctcagcctcgttgctgcgccagatgtcgtattctaccgtccgattcggcgtctacgaagagctcaagacgcgcattacacgccgtaacgaaggtcgtgacccatcgtttgcgactctcgttggcctcgccgctggctctggtttcgtaggcggcattgctggaaactttgccgatgtacttaatgtgcgcatgcagcacgatgctgcgcttccccacgccgagcgtcgaaactaccgccatgcgtttgacggcatggttcgcatggcgcgcgaagaaggacccaagagcatgttccgtggctggttgccaaacagtagtcgtgccatgttcatgacagccggtcaactcgccagttacgatatctcaaagagtctgctgctcaagtacacgcccatggaggataacctcaagactcacttcaccgcttcgttcattgctggttttgttgctgctaccatcacaagtcctgttgatgttatcaagactcgcgtcatgtcttcgacgcatgaccacggagttctgcacttgattcgcgacattcaccgaactgacggccttatgtggatgttcaagggctgggttcccagtttcctcagacttggacctcaaaccatctgcacatttgtcttcctagaaatgcaccgcaaggcataccgcaaggtgcaaggcttagacgcgaacctatag

SEQ ID NO: 98288 - protein, 316 aa, Gibberella zeae PH-1
MATAQETMSKTTEASTPAKVTADAKKAMIRYPFWFGGSASSMAACVTHPLDLVKVRLQMRTGNAPKNMVGTFVHILRNDGPLGLYSGISASLLRQMSYSTVRFGVYEELKTRITRRNEGRDPSFATLVGLAAGSGFVGGIAGNFADVLNVRMQHDAALPHAERRNYRHAFDGMVRMAREEGPKSMFRGWLPNSSRAMFMTAGQLASYDISKSLLLKYTPMEDNLKTHFTASFIAGFVAATITSPVDVIKTRVMSSTHDHGVLHLIRDIHRTDGLMWMFKGWVPSFLRLGPQTICTFVFLEMHRKAYRKVQGLDANL

SEQ ID NO: 98289 - DNA, 978 bp, Gibberella zeae PH-1
  CDS (1)..(978)
atgagccaaacatttaagcaagcagctgaatcagctcgctcaaaggcccgaggcgactcggccgctattgccaatgaccttcttcacacacctctcatgagggccgccctccccttcatcaacggaggcattgccggcatggtagccaccacagtcatccagcctgtcgacatggtcaaggttcgcatccaactcgctggcgagggaactgccactggccccaagcccagtcccttggctgtcactcgacagatcatcgccagcggaaagttccttgacctttacactggtctatcagcaggtcttctgcgccaggccgtctacaccaccgcccgcttgggcatgttcgacacattgatgggcaacctgtccgcccgagcaaagactgaaggccgaacagttggtttcaaggagagagccactgctggtcttaccgctggtggtattgctgccatgatcggtaaccctgctgatctcgccctcattcgaatgcagagcgacggcctcaagcccctcgccgagcgaaagaactacaagtccgtcattgatgctctcagcagcatcgcaaagagcgaaggtgtgggtgctctttgggccggtgctgctcccacagtggcccgcgccatggctctcaactttggtcaacttgccttcttcagtgaggccaaggtccaactcaagaagaacaccgatctctctgcacgaacccagactctcactgccagtgccgttgccggtttcttcgcttcattcttctcactgccctttgactttgtcaagacacgtctgcaaaagcagtccaagggccccgacggcaagctcccctaccgaagcatgatcgactgcttctccaaggttgccaagcaggagggtcttggtcgtttctaccgtggtttcggcacatactacgtccgcatcgctcctcacgctatggtgacactgatcgttgctgattaccttggcttcatcaccaaataa

SEQ ID NO: 98290 - protein, 325 aa, Gibberella zeae PH-1
MSQTFKQAAESARSKARGDSAAIANDLLHTPLMRAALPFINGGIAGMVATTVIQPVDMVKVRIQLAGEGTATGPKPSPLAVTRQIIASGKFLDLYTGLSAGLLRQAVYTTARLGMFDTLMGNLSARAKTEGRTVGFKERATAGLTAGGIAAMIGNPADLALIRMQSDGLKPLAERKNYKSVIDALSSIAKSEGVGALWAGAAPTVARAMALNFGQLAFFSEAKVQLKKNTDLSARTQTLTASAVAGFFASFFSLPFDFVKTRLQKQSKGPDGKLPYRSMIDCFSKVAKQEGLGRFYRGFGTYYVRIAPHAMVTLIVADYLGFITK

SEQ ID NO: 98291 - DNA, 894 bp, Apis mellifera
  CDS (1)..(894)
atgtcagaaaagaagaaagagcgactacctccagtatttacttttataaatgctggtctttcgggtatggcagcaacctgtgtagttcatcccatggatgtgataaaaacgcggatccaagtacaaaaggaaaaaacttcgatccttaatgtaattgcttccatatacagagaagagtcaattttgaagttttattcaggtcttagcgctggtctcttacgacaggcaacgtacaccactgtaagacttggtatttataatcaactacaagaatattggaagttgaagtatacaacgaaacccaattttggtacattagctctaatggcagctacagctggagcttcgggagcctttattggtacaccagcagaagttgttcttgtaagaatgacctctgatggtagactgccaaaagaacagagaagaaattacaaaaatgtatttaacgcattcgcgaggatagctaaggaagaaggagttaccactctttggagaggaagcgtagcaacaatgggtcgagcagtgattgttaatatctctcagcttgcaacatacagtcaagcaaaatttttaatagcgacaaaaatggatatgccggaaagtgttgaattacatttttttgcatcaatgttatctggattccttactaccttcaattctatgccatttgatatagctaaaacaagaatacaaaccttaaaaggtgtaggaaaaccacctggtttgataacaatgttgataacgataacgaagactgaaggttttttagcactttggaaaggtttctggcctacctactgcaaaataggtccacatactgttttaacatttataattaatgaacaaatagcaaatttatatagatggcatatcatagtaatcacggcataa

SEQ ID NO: 98292 - protein, 297 aa, Apis mellifera
MSEKKKERLPPVFTFINAGLSGMAATCVVHPMDVIKTRIQVQKEKTSILNVIASIYREESILKFYSGLSAGLLRQATYTTVRLGIYNQLQEYWKLKYTTKPNFGTLALMAATAGASGAFIGTPAEVVLVRMTSDGRLPKEQRRNYKNVFNAFARIAKEEGVTTLWRGSVATMGRAVIVNISQLATYSQAKFLIATKMDMPESVELHFFASMLSGFLTTFNSMPFDIAKTRIQTLKGVGKPPGLITMLITITKTEGFLALWKGFWPTYCKIGPHTVLTFIINEQIANLYRWHIIVITA

SEQ ID NO: 98293 - DNA, 960 bp, Kluyveromyces lactis NRRL Y-1140
  CDS (1)..(960)
atgtcccaaccacaagaagagaaacataatcagaaaaccgccgctcacaaggtgagtaagtttgggtccttcgtggccggtggtcttgccgcatgtattgcagtcactgtgacgaatccatttgactgtgttaagaccagaatgcaattgcaaggtgagttacatgccaatgctgccaaagtatacacgaatccaattcaggcctttggagttatcttcaaaaacgaaggtatcgctgggttgcaaaaaggtttagccagtgcttatctttaccaaatagcgttaaacggatcgcgtttgggattctatgaaccaattagaggaatacttaacaacgttttctaccctaacgtggaatcacacaaggttcagcacatcggtattaacgttgccgccggtgctacttccggtgtcgtcggtgcattcatcggatcgccattattcttggtcaagaccaggatgcaatcatattccaacgccattcatattggtcaacaaacgcattatacctctgctttcaacgggttggcaactatcttccgtagcgagggtattaaaggtttattcagaggtgttgacgcagcaatgctaagaaccggtatcggttctgctgttcaattgcctatctacaacatctgtaagaacttcctcttgaaacacgacttgatgaacgatgggacaggtttacatcttttgtcttccactatcgcagggttcggtgtcggtgtcgccatgaatccatgggatgtcgtgctaaccagagtctataaccaaaagggcaacttgtacagcggtccaattgactgtttcataaagacagtgagaaacgaaggtctctcagcgctatacaaaggtttcggagctcaaattcttagaattggacctcatacagtcttatgtctaaccttcatggaacaaacattgaaattggtatactcagttgaaagcaggttcttataa

SEQ ID NO: 98294 - protein, 319 aa, Kluyveromyces lactis NRRL Y-1140
MSQPQEEKHNQKTAAHKVSKFGSFVAGGLAACIAVTVTNPFDCVKTRMQLQGELHANAAKVYTNPIQAFGVIFKNEGIAGLQKGLASAYLYQIALNGSRLGFYEPIRGILNNVFYPNVESHKVQHIGINVAAGATSGVVGAFIGSPLFLVKTRMQSYSNAIHIGQQTHYTSAFNGLATIFRSEGIKGLFRGVDAAMLRTGIGSAVQLPIYNICKNFLLKHDLMNDGTGLHLLSSTIAGFGVGVAMNPWDVVLTRVYNQKGNLYSGPIDCFIKTVRNEGLSALYKGFGAQILRIGPHTVLCLTFMEQTLKLVYSVESRFL

SEQ ID NO: 98295 - DNA, 873 bp, Debaryomyces hansenii CBS767
  CDS (1)..(873)
atgtctacagtgaataaaaaagtgaattacccattttggtatggtggtgctgccagtatggttgcatgtttagtgacacatccattagatcttgccaaggttcgtttacaaactgcatctaaaccagggcaatctttaggttcgatggtgtaccaaattataactaaggaaggatttcttaagatttactcaggtttgagtgcatccttattaagacaggctacttattcgacagctagatttggaatatatgaatttttgaaagaaacttacaccgaaaagtatcatacaactccatcaactggtatattgttaccaatgtctatggttgcgggtgctttgggtggtttgataggtaacccatccgatgttgttaatattaggatgcaaaatgactcatcattgcctatcgaacaaagaagaaactatagaaatgcttttgacggtattttccgtattattaaggaagagaaggtttcttcattatttagagggttagttccaaatttgacccgtggtgttttaatgacagcatcacaagttgttacatatgatatcgcaaagaacttattagttgacactctccatttggacccatctaaaaaagctactcattttagtgcctcattattagctgggttagtagcaaccactgtgtgttctccagcagacgtcgtcaagaccagaatcatgaatgcgaaaggtgctagtaatggtagtactatttctatcttaacttctgccgttaagacagaaggagttgggttcatgttcagaggttggttaccttcctttattagactcggtcctcataccatcgtcaccttcttagcgttagagcagttaagaaagtttaaggttggtatgttttaa

SEQ ID NO: 98296 - protein, 290 aa, Debaryomyces hansenii CBS767
MSTVNKKVNYPFWYGGAASMVACLVTHPLDLAKVRLQTASKPGQSLGSMVYQIITKEGFLKIYSGLSASLLRQATYSTARFGIYEFLKETYTEKYHTTPSTGILLPMSMVAGALGGLIGNPSDVVNIRMQNDSSLPIEQRRNYRNAFDGIFRIIKEEKVSSLFRGLVPNLTRGVLMTASQVVTYDIAKNLLVDTLHLDPSKKATHFSASLLAGLVATTVCSPADVVKTRIMNAKGASNGSTISILTSAVKTEGVGFMFRGWLPSFIRLGPHTIVTFLALEQLRKFKVGMF

SEQ ID NO: 98297 - DNA, 963 bp, Yarrowia lipolytica CLIB122
  CDS (1)..(963)
atgtcatctttacaaaaacacttacccatggagagcaagacaaaacccgccgagattcctctgtctgccgtacctccgtcggccaaaatccactaccctttctggtacggaggatttgcgtcggtggtggctggtgtcttcacccatcctcttgatctcgccaaagtgcgtcttcagacggccaagacacgtggtcagggactctttggcacactggtgaacgtggtcaagcacgagggtatcactggtgtctactccggcctctcagcctccatgctgcgtctctccacctactccaccatgcggttcggcatgtacgagtacctcaaggagtccattgctccatactactacaaccccaacaagcgagaccagaaccctcccatgtacgtgttgcttcccatctccatcattgccggaatcagcggtggtatcgtgggaaaccctgccgacatcatcaacatccgaatgcaaaacgaccagtccttgcccaaggaccaacgcagaaactacaaacacgcctttgacggtctgatccgaatgtacaaagaagagggagttcgggccatgttccgaggtctcggtcccaactgtacccgaggagttctcatgacttcgtcgcagatggtctcttacgactcattcaaggctctgctggtcaaccatcttggaatgaaccccgataagaaggccacccacttctccgcctctctgctggcgggtctcatggccaccactgtctgttctcccgtcgatgttgtcaagacccgaatcatgaacgcccatgcccatcattccaaggactcggcctttaccattttcttcaacgctctgaaacaggagggtcctctgttcatgttccgaggctggcttccttcctttgtccgactcggaccccagactattctcacctacattgttcttgagcagctcaagttctacaagattggaatgcgacattag

SEQ ID NO: 98298 - protein, 320 aa, Yarrowia lipolytica CLIB122
MSSLQKHLPMESKTKPAEIPLSAVPPSAKIHYPFWYGGFASVVAGVFTHPLDLAKVRLQTAKTRGQGLFGTLVNVVKHEGITGVYSGLSASMLRLSTYSTMRFGMYEYLKESIAPYYYNPNKRDQNPPMYVLLPISIIAGISGGIVGNPADIINIRMQNDQSLPKDQRRNYKHAFDGLIRMYKEEGVRAMFRGLGPNCTRGVLMTSSQMVSYDSFKALLVNHLGMNPDKKATHFSASLLAGLMATTVCSPVDVVKTRIMNAHAHHSKDSAFTIFFNALKQEGPLFMFRGWLPSFVRLGPQTILTYIVLEQLKFYKIGMRH

SEQ ID NO: 98299 - DNA, 888 bp, Apis mellifera
  CDS (1)..(888)
atgagcaatcaaaaaacagtatcaacttcaataaatttcctttttgggggaactgcaggaatggctgcaacatgtgttgttcaaccattagatttaataaaaaatcgaatgcaattaagtggaattaaaatatcaacaataaatataatatcctcaatcttaaaaaatgagggtattttagctttttattcaggcttatctgctggtttattacgtcaggcttcatatacgactacaagacttggtacatttgaatggttgtctgaattaatatcaaaagatagacaaccaaattttcttatgaaactactaataggtagttctgctggttgtgtaggagcatttgttggtactcctgctgaagttgctttaattagaatgactgctgatggtagattacctcttgctgaaagacgtaattataaaaatgcatttaatgcattatttcgaatagccaaagaagaaggctttttagcattatggagaggtactgttccaacaatgggaagagctatggttgtaaatgcagctcaattggcatcatattctcagtctaaagaaactttacttaatactggatattttgaggataatattctattacattttacaagttctatgatatcaggtttagttacaactattgcttctatgccagttgatattgctaaaacaaggattcaaaatatgaaaattgtggatggtaaaccagaatttaagggtgcaatagatgtcataatacaagtatgtcgaaatgaaggagttttttcattatggaaaggtttttttccttattatgctcgtttaggtccacatactgttttgacttttattttcttagaacaaatactatatgctcataaaagaatattcattttttcaatataa

SEQ ID NO: 98300 - protein, 295 aa, Apis mellifera
MSNQKTVSTSINFLFGGTAGMAATCVVQPLDLIKNRMQLSGIKISTINIISSILKNEGILAFYSGLSAGLLRQASYTTTRLGTFEWLSELISKDRQPNFLMKLLIGSSAGCVGAFVGTPAEVALIRMTADGRLPLAERRNYKNAFNALFRIAKEEGFLALWRGTVPTMGRAMVVNAAQLASYSQSKETLLNTGYFEDNILLHFTSSMISGLVTTIASMPVDIAKTRIQNMKIVDGKPEFKGAIDVIIQVCRNEGVFSLWKGFFPYYARLGPHTVLTFIFLEQILYAHKRIFIFSI

SEQ ID NO: 98301 - DNA, 945 bp, Aspergillus nidulans FGSC A4
  CDS (1)..(945)
atggcctccaccactaaagagtcggccaaacccgccgtcgacttcttgcaccatccgtacactcgtgccgctcttcccttcattaatggcgggttggccggtatgacggctaccgtcgtcattcagccaattgatatgatcaaagtgcgcttacagctcgctggcgagggtgtgcgcaccgggccccgtccttcagccttgggcgtcgcgcgtaatattatcgcatcaggaaaagtgctcgatctctacaccggtttatctgccggtcttctgcgtcaagcagtttacacaaccgcccgtctaggattcttcgacactttcatgaaagcattaacgaagaacgctgatacagcgaaccgaaaagtgacttttgccgagcgcgctggcgcaggtttgacagctggtggtatcgccgctatgatcggtaacccggcagatttggcccttgttcggatgcagtcagacggtctcaagcctccggaggcgcgggctcactaccggtccgtcatcgacgcattgttccgcatttccaaagccgaaggagtgactgccctgtgggctggcgctttccccaccgtcgtgcgtgcaatggccctcaacctcggccagttggctttctttgcggaatcaaaagcccagctgaagacgcgaacatcgctttcagcgcaaaaccagacctttgctgcttcagcgatcgctggtttcttcgctagtttcctctcgcttcccttcgactttgtcaagactcgcctgcaaaaacaacagaaagatcccaagacgggtcagttgccatacaagggcatgtttgactgtgctcgcaaggttgttcgtgatgaaggctggctgaggttctatcgcgggtttggcacatactatgtgcggatcgcccctcatgcaatggtaactcttatcgtcgcggattacttgaacctcattaccaagtaa

SEQ ID NO: 98302 - protein, 314 aa, Aspergillus nidulans FGSC A4
MASTTKESAKPAVDFLHHPYTRAALPFINGGLAGMTATVVIQPIDMIKVRLQLAGEGVRTGPRPSALGVARNIIASGKVLDLYTGLSAGLLRQAVYTTARLGFFDTFMKALTKNADTANRKVTFAERAGAGLTAGGIAAMIGNPADLALVRMQSDGLKPPEARAHYRSVIDALFRISKAEGVTALWAGAFPTVVRAMALNLGQLAFFAESKAQLKTRTSLSAQNQTFAASAIAGFFASFLSLPFDFVKTRLQKQQKDPKTGQLPYKGMFDCARKVVRDEGWLRFYRGFGTYYVRIAPHAMVTLIVADYLNLITK

SEQ ID NO: 98303 - DNA, 927 bp, Aspergillus nidulans FGSC A4
  CDS (1)..(927)
atggcaagcactgcgaagctggagatctcgcatccccaacagcaggtcgtcaaacctgtaaagaaggtgcattatcccttctggtttggcggctctgcgtcatgctttgcggctgcggttacgcatccactggatcttgtcaaggtccgactgcagacccgagggcctggcgctccctcgacgatgctgggtacatttgggcatattctgcgaaataatgggtttttcggtttgtataatggactttcagccgctcttctgcgccaactcacgtattctacaactcggttcgggatttatgaggaactaaaatctcgattcacgtcaccgtcgcaatcaccaagcttcttcacgctcctcggaatggcctgcacctccggtatcctcggaggcattgcaggaaatccagccgacgtgctcaacgtccgcatgcaatccgatgccgcgcttccgcccgcccaacggcgtaactaccgccatgcctttcatggcctcgtccaaatgactcgcacagaaggtttttcgagtctcttccgtggcgtgtggccgaactctactcgcgccgtcctcatgacatcctcacagcttgtctcctatgacgtcttcaagcgcttgtgtcttgagaaattcggaatgaaggacaatgttgttacgcacttcagcgcgtctttcgctgcggggtttgtcgcaacgacggtctgcagtcctgttgacgtcatcaagacaagggtcatgagtgcttcgcctagtgagacccgtggtcacaatatcgtcggtcttctccgtgaaatttctcggaaagagggacttgcgtgggcttttcggggttgggtacctagttttattcgcctgggtccgcacacgattgccacatttatcttccttgaggagcacaagaagctttatcggtacctgaagggtatttaa

SEQ ID NO: 98304 - protein, 308 aa, Aspergillus nidulans FGSC A4
MASTAKLEISHPQQQVVKPVKKVHYPFWFGGSASCFAAAVTHPLDLVKVRLQTRGPGAPSTMLGTFGHILRNNGFFGLYNGLSAALLRQLTYSTTRFGIYEELKSRFTSPSQSPSFFTLLGMACTSGILGGIAGNPADVLNVRMQSDAALPPAQRRNYRHAFHGLVQMTRTEGFSSLFRGVWPNSTRAVLMTSSQLVSYDVFKRLCLEKFGMKDNVVTHFSASFAAGFVATTVCSPVDVIKTRVMSASPSETRGHNIVGLLREISRKEGLAWAFRGWVPSFIRLGPHTIATFIFLEEHKKLYRYLKGI

SEQ ID NO: 98305 - DNA, 873 bp, Candida albicans SC5314
  CDS (1)..(873): transl_table=12
atggcagcatgtttagtgactcatccattagatttagccaaagttcgattacaaaccgctactaaacctggccaatcattattatcgatgatttatcaaatcattactaaagaagggtttttcaaaatatattcaggattaaccgcttcattattacgtcaagcaacttattcaacgactagatttgggatatatgaatttttaaaagaacaatacatggaatcaatagcaacaactggaggcacagaacaaaaaaaaccttcaacggcagtattgttacctatgtcaatgattgctggagcattaggtggattagtaggaaatccatctgatgtagtcaatattcgaatgcaaaatgattcaacattaccaattaatcaacgaagaaattatcgtaatgcctttgatggaatttataagatttgtcaacaagaaggtataaattcattatttagaggattaacgccaaatttaattagaggtgtattaatgacagcttcacaagttgttacttatgatattgctaaatcaatattagttgatcatattcatatggatccttcgaaaaaatcaactcattttagtgcttctttaattgctggattagtggctactacagtttgttcacctgctgatgttgttaaaactagaatcatgaatagtaaaggaagtactggtggtggtagtggtggtgatggtgttaatgggaatgcaattctgatattaaagaatgctgtgaaacatgaaggtattggatttatgtttagaggttggttaccttcatttattagattgggacctcatacaattgtaacgtttttagtattggaacaattaagaaaatttaaattaggaatgagtcgatcagattaa

SEQ ID NO: 98306 - protein, 290 aa, Candida albicans SC5314
MAACLVTHPLDLAKVRLQTATKPGQSLLSMIYQIITKEGFFKIYSGLTASLLRQATYSTTRFGIYEFLKEQYMESIATTGGTEQKKPSTAVLLPMSMIAGALGGLVGNPSDVVNIRMQNDSTLPINQRRNYRNAFDGIYKICQQEGINSLFRGLTPNLIRGVLMTASQVVTYDIAKSILVDHIHMDPSKKSTHFSASLIAGLVATTVCSPADVVKTRIMNSKGSTGGGSGGDGVNGNAISILKNAVKHEGIGFMFRGWLPSFIRLGPHTIVTFLVLEQLRKFKLGMSRSD

SEQ ID NO: 98307 - DNA, 1017 bp, Ustilago maydis 521
  CDS (1)..(1017)
atgtcgacgtttcgcatcccctcggcgtctggtaccaacgctggcaccttgaatgctgccaagggagcacttgctggcgctggcgctggcgctgcagccagctcctcttccaacaacaaggcggctccaaagacctatcctttctggctaggaggcgcagccggctgctgcgctgcatcgatcacacatcctctggacctgaccaaataccgtctccaaaccgccacggtgaagcagggcatgttcaggacgattgtgcgttcagttcagacggaaggcgtcactagtctttggcacggcttgactgcgacgttgctgcgtcaatttacgtattcggtgacgcgcttcgcggtatacgaggatatgaagtcgcgcgttagtgcgcgttccggtaaagcgcctaccacgggagagctcgcgttgtgctctggaaccgcaggtgctgtagctggtgtggttggcaaccctgccgagatcgtcttggttcggatgtgttcggacctgaatctggccaaagacgcacgatacggctacaagaactgcgtcgacggactcgtccgcatcgtcaaggatgacggtgcgtcgacgttgttccgaggtctttcgcccaacgtcttccgttccgtcgtgatgaacatttcgcaactcggatcgtacgatcttttcaagcgcattctccagaagctcgacgtgattcctgacggcgcgcttctgcagaccgctgcgagcttctgtgctggtacgttgagcactacactctgcacaccgatcgatgtcgtcaagtcgcgcgtccagaacttgaaaaacagcgctggcgccaacatgcgcgtttccagcgtcatccgtgacgcactcgccaaagacggccctgctgtcttcttcagaggttggaccccagcctggctcaggttgcagccccagacaacgctcctcttcctcttcttcgaacagttcaagcagctcgtcgacaagagccgccacatcaaacagcacaccgaggtgcatgtcaacaattga

SEQ ID NO: 98308 - protein, 338 aa, Ustilago maydis 521
MSTFRIPSASGTNAGTLNAAKGALAGAGAGAAASSSSNNKAAPKTYPFWLGGAAGCCAASITHPLDLTKYRLQTATVKQGMFRTIVRSVQTEGVTSLWHGLTATLLRQFTYSVTRFAVYEDMKSRVSARSGKAPTTGELALCSGTAGAVAGVVGNPAEIVLVRMCSDLNLAKDARYGYKNCVDGLVRIVKDDGASTLFRGLSPNVFRSVVMNISQLGSYDLFKRILQKLDVIPDGALLQTAASFCAGTLSTTLCTPIDVVKSRVQNLKNSAGANMRVSSVIRDALAKDGPAVFFRGWTPAWLRLQPQTTLLFLFFEQFKQLVDKSRHIKQHTEVHVNN

SEQ ID NO: 98309 - DNA, 864 bp, Tribolium castaneum
  CDS (1)..(864)
atgagcacttctgacagagtcccacgatggtacttcggcggacttgcctcggcaatggcgacatttttcacccacccgttggatttaatcaaagtgcatttgcaaacccatgctggtaaaaaaatatcgataatacacctcaccacagacattgtgaaaaaaaatggctttctaagtctctacaacggtctctcggcttcactgtgccgccagctcacttactctgtcatcagattcggtatttacgacactgcgaaactctacatggaaaaagacagcagtctcacgagccgtatttttgtggcgttttttgcaggaagtttcggcggttttgtggggacgccccctgataaagtcaacgttcggatgcaaaacgacgtaaaactacccccggaaaaaagattcaattacaagcacgcctttgacggcctttggcacgtttatcaaagcgaaggctttgcgaaacttttcacagggggtggaactgcgtcgtttcgagccggggtcatgggggtgggacagttaacttcatacgaccaaatcaaaagagttcttttaagaacgagctactttgaagatgatttagttacgcattttacgtccagtatgggtgctgccgtgattgccacgaccataactcagcctttagacgtgataaagacacgagtaatgaacgcaaagcctggcgaatttaggaatattttggacgttgtgttgtttacggcaaaggaggggcccttgggctttttcaagggttacgtccctgcgtttttaaggataggaccgcacacgatcataacttttattttttatgagcgcttgaggatgtattttgggtacattccggaaccgaaagtgaaataa

SEQ ID NO: 98310 - protein, 287 aa, Tribolium castaneum
MSTSDRVPRWYFGGLASAMATFFTHPLDLIKVHLQTHAGKKISIIHLTTDIVKKNGFLSLYNGLSASLCRQLTYSVIRFGIYDTAKLYMEKDSSLTSRIFVAFFAGSFGGFVGTPPDKVNVRMQNDVKLPPEKRFNYKHAFDGLWHVYQSEGFAKLFTGGGTASFRAGVMGVGQLTSYDQIKRVLLRTSYFEDDLVTHFTSSMGAAVIATTITQPLDVIKTRVMNAKPGEFRNILDVVLFTAKEGPLGFFKGYVPAFLRIGPHTIITFIFYERLRMYFGYIPEPKVK

SEQ ID NO: 98311 - DNA, 861 bp, Tribolium castaneum
  CDS (1)..(861)
atggccaaggagcagaagctgtccaggtggtacttcgggggcatcgcctccgccatggcctgctgctgcacgcaccccctggacctcctcaaggtccagctgcagacgcagcaagaagggaagacttcggtgatacgcttaaccgtaaacattgtcaaaaagcagggggttaccgcactttacaacggcctatccgcctcgttattgcgccaactcacgtattcaacgactcggttcggaatttacgaaagcgtgaagcaactgatggacaaagacagcagtttttcggcgcgggtggcgctcgcggcctttgcaggctccgctggcgggctggtgggaacccccgccgataagatcaacgtccggatgcaaaacgacatcaaactgcccctcgacaagcgcctaaactacaaacacgccctcgatggccttttgcgcgtctacaaggaggaggggattccccggctcttctccggcgccactgctgccaccttccgcgcggctttgatgaccatcgggcagctctctttctacgaccagattaaaaagactctcttaactactgactattttgaggataacttgacgactcatttcgtttctagtcttactgcgggggctattgctaccaccctgacgcaacctctagacgtgctcaaaactcgtacaatgaatgccaagccgggcgagtttaagggaatgtgggacattgttctctatactgccaaattaggaccgttagggtttttcaaaggatacgtaccggcctttgttagattggcgccccagacgattcttaccttcgtttttctggaacagttgaggttcaattttgggtatttccccgagaaaattcaataa

SEQ ID NO: 98312 - protein, 286 aa, Tribolium castaneum
MAKEQKLSRWYFGGIASAMACCCTHPLDLLKVQLQTQQEGKTSVIRLTVNIVKKQGVTALYNGLSASLLRQLTYSTTRFGIYESVKQLMDKDSSFSARVALAAFAGSAGGLVGTPADKINVRMQNDIKLPLDKRLNYKHALDGLLRVYKEEGIPRLFSGATAATFRAALMTIGQLSFYDQIKKTLLTTDYFEDNLTTHFVSSLTAGAIATTLTQPLDVLKTRTMNAKPGEFKGMWDIVLYTAKLGPLGFFKGYVPAFVRLAPQTILTFVFLEQLRFNFGYFPEKIQ

SEQ ID NO: 98313 - DNA, 924 bp, Tribolium castaneum
  CDS (1)..(924)
atgggggacaacaaagagaaaacaatgcccaagtacatcaaattcttattcgggggatcagctggcatggcgggcacccttttcgtccagcccttagacctgctcaaaaatcgaatgcaactagcggccacacaaaaagagcgggcgacttcgttccaagtcctccagaaaatcatctccaacgagggggtttttgccctgtatacgggcctctcagctgggcttttgcgccaagcgacttacacaacgacccgtctgggggtgtactcgtggcttttcgagactttttccgaggaggggaagcccccaagcttcattgtgaaggcggggttggggatgatggcaggcgtgtgtggcgcgtttgtgggaaccccagccgaagtgtccctaattcggatgaccgcagacggacgtctcccagccgccgaaaggcgcaactacaagaacgtgttcgacgctctcttcaggataacaaaggaggaaggggttttgaccctttggaggggcgcaatccccacaatggggcgcgctatggtggttaatgcggcccagttggccacgtactcgcaagccaagcaaatgctcttaaatacgggattcttccacgacgggattttccttcatttctgtgcctctatgatttcggggttggtcacaacggccgcctcgatgccagtcgatattgccaaaactaggattcaaaacatgaaaacaatcaatggtaagccggagtactcgggcgccctcgatgttttagtcaaagtcgtgaagaacgaagggccgttcgctttgtggaaaggtttcactccgtactacttcaggttagggccgcacaccgtcctcacgtttattttcttggagcaaatgaattcggcgtataataaaatcgttttggggaagtcggggaccggagggcaattgtaa

SEQ ID NO: 98314 - protein, 307 aa, Tribolium castaneum
MGDNKEKTMPKYIKFLFGGSAGMAGTLFVQPLDLLKNRMQLAATQKERATSFQVLQKIISNEGVFALYTGLSAGLLRQATYTTTRLGVYSWLFETFSEEGKPPSFIVKAGLGMMAGVCGAFVGTPAEVSLIRMTADGRLPAAERRNYKNVFDALFRITKEEGVLTLWRGAIPTMGRAMVVNAAQLATYSQAKQMLLNTGFFHDGIFLHFCASMISGLVTTAASMPVDIAKTRIQNMKTINGKPEYSGALDVLVKVVKNEGPFALWKGFTPYYFRLGPHTVLTFIFLEQMNSAYNKIVLGKSGTGGQL

SEQ ID NO: 98315 - DNA, 936 bp, Drosophila melanogaster
  CDS (1)..(936)
atggcgctggtttacggggttgaaaagaagacggtacccacccacatgaagttcgtgatgggcggaacctccggaatgctggccacctgcattgtccagccgttggaccttctcaagacccgaatgcagatatcaggaactttaggcacacgcgagtacaagaactcatttgaggttctatcgaaggttttgaagaacgaggggatattatccttgtacaatggattgagtgccggactattgagacaggccacgtacacatcagccaagatgggtgtttaccagatggagttggattggtatcgcaagaacttcggaaattatccatctatggtggccagtatgacgatgggcattgtggctggcgcctttggagccatgtgtggaaatccagcggaggtggcccttatccggatgatgtccgataaccgcttaatgccggaggacaggcgtaattacaagaatgtgggtgatgcctttgtaagaattgtgaaggatgagggcgtggtggcgctctggagaggatgcttgccgacagtgggtcgtgccatggtcgtgaatatggtgcagcttgcctcctattcactgatgaagaaccaattgcaagggtatctcagtgaaggtatacctcttcacctgaccgccgccctggtgtctggtttgctgacctccgtgacctcaatgccactggacatggccaaaacacgcatacagcagatgaaggtgatcgatggcaagccggaatacagtggtaccatcgatgtactgaaaaaggtgctgaaaaatgaaggcgcctttgccgtgtggaagggtttcactccgtatctaatgcgtatgggtccacacacgatattttcatttgtcttcttggagcaaatgaataaggcctacagcaagcatatgctcagtgattcgctatccgattcggtaccttaa

SEQ ID NO: 98316 - protein, 311 aa, Drosophila melanogaster
MALVYGVEKKTVPTHMKFVMGGTSGMLATCIVQPLDLLKTRMQISGTLGTREYKNSFEVLSKVLKNEGILSLYNGLSAGLLRQATYTSAKMGVYQMELDWYRKNFGNYPSMVASMTMGIVAGAFGAMCGNPAEVALIRMMSDNRLMPEDRRNYKNVGDAFVRIVKDEGVVALWRGCLPTVGRAMVVNMVQLASYSLMKNQLQGYLSEGIPLHLTAALVSGLLTSVTSMPLDMAKTRIQQMKVIDGKPEYSGTIDVLKKVLKNEGAFAVWKGFTPYLMRMGPHTIFSFVFLEQMNKAYSKHMLSDSLSDSVP

SEQ ID NO: 98317 - DNA, 936 bp, Drosophila melanogaster
  CDS (1)..(936)
atggcgctggtttacggggttgaaaagaagacggtacccacccacatgaagttcgtgatgggcggagcctccggaatgctggccacatgcattgttcagccgttggaccttctcaagacccgaatgcagatatcaggaactttaggcacacgcgagtacaagaactcatttgaggttctatcgaaggttttgaagaacgaggggatattatccttgtacaatggattgagtgccggactattgagacaggccacgtacacatcagccaagatgggtgtttaccagatggagttggattggtatcgcaagaacttcggaaattatccatctatggtggccagcatgacgatgggcattgtggctggcgcctttggagccatgtgtggaaatccagcggaggtggccctgatccggatgatgtccgataaccgtttaatgccggaggacaggcgtaattacaagaatgtgggtgatgcctttgtaagaattgtaaaggatgagggcgtggtggcgctctggagaggatgcttgccgacagtgggtcgtgccatggtcgtgaatatggtgcagcttgcctcctattcactgatgaagaaccaattgcatgggtatctcagtgaaggtatacctcttcacctgaccgccgccctggtgtccggtttgctgacctccgtgacctcaatgccactggacatggccaaaacacgcatacagcagatgaaagtgatcgatggcaagccggaatacagtggcaccatcgatgtactgaaaaaggtgctgaaaaatgaaggcgcctttgccgtgtggaagggtttcactccgtatctaatgcgtatgggtccacacacgatattttcattcgtcttcctggagcaaatgaataaggcctacagcaagcatatgctcggtgattcgctatccgattcggtaccttaa

SEQ ID NO: 98318 - protein, 311 aa, Drosophila melanogaster
MALVYGVEKKTVPTHMKFVMGGASGMLATCIVQPLDLLKTRMQISGTLGTREYKNSFEVLSKVLKNEGILSLYNGLSAGLLRQATYTSAKMGVYQMELDWYRKNFGNYPSMVASMTMGIVAGAFGAMCGNPAEVALIRMMSDNRLMPEDRRNYKNVGDAFVRIVKDEGVVALWRGCLPTVGRAMVVNMVQLASYSLMKNQLHGYLSEGIPLHLTAALVSGLLTSVTSMPLDMAKTRIQQMKVIDGKPEYSGTIDVLKKVLKNEGAFAVWKGFTPYLMRMGPHTIFSFVFLEQMNKAYSKHMLGDSLSDSVP

SEQ ID NO: 98319 - DNA, 942 bp, Aspergillus niger
  CDS (1)..(942)
atgtctactatggccagcggcgcgaagttggaggcgtcgcatcctcccaaggcggcgaatgctgcagcccctgcaaaaaaagttcattatcctttctggttcggtggttcagcatcatgctttgcggctgccgttactcaccctctggatctcgtgaaggtccgcttgcagacccgcgggcctggcgccccctcgactatggtcggcacattcgtgcatgtattcaagaatgacggattcttcggtctttacagcgggttgtccgccgcaattctgcgccaactgacctactccaccacacgattcggtatctacgaggaactgaaaaaccacttcacctctcccgactcgcctcctggcctcttcaccctaattggtatggcctctgcctctggcttcatcggtggcatggctggtaaccccgccgacgtcctgaacgtgcggatgcaatccgacgctgctcttcctcccgctcaacgccgtaactaccgcaacgcgatacacggattggtgaccatgacgcgcaccgaaggtcccgccagcttgttccgcggagtgtggccgaactcgacccgtgctgttcttatgacgacgtcgcaattggcctcgtacgataccttcaagcgtctgtgtctggagaacctcggcatgtccgataacatgggaacgcatttcactgcctccttcatggctggatttgtggctactactgtctgtagtcctgtcgatgttatcaagactcgtgtcatgaccgcttctccggctgaaggccgcagtcagagcatcattggactgctccgcgacatcactaggaaggagggcctcgcgtgggctttccgtggttgggtgccgagcttcattcgtctcggtcctcataccattgccacgtttatcttccttgaggagcataagaagctctatcgcttgttgaaggggctttga

SEQ ID NO: 98320 - protein, 313 aa, Aspergillus niger
MSTMASGAKLEASHPPKAANAAAPAKKVHYPFWFGGSASCFAAAVTHPLDLVKVRLQTRGPGAPSTMVGTFVHVFKNDGFFGLYSGLSAAILRQLTYSTTRFGIYEELKNHFTSPDSPPGLFTLIGMASASGFIGGMAGNPADVLNVRMQSDAALPPAQRRNYRNAIHGLVTMTRTEGPASLFRGVWPNSTRAVLMTTSQLASYDTFKRLCLENLGMSDNMGTHFTASFMAGFVATTVCSPVDVIKTRVMTASPAEGRSQSIIGLLRDITRKEGLAWAFRGWVPSFIRLGPHTIATFIFLEEHKKLYRLLKGL

SEQ ID NO: 98321 - DNA, 906 bp, Medicago truncatula
  CDS (1)..(906)
atgggagatgagaagaagcctaagcctgttgctattggtgtctggccaacaatcaagcctttcgtcaatggtggtgcttctggtatgctcgctacatgtgttattcaacctattgatatgatcaaggttaggattcaactgggtcaaggttcagctgctagtgtcacatctaccatgcttaagaatgagggtgttggtgctttctataagggtctatcagctgggttactcaggcaggctacttacaccactgctcgtcttggaacgtttagaatcttgacaaataaagcaattgaggctaatgatggaaagcccctgccactctaccaaaaagctctatgtgggctgactgctggtgcaatcggtgcaactgttggtagtccagctgatttggcactcattcgtatgcaggctgatgcaactttacctcttgctcagcgccgaaactacacaaacgccttccaggcactttaccgtatcggtgcagatgaaggtattctttcactgtggaaaggtgctgggcctactgtagtaagagccatggcattgaacatggggatgcttgcttcttatgatcaaagtgttgagttcttcaaggataccgttggtctaggtgaaatgactactgtggttggtgcaagtagtgtatctggatttttcgcagcagcttgcagtttgccatttgattatgtgaagacacagattcagaagatgcaacctgatgctgaaggaaaatacccatacactggttctcttgactgtgccgtcaaaaccttcaaagcaggaggacccttcaaattttacactggattccctgtctactgtgttaggattgctccccacgtcatgatgacatggattttcctcaaccagctccagaaattggagaaaagttatgggttatag

SEQ ID NO: 98322 - protein, 301 aa, Medicago truncatula
MGDEKKPKPVAIGVWPTIKPFVNGGASGMLATCVIQPIDMIKVRIQLGQGSAASVTSTMLKNEGVGAFYKGLSAGLLRQATYTTARLGTFRILTNKAIEANDGKPLPLYQKALCGLTAGAIGATVGSPADLALIRMQADATLPLAQRRNYTNAFQALYRIGADEGILSLWKGAGPTVVRAMALNMGMLASYDQSVEFFKDTVGLGEMTTVVGASSVSGFFAAACSLPFDYVKTQIQKMQPDAEGKYPYTGSLDCAVKTFKAGGPFKFYTGFPVYCVRIAPHVMMTWIFLNQLQKLEKSYGL

SEQ ID NO: 98323 - DNA, 975 bp, Trifolium pratense
  CDS (1)..(975)
atgggtgttaaaggttttgttgaaggtggtattgcttcgattatcgctggatgttctacacatcctttggatcttattaaggttcggatgcaacttcagggagaaaacgctcctaaaccgaacccggttcaggttcttagaccagcacttgcttttggccaaaccggatcagcaacctcgatccacgtggcagggcaaactgcggttccacaagcgcgtgtgggtttggtttcggttggagttcgtcttgttcaacaagagggtgttaaggctttgttctccggtgtttctgctaccgtgctccggcagacgctgtattctactaccaggatgggtttgtatgatattctgaagaataaatggacggatcgtgaagctggcgggactatgccgctggctcgtaagattgaggctggacttattgctggaggagttggagctgcgattggaaatccggctgatgttgctatggttagaatgcaagccgacgggagactcccggcgcctcagaggagaaactataaatctgttgttgatgccattactagaatggctaagcaggaaggcgtgaccagtctatggcgcgggtcatcacttactgttaaccgcgccatgctggtcacggcttcccagttggcatcttatgatcagtttaaggagatgattttagagaaaggtgtgatgaaagatggacttgggactcatgtgacagctagttttgcggctgggtttgtggcggctgttgcatcgaatccggtggatgttattaaaactagggttatgaatatgaaggtggaggctggtaaggaaccaccttatgctggtgcattggattgtgctatgaaaacgattcgtgctgagggtcctatggctctttacaaaggatttattcctacaatttcaaggcagggacctttcactgttgttctgtttgttaccctggagcaggttcgcaaggtgttgaaggatttctga

SEQ ID NO: 98324 - protein, 324 aa, Trifolium pratense
MGVKGFVEGGIASIIAGCSTHPLDLIKVRMQLQGENAPKPNPVQVLRPALAFGQTGSATSIHVAGQTAVPQARVGLVSVGVRLVQQEGVKALFSGVSATVLRQTLYSTTRMGLYDILKNKWTDREAGGTMPLARKIEAGLIAGGVGAAIGNPADVAMVRMQADGRLPAPQRRNYKSVVDAITRMAKQEGVTSLWRGSSLTVNRAMLVTASQLASYDQFKEMILEKGVMKDGLGTHVTASFAAGFVAAVASNPVDVIKTRVMNMKVEAGKEPPYAGALDCAMKTIRAEGPMALYKGFIPTISRQGPFTVVLFVTLEQVRKVLKDF

SEQ ID NO: 98325 - DNA, 933 bp, Aspergillus oryzae
  CDS (1)..(933)
atgtcgacaacaacaggagcgttcatcgcaggaggaatcgcagcatgtggagctgtcacagtgacccatagttttgaaacagtcaaaatccgactacaattgcagggagaactacaagcaaagtccgaggcggtcaaaaaatacaagggtgttttccacggcgtcaaggtcatcttacagaatgagggcccccgtgggctgttccgaggcatcggttccgcttacatctatcaagtgctgctcaatggctgccgtctaggattctacgaacccctgcgcaagactctcacaacaacgatctatcaagacccccaggtccagtcgttgggtatcaatgtctttgctggtgctgcctcgggtatcatcggcgctgctgcaggttctccattcttccttgtcaaaactcgtctgcagtctttctcgccgttccttccagttggtacgcaacacaactatcataattcgttcgatggactacgaaagatctacacttctgagggagtaggcgggttataccgtggggttaatgcagccatggtccggacaggtttcggtagctctgttcagctgcctacctacttctttgctaagcgtcgcctggtcaagcatttgggaatggaagatggtcccgctcttcaccttgccagtagtacggcttctgggtttgttgtatgctgcgtcatgcatcctcctgacactatcatgtcaagaatgtataaccagaccggtaacctctacaagggcgcattggactgtctataccagaccgttcgtaaagagggcctgcttgctatttacaagggttatttcgctcatttggcccgtattttgcctcacactatcttaacccttagcttggccgagcagaccaacaagctcatgcgcagggttgaggaccggttcctctctgactcgatgaaggaagcactgtga

SEQ ID NO: 98326 - protein, 310 aa, Aspergillus oryzae
MSTTTGAFIAGGIAACGAVTVTHSFETVKIRLQLQGELQAKSEAVKKYKGVFHGVKVILQNEGPRGLFRGIGSAYIYQVLLNGCRLGFYEPLRKTLTTTIYQDPQVQSLGINVFAGAASGIIGAAAGSPFFLVKTRLQSFSPFLPVGTQHNYHNSFDGLRKIYTSEGVGGLYRGVNAAMVRTGFGSSVQLPTYFFAKRRLVKHLGMEDGPALHLASSTASGFVVCCVMHPPDTIMSRMYNQTGNLYKGALDCLYQTVRKEGLLAIYKGYFAHLARILPHTILTLSLAEQTNKLMRRVEDRFLSDSMKEAL

SEQ ID NO: 98327 - DNA, 945 bp, Aspergillus oryzae
  CDS (1)..(945)
atggcttctccaactaccaaagaatctcaggccgcgatggactttctacatcacccctacacccgtgcggcccttcctttcattaacggtggcctggcgggaatgacagcgaccaccgtcattcagccaattgacatgatcaaggtgcgccttcagttggcaggggagggtgtacgaactggccctcgcccgaccgcgttcggcgttgcccgcgacatcattgccggcggaaagatccttgatctctatactggtctgtcggcaggcttactccgccaggccgtttacactactgcccgcctgggtttcttcgatactttcagcaaaacgctcaataagcgcgccgaagccgcaaataggaagatcactttcgcggagcgcgccggtgcgggccttaccgctggtggaattgctgctatgattggtaatcccgctgacttggccctcgtacgcatgcagtcagacggcctgaagcccctagaggcgcgagcaaactaccgttcggtggtggatgcactcttccgcatttcgaagaatgagggcatcccggccttgtgggcaggagctttgccaaccgtcgtgcgggctatggctctcaatgttggtcaattgactttcttcgctgagtctaaggctcagctgaaggctcacacgtccctgtcggctcaaaaccagacctttgctgcttccgctatcgctggtttcttcgccagcttcctttctttacccttcgacttcatcaaaactcgtctgcagaagcaacagaaagaccctaagaccggccaggtgccgtacaagggtgtgttggattgcgctcgcaaagttgccaaggatgagggttggttgaggttttaccgcggattcgggacgtactatgtgcggatcgcaccccatgcgatggtcacgcttatcgtggctgattatctcaacctcattaccaagtaa

SEQ ID NO: 98328 - protein, 314 aa, Aspergillus oryzae
MASPTTKESQAAMDFLHHPYTRAALPFINGGLAGMTATTVIQPIDMIKVRLQLAGEGVRTGPRPTAFGVARDIIAGGKILDLYTGLSAGLLRQAVYTTARLGFFDTFSKTLNKRAEAANRKITFAERAGAGLTAGGIAAMIGNPADLALVRMQSDGLKPLEARANYRSVVDALFRISKNEGIPALWAGALPTVVRAMALNVGQLTFFAESKAQLKAHTSLSAQNQTFAASAIAGFFASFLSLPFDFIKTRLQKQQKDPKTGQVPYKGVLDCARKVAKDEGWLRFYRGFGTYYVRIAPHAMVTLIVADYLNLITK

SEQ ID NO: 98329 - DNA, 942 bp, Mesembryanthemum crystallinum
  CDS (1)..(942)
atgggggaggaggagaaggggaaatcagcaagtaatagtagtagtaatagtaatagtaatagtaatagtagtggagtatggaggaccataaagccattcgtgaatggaggtgcttctggaatgttggctacctgtgtaattcaacccatcgacatggtgaaggtcaggattcaattgggtcagggctctgctctcagcatcactaagaacatgcttcgtgatgatggtattcgtgctttctacaagggcctctctgcaggtttgctaagacaagcaacttatacaaccgcacgtcttggatctttcaagattctgacaaataaagcattagaggccaatgaagggaagcctttacctctatatcaaaaggctttgtgcggtttgagtgctggagcaattggagcttctgttggaagtccagcagacctggcactgatccgcatgcaggcagatgcaaccttaccggaggcgcaaaggcgacattacaaaaacgctttccatgcactctaccgtatcattgcagatgaaggtgttttggcactttggaaaggcgctgctcccactgttgtaagagcaatggcactcaacatgggcatgcttgcctcctatgatcaaagtgttgaatttttccgagattcgcttggatatggagaagttgccactgtcttaggggctagtactgtctctgggttctttgcttcagcctgcagtttaccatttgactacgtcaaaacacagatacaaaaaatgcagccagatgcagaaggcaagtatccttacaaaggttctcttgattgcaccatcaagactttgaaatctggaggcccattcaaattctatactggttttcctgtctactgtgtgagaattgcacctcatgccatgatgacgttgattttcctccatcaaatccaaaagctggagagtaccattggagtttag

SEQ ID NO: 98330 - protein, 313 aa, Mesembryanthemum crystallinum
MGEEEKGKSASNSSSNSNSNSNSSGVWRTIKPFVNGGASGMLATCVIQPIDMVKVRIQLGQGSALSITKNMLRDDGIRAFYKGLSAGLLRQATYTTARLGSFKILTNKALEANEGKPLPLYQKALCGLSAGAIGASVGSPADLALIRMQADATLPEAQRRHYKNAFHALYRIIADEGVLALWKGAAPTVVRAMALNMGMLASYDQSVEFFRDSLGYGEVATVLGASTVSGFFASACSLPFDYVKTQIQKMQPDAEGKYPYKGSLDCTIKTLKSGGPFKFYTGFPVYCVRIAPHAMMTLIFLHQIQKLESTIGV

SEQ ID NO: 98331 - DNA, 1416 bp, Saccharum officinarum
  CDS (169)..(1092)
ccttttctctatcgcgttaataaagcgcgacgccacccagcgatctaggcccgcctgctccatctacctcgctctcgccgccccgttcgcttcgcctccgccccgccccgccccgcttcgctcccccgagcccagccgagccgagcgcagcccgatccggaggtggggatggcggacgcgaagcagcagccacagcaggcggcggcggcggcggccaccaccggcgtctggaagacggtcaagcccttcgttaacggcggggcctccgggatgctcgccacctgcgtcatccaacctatcgacatggtcaaggtgaggatccagttgggtgagggctctgctggtcaggtcacgaggaacatgcttgcaaatgagggtgtccgctccttctacaagggtttgtctgccggtttgctaaggcaagcgacgtacacgactgctcgtcttggatccttcagggttctaactaacaaagcagttgaaaagaatgaagggaagccgttgcctctaattcagaaagcttttattggtctgactgctggagcaattggtgcttgtgttggtagtcctgctgatttggcactcattagaatgcaagccgattcgaccctgccagctgcacaacgacgcaactataagaatgctttccatgcactctaccgtatcactgctgatgagggagtccttgcgctttggaagggtgcaggtccaactgtggtgagagctatggcactcaatatgggtatgcttgcttcctatgaccagagtgtcgagctatttagggacaaacttggtgcaggagaaatttctactgttgttggagccagtgctatttctggattcttcgcctcagcatgcagtttgccctttgactatgtgaagacacagattcagaagatgcaacctgatgcgaatggcaagtacccgtacacagggtctttggactgtgccgtgaagaccttcaagagcggtggtccattcaagttctacactggtttccccgtgtactgtgtcaggattgcaccccatgtcatgatgacctggatattcttgaatcagatccagaagattgagaagaagattggcatataggaatgccaaccaaccgatacagggttgaccgctctatgctattatcgcttgactcgtataataacgttccagctgctttcgcaccatggtagttggttttggtagagacaagtctggtacaatttttaccttagcttacttgccaattgttatgttgcaataatcgaattatttgttgttggggggaattttttggggggtgggcattgctattgttggctgggatgcagccataaggagagggggatactacctagttatgccattgaatggaattggaccatattttatacagatttttaccgtcaggcttcagtccttttg

SEQ ID NO: 98332 - protein, 307 aa, Saccharum officinarum
MADAKQQPQQAAAAAATTGVWKTVKPFVNGGASGMLATCVIQPIDMVKVRIQLGEGSAGQVTRNMLANEGVRSFYKGLSAGLLRQATYTTARLGSFRVLTNKAVEKNEGKPLPLIQKAFIGLTAGAIGACVGSPADLALIRMQADSTLPAAQRRNYKNAFHALYRITADEGVLALWKGAGPTVVRAMALNMGMLASYDQSVELFRDKLGAGEISTVVGASAISGFFASACSLPFDYVKTQIQKMQPDANGKYPYTGSLDCAVKTFKSGGPFKFYTGFPVYCVRIAPHVMMTWIFLNQIQKIEKKIGI

SEQ ID NO: 98333 - DNA, 978 bp, Saccharum officinarum
  CDS (1)..(978)
atgggtgtcaagggattcgtcgagggcggcatcgcctccatcgtggccggctgctccacccacccgctggacctcatcaaggtccgcatgcagctgcagggggaagccgccgcggcgccgcagccagcgctacgcccggcgctcgccttccacgccggtggccacgccgtcgcgctcccgcaccaccacgacatccccgtgccgccaccgaggaagccggggccgctggccgtgggcgcgcagatcctgcgttccgagggcgcgcggggcctcttctcgggggtgtccgccaccatgctgcgccagacgctctactccaccacgcggatggggctgtacgacatcctcaagaccaagtggacgcccccggacaacaacggcgtcctcccgctgcaccgcaagatcgcggcggggctcgtggcgggcggcgtcggcgcggccgtgggcaacccggccgacgtggccatggtgcggatgcaggcggacgggcgcctgcccctggccgagcgccggaactacgccggcgtcggcgacgccatcggccggatggcgcgcgacgagggcgtccgcagcctctggcgcgggtcgtcgctcacggtgaaccgcgccatgatcgtgaccgcgtcgcagctcgccacgtacgaccaggcgaaggaggccatcctggcgcgccggggacccggcgccgacgggctcgccacgcacgtcgccgccagcttcaccgcggggatcgtggcggcggccgcgtcaaacccggtggatgtcgtcaagaccagaatgatgaacatgaaggtggcccgggcgccaccgccgtacgccggcgccgtcgactgcgccctcaagacggtaaggtcggaagggcccatggcgctgtacaaggggttcatccccaccgtgatgcgccagggacccttcaccgtcgtgctcttcgtcacgctcgagcaggtgcgcaaggtcttcaagggcgtcgagttctga

SEQ ID NO: 98334 - protein, 325 aa, Saccharum officinarum
MGVKGFVEGGIASIVAGCSTHPLDLIKVRMQLQGEAAAAPQPALRPALAFHAGGHAVALPHHHDIPVPPPRKPGPLAVGAQILRSEGARGLFSGVSATMLRQTLYSTTRMGLYDILKTKWTPPDNNGVLPLHRKIAAGLVAGGVGAAVGNPADVAMVRMQADGRLPLAERRNYAGVGDAIGRMARDEGVRSLWRGSSLTVNRAMIVTASQLATYDQAKEAILARRGPGADGLATHVAASFTAGIVAAAASNPVDVVKTRMMNMKVARAPPPYAGAVDCALKTVRSEGPMALYKGFIPTVMRQGPFTVVLFVTLEQVRKVFKGVEF

SEQ ID NO: 98335 - DNA, 996 bp, Saccharum officinarum
  CDS (1)..(996)
atgggtgtcaagggattcgtcgagggcggcatcgcctccatcgtggccggctgctccacccacccgctggacctcatcaaggtccgcatgcagctgcagggggaagccgccgccgtgaccgcggcgccgcagccggctctgcgcccggcgctcgccttccacgccggtggccacgccgtcgcgctcccgccccaccaccacgacatcccggcggcggcggcgccgagaaagccggggccgctggccgtgggcgcgcagatcctgcgttccgagggcgcgcggggcctcttctcgggggtgtccgccaccatgctgcgccagacgctctactccaccacgcggatggggctgtacgacatcctcaagaccaagtggacgcccccggacaacaacggcgtcctcccgctgcaccgcaagatcgcggcggggctcgtggcgggcggcgtcggcgcggccgtgggcaacccggccgacgtggccatggtgcggatgcaggcggacgggcgcctgcccctggccgagcgccggaactacgccggcgtcggcgacgccatcggccggatggcgcgcgacgagggcgtccgcagcctctggcgcgggtcgtcgctcacggtgaaccgcgccatgatcgtgaccgcgtcgcagctcgccacgtacgaccaggccaaggaggccatcctggcgcgccggggacccggcgccgacgggctcgccacgcacgtcgccgccagcttcaccgcgggcatcgtggccgccgccgcgtccaacccggtggatgtcgtcaagacgaggatgatgaacatgaaggtggcgcccggcgcgccaccgccgtacgccggcgccgtcgactgcgccctcaagacggtaaggtcggaagggcccatggcgctgtacaaggggttcatccccaccgtgatgcgccagggacccttcaccgtcgtgctcttcgtcacgctcgagcaggtgcgcaaggtcttcaagggcgtcgagttctga

SEQ ID NO: 98336 - protein, 331 aa, Saccharum officinarum
MGVKGFVEGGIASIVAGCSTHPLDLIKVRMQLQGEAAAVTAAPQPALRPALAFHAGGHAVALPPHHHDIPAAAAPRKPGPLAVGAQILRSEGARGLFSGVSATMLRQTLYSTTRMGLYDILKTKWTPPDNNGVLPLHRKIAAGLVAGGVGAAVGNPADVAMVRMQADGRLPLAERRNYAGVGDAIGRMARDEGVRSLWRGSSLTVNRAMIVTASQLATYDQAKEAILARRGPGADGLATHVAASFTAGIVAAAASNPVDVVKTRMMNMKVAPGAPPPYAGAVDCALKTVRSEGPMALYKGFIPTVMRQGPFTVVLFVTLEQVRKVFKGVEF

SEQ ID NO: 98337 - DNA, 825 bp, Saccharum officinarum
  CDS (1)..(825)
atggcggaggcctccacctaccccttagacgcagtcaagacgcgcctccagctccaccgcaaccccggcggctcgggcgggcgcggcgtagtccgggtcgcggctgagctcgtccgcgatggcggggtttaccggggcttctcccccgccgtcctccgccacctgatgtacaccccgcttcgcatcgtggggtacgagcatctccggtccaccctcgctagcgaggggcgggaggttggcctttttgagaaggcgatcgctgggggactctccggcgttgccgcgcaggtggtgtcaagccctgctgatctcatgaaggtaaggatgcaagcagacagcaggatgttgaaccaaggcattcaaccacggtacactggaatcgcagatgctttcactaaaatcatacgagcggagggctttcggggactttggaagggggttgttccaaatgcacagagggcatttcttgtcaacatgggcgaactgacgtgctacgatcaggcaaagcgtctcatcattcgcaagcagatttgcgatgataatctttatgctcacacattggcctctatcgcgtcagggctgtctgcgacaactttgagctgccccgcggatgtaatcaaaacaaggatgatgaaccaagggaaggagggtaaagccatgtacaggagttcttacgattgcttggtcaagactgtcagacatgagggcgtaacggcactgttgaagggttttttgcttacatgggcaaggcttggcccatgccagtttgtgttctgggtttcttacgagaaattgcgccaagcatcaggtatttcatcattttga

SEQ ID NO: 98338 - protein, 274 aa, Saccharum officinarum
MAEASTYPLDAVKTRLQLHRNPGGSGGRGVVRVAAELVRDGGVYRGFSPAVLRHLMYTPLRIVGYEHLRSTLASEGREVGLFEKAIAGGLSGVAAQVVSSPADLMKVRMQADSRMLNQGIQPRYTGIADAFTKIIRAEGFRGLWKGVVPNAQRAFLVNMGELTCYDQAKRLIIRKQICDDNLYAHTLASIASGLSATTLSCPADVIKTRMMNQGKEGKAMYRSSYDCLVKTVRHEGVTALLKGFLLTWARLGPCQFVFWVSYEKLRQASGISSF

SEQ ID NO: 98339 - DNA, 1468 bp, Saccharum officinarum
  CDS (138)..(1067)
ccggccgcagcagcccttggcttgtgttgctggctgcggggggcgggggccgggaaccacagcactccaccgcgggcaactgcccgctttcctcgcctccccctccccctccccctcgttctcggcccgcagccgccatgccaggggaccacggctccaaggtcgacatctccttcgccggccgcttcaccgccagcgccatcgcagcatgcttcgcagagatatgcaccatcccgctcgacaccgccaaggtcaggctccagctgcagaagaacgtcgtcgccgctgccgccggagacgccgcgccaccgctccccaagtaccgcggcctgctcggaaccgccgccaccatcgctagggaggaaggggccgcagcgctatggaagggcatcgtcccgggcctccatcggcagtgcatttacggcggcctccgcattggcctctacgagcctgtcaaatccttctacgtcggcaaagaccatgttggagatgtccctttgtccaagaagatagccgccggcttcacaactggtgccatcgctatcagcatcgccaaccccactgaccttgtcaaggtcaggctccaggctgaaggcaagcttgcgcctggtgtgccacgccgctacactggcgcaatggatgcttattccaagattgctcgacaggaagggattgccgctctgtggactgcgctaggaccaaatgtagcgcggaatgctatcatcaatgctgctgagttggccagttacgatcaagtcaagcagacaattttgaaactccctgggttcaaagatgatgtggtcacccacctctttgctggtcttggtgctggcttctttgctgtttgtgtcggttccccagttgatgtggttaagtcgagaatgatgggtgactcagcctacaaaagcactctcgattgttttgtgaagacacttaagaatgatggccctttggcattttacaaaggcttcctgccaaactttgcaagacttggatcttggaatgtgattatgttcttgacattagagcaggttcaaaagctgtttgtgaggaaaccggcaagctgaagatagaggttttgcagccagttggcgtacaatgacgcacagtttttcttcgatagacaaaagggaaaaaaaatttgacaccttcccctgaagaattggggaacaaggacaaatctgacacctcaattgcgagaataaatcacagcgggcagttgcatgatccctgaacgaataaattcacaactagcaaacagatgcgagtaaacaatatgtggtgaatgttggaacttgaactgctgtagttcaatggggggcctgttaatgatgagcatctgttgcatgtttcgaatcgatttaatgtttcgtttttctgtacttgtaccgaaatgctttggtcggtatgacgatcaatgtgtgtgaagggtaatccaggtgataaatggtctgcaaaaaaaaaaaaa

SEQ ID NO: 98340 - protein, 309 aa, Saccharum officinarum
MPGDHGSKVDISFAGRFTASAIAACFAEICTIPLDTAKVRLQLQKNVVAAAAGDAAPPLPKYRGLLGTAATIAREEGAAALWKGIVPGLHRQCIYGGLRIGLYEPVKSFYVGKDHVGDVPLSKKIAAGFTTGAIAISIANPTDLVKVRLQAEGKLAPGVPRRYTGAMDAYSKIARQEGIAALWTALGPNVARNAIINAAELASYDQVKQTILKLPGFKDDVVTHLFAGLGAGFFAVCVGSPVDVVKSRMMGDSAYKSTLDCFVKTLKNDGPLAFYKGFLPNFARLGSWNVIMFLTLEQVQKLFVRKPAS

SEQ ID NO: 98341 - DNA, 918 bp, Solanum demissum
  CDS (1)..(918)
atgaaagcccaagtgtttaacgatggccggaaagcccatacaacaaagatagccgtgacggcgatgtcggcaatggcggcggaaacggtgacgtttccggttgacctcatcaagacgaagcttcaacttcacggcgaatctcttgtttcgtctcgacggatatcagccgtccgagtagtagcggagatcttacgaaacgacggcattttaggactatacaagggattgtcaccggcgattataaggcatatgttttacactccaattcgaatcgtaaactatgagtttttgcggaattctttggttcctgctgatcatactctttctctgtcaagcaaagccattattggtggaatatctggtgttattgctcaggttgtggcgagcccagctgatcttgtcaaagttaggatgcaagcggacagtagaatggcaagtcagggtctgcaacctcgatattgcgggccatttgatgctttcaacaagattattcgaactgaaggcgtcaggggactttggaaaggcgtgctccctaatgcccagagagcttttttagttaacatgggagaactagcgtgctatgatcatgcaaagcgctttgtgatcaataacaacatagcaaatgataatatatatgcacacactttatcatctataatgtcaggcctgtcagcaactacattgagctgtccagcagatgtaattaagacaagaatgatgaatcaggctgccgataagcaagggaattgcaaatatagaaactcctacgattgtctagtcaaaacggttagagttgaaggactcaaagcattgtggaagggattctttcctacatgggcaagacttggcccttggcaatttgtattctgggcatcatatgagaaatttcgtcaaatcgctagtctctcttcattctaa

SEQ ID NO: 98342 - protein, 305 aa, Solanum demissum
MKAQVFNDGRKAHTTKIAVTAMSAMAAETVTFPVDLIKTKLQLHGESLVSSRRISAVRVVAEILRNDGILGLYKGLSPAIIRHMFYTPIRIVNYEFLRNSLVPADHTLSLSSKAIIGGISGVIAQVVASPADLVKVRMQADSRMASQGLQPRYCGPFDAFNKIIRTEGVRGLWKGVLPNAQRAFLVNMGELACYDHAKRFVINNNIANDNIYAHTLSSIMSGLSATTLSCPADVIKTRMMNQAADKQGNCKYRNSYDCLVKTVRVEGLKALWKGFFPTWARLGPWQFVFWASYEKFRQIASLSSF

SEQ ID NO: 98343 - DNA, 900 bp, Citrus junos
  CDS (1)..(900)
atgggagaggagaagaagccacaatcagctggtgtatggcccaccgttaagccttttgtcaatggtggtgcctctggtatgcttgccacctgtgtcattcagcccattgatatgatcaaggtgagaattcagctgggccagggatccgccggtaccgtgacaaagactatgcttaagaatgagggttttggtgccttttacaaggggttgtctgctggactgctcaggcaagctacatataccactgctcgtcttggatcatttaggatcttgacaaacaaagcaattgaagccaatgacgggaagcctcttccattgtatcagaaagccttgtgtgggctaactgctggtgctattggagcttctgtcggtagtccagcagatttggcacttatccgtatgcaggctgatgctacactacctgctgctcaacgccgccattacactaatgccttccaagctctttatcgtattgttacagatgaaggggtcttagcactttggaaaggtgcaggtcctactgttgtgagagctatggcattgaacatgggcatgcttgcctcctacgatcaaagtgttgagtttttcagagatgcgtgtggtttgtctgaacttcctacagtaataggggcgagtacagtgtcagggttctttgcttcagcttgcagtttaccctttgattatgtcaaaacacaaattcagaaaatgcaaccagatgctcaaggaaagtatccatacacaggctctatggactgtgccatgaaaaccctcaaggctggtggaccattcaaattttacactggtttccctgtgtactgtgttcggattgctcctcatgtcatgatgacttggatattcctcaaccagatccaaaagcttgagaagaaagtggggttgtag

SEQ ID NO: 98344 - protein, 299 aa, Citrus junos
MGEEKKPQSAGVWPTVKPFVNGGASGMLATCVIQPIDMIKVRIQLGQGSAGTVTKTMLKNEGFGAFYKGLSAGLLRQATYTTARLGSFRILTNKAIEANDGKPLPLYQKALCGLTAGAIGASVGSPADLALIRMQADATLPAAQRRHYTNAFQALYRIVTDEGVLALWKGAGPTVVRAMALNMGMLASYDQSVEFFRDACGLSELPTVIGASTVSGFFASACSLPFDYVKTQIQKMQPDAQGKYPYTGSMDCAMKTLKAGGPFKFYTGFPVYCVRIAPHVMMTWIFLNQIQKLEKKVGL

SEQ ID NO: 98345 - DNA, 864 bp, Pichia angusta
  CDS (1)..(864)
atggaggtatgtatcacaactcagtcgattgataacggtgtaggagcggcgtccatgttcgcatgtctctttacccatcctttggatttggccaaagtcagactccagacggcgaaggttcctggcgatagtttggtgtccctagcgtataagattgtaaaaacagagggagtacttgcagcatatgcggggttatctgcgtcgctgctaagacaggcaacatattcaaccgcacggtttggtgtttatgagaagctaaaagggataatgacagaccccacgaaaggccaggcatccactttccaattacttgcagcatctatgatagctggtgcagttggtggtgttgttggaaaccctgcggacgttgtgaatattcgaatgcaaaacgataatagtctcccggagtcccaaagaagacattacaagcatgcattggatggcttacttaaaataacgagagaagaaaacatcactgcactatttaggggccttggaccgaatttggcacgaggcattctgatgacggcttctcaagttgtctcttacgacgtggccaagaaactgcttgttgaaaatttgagcatggaccccaaaactaaagcaacccatttttctgcatcattaattgctggtttagtagcaaccactgtctgctcaccagcggatgttctgaagactagaattatgaacagctctggcactggtcaaagctctttcggtattctcaaggacgctatatctagagaaggcttgggattcatgtttagagggtggacccctgcattcattagattagggccacatacaattttgactttcattgctctggaagagttgagaaggttaaagattggtctttaa

SEQ ID NO: 98346 - protein, 287 aa, Pichia angusta
MEVCITTQSIDNGVGAASMFACLFTHPLDLAKVRLQTAKVPGDSLVSLAYKIVKTEGVLAAYAGLSASLLRQATYSTARFGVYEKLKGIMTDPTKGQASTFQLLAASMIAGAVGGVVGNPADVVNIRMQNDNSLPESQRRHYKHALDGLLKITREENITALFRGLGPNLARGILMTASQVVSYDVAKKLLVENLSMDPKTKATHFSASLIAGLVATTVCSPADVLKTRIMNSSGTGQSSFGILKDAISREGLGFMFRGWTPAFIRLGPHTILTFIALEELRRLKIGL

SEQ ID NO: 98347 - DNA, 1416 bp, Arabidopsis thaliana
  CDS (281)..(1222)
aaatctcaccttctctctccctctctataacaaacattaatacacacaccaaaaaaaaacctgtttatgtctcaaagatctctgattcctcattcttcttctatagcttttggtctccattctcatctcttaatctccagtgagatcagctccaattctaactggtctctctaaaaaaaaaacagaaataaaaatccaacctttttcaattttcgttcaattttcccggaaaaaaaagcgatccttttgatttttcgatttctccaagtaacaattcaaaatgggtctaaagggttttgctgaaggaggaatagcttcgattgttgcgggttgttcgacccacccgcttgatctaatcaaggtccgaatgcaacttcaaggcgaatcagctccgattcaaaccaatctccgaccagctcttgcttttcaaacttcgaccaccgtcaacgcgcctcctctacgcgttggtgtgatcggagtcggatctcgtttaataagagaagaaggcatgcgtgctctgttttccggcgtctccgccaccgttcttcgtcaaactctgtattcaacgactcgtatgggtttatacgacatcatcaaaggagaatggaccgacccgggaacaaaaacgatgcctttaatgaaaaaaatcggtgccggagccatcgccggagcaatcggagccgccgttgggaatcctgctgacgtggcgatggtgaggatgcaagccgatggtcgtttaccgttgactgatagaagaaactacaaaagcgttttagacgcgatcacgcaaatgattcgcggtgaaggcgttacgtcgttgtggagaggatcgtctttgacgataaacagagcaatgcttgtgacgtcatcgcagttggcttcgtatgattctgttaaagagacgattttggagaaagggttgttgaaagatgggcttgggactcatgtgttggcgagtttcgcggcggggtttgttgcgagcgttgcgagtaatcctgttgatgtgattaagacgagagtgatgaatatgaaggtggtggctggagttgctccgccgtataaaggagcggttgattgtgctttgaaaacggtgaaagcggaagggattatgtctttgtataaaggttttatcccgacggtttcgagacaagcaccgttcacggtggttttgtttgttacgcttgaacaagttaagaagttgttgaaggactatgacttttgaaaaaacaagagttgaattatgttgaagatgatgatgatggtggcgacaataagtttctttttttttttttggttataattttcatttgattattggagtagttttaaattgtttcgcatttgttcgaatagatctatgatatgataattcttctcatggagaagaaagaaagaaagaaacagttcatttgatcc

SEQ ID NO: 98348 - protein, 313 aa, Arabidopsis thaliana
MGLKGFAEGGIASIVAGCSTHPLDLIKVRMQLQGESAPIQTNLRPALAFQTSTTVNAPPLRVGVIGVGSRLIREEGMRALFSGVSATVLRQTLYSTTRMGLYDIIKGEWTDPGTKTMPLMKKIGAGAIAGAIGAAVGNPADVAMVRMQADGRLPLTDRRNYKSVLDAITQMIRGEGVTSLWRGSSLTINRAMLVTSSQLASYDSVKETILEKGLLKDGLGTHVLASFAAGFVASVASNPVDVIKTRVMNMKVVAGVAPPYKGAVDCALKTVKAEGIMSLYKGFIPTVSRQAPFTVVLFVTLEQVKKLLKDYDF

SEQ ID NO: 98349 - DNA, 933 bp, Zea mays
  CDS (1)..(933)
atgccaggggaccacggctccaagggcgacatctccttcgccggacgcttcacggccagcgccatcgcagcatgcttcgcagagatatgtaccatcccgctcgacacggccaaggtcaggctccagctgcagaagaacgtcgtcgccgccgccgcctccggggacgccgcgccagcgcttcccaagtaccgcggcctgctcggaactgccgccaccatcgctagggaggaaggggccgcagcgctctggaagggcatcgtcccgggcctccaccgacagtgcatctacggggggctccgcattggcctctacgagcctgtcaaatccttctacgtcggcaaagaccacgttggggatgtccctttgtccaagaagatagccgccggcttcacaactggtgccatcgctatcagcatcgccaaccctactgaccttgtcaaggtcaggctccaggccgagggcaagcttgcgcctggtgtgccacgccgctacactggcgcaatggatgcttattccaagattgctagacaggaaggggttgccgctctgtggactggccttggaccaaatgtagcgcggaatgctatcatcaatgctgctgagttggccagttatgatcaagtcaagcagtcaattttgaaactccctgggttcaaagatgatgtggtcacccacctttttgctggtcttggtgctggcttctttgctgtttgtgttggttccccagttgatgtggttaagtcgagaatgatgggtgactcagcctacaaaagcactctcgattgttttgtgaagacgctaaagaatgatggccctttggcattttacaaaggcttcctgccaaactttgcaagactgggatcttggaatgtgattatgttcttgacattggagcaggttcaaaagctgtttgtgaggaaagcgacaagctga

SEQ ID NO: 98350 - protein, 310 aa, Zea mays
MPGDHGSKGDISFAGRFTASAIAACFAEICTIPLDTAKVRLQLQKNVVAAAASGDAAPALPKYRGLLGTAATIAREEGAAALWKGIVPGLHRQCIYGGLRIGLYEPVKSFYVGKDHVGDVPLSKKIAAGFTTGAIAISIANPTDLVKVRLQAEGKLAPGVPRRYTGAMDAYSKIARQEGVAALWTGLGPNVARNAIINAAELASYDQVKQSILKLPGFKDDVVTHLFAGLGAGFFAVCVGSPVDVVKSRMMGDSAYKSTLDCFVKTLKNDGPLAFYKGFLPNFARLGSWNVIMFLTLEQVQKLFVRKATS

SEQ ID NO: 98351 - DNA, 1144 bp, Nicotiana tabacum
  CDS (25)..(927)
cactcaaacaagattcgtagaaaaatgggagacaaggcgaaatcgacgagcagcgcaggtgcttggcccactgtaaagccattcgctaatggaggtgcttctggtatgcttgccacctgcgttattcagcccattgatatgatcaaggtacgaatccaattagggcagggatcagctggagaagtcacgaggactatgcttaagaatgagggatttggtgcattttacaagggtttgtcagctggtcttcttaggcaagcaacatacacaacagcacgacttggatcgttcagagttttgacgaacaaggctattgaggcgaatgatggaaagcccttacctctataccaaaaggctttgtgtggtctgactgccggagcaattggggcatgttttggtagtccagcagatttagctctaatccgtatgcaagctgatgctactttacctgtagcccaaagacgtaactacacaaatgcgtttcatgcactctaccgcattgtggctgatgaaggagttttatccctttggaaaggtgctggtcctacagtagtgagggcaatggcattgaacatgggaatgctcgcctcttatgaccagagtgttgagttctttaaggacaatctcggcatgggggaggctgctacagttgtaggagccagcagtgtttcgggattctttgctgctgcttgcagtttaccatttgattatgtcaaaacccagattcagaaaatgcagccagatgctcaagggaaatatccctacaccggttcattcgattgtgccatgaaaactttgaaatcaggaggccccttcaaattctacactggatttccagtatattgtgttaggattgcgcctcatgtcatgatgacgtggatattccttaaccaaatccagaaggtggagaagaaaataggattgtaacttgctgaagactacacattcatgcgtcaagttgagatctattagaataacacggccttgtatttagttctgccttttcttttcttgtctaaatttagaattctttgcttttgtaatttctcaccttaactgaaaaggggtgcctcaagattttttcattgacatgaattttacaacagggatttggagttgacagtactccttccaatttctcttt

SEQ ID NO: 98352 - protein, 300 aa, Nicotiana tabacum
MGDKAKSTSSAGAWPTVKPFANGGASGMLATCVIQPIDMIKVRIQLGQGSAGEVTRTMLKNEGFGAFYKGLSAGLLRQATYTTARLGSFRVLTNKAIEANDGKPLPLYQKALCGLTAGAIGACFGSPADLALIRMQADATLPVAQRRNYTNAFHALYRIVADEGVLSLWKGAGPTVVRAMALNMGMLASYDQSVEFFKDNLGMGEAATVVGASSVSGFFAAACSLPFDYVKTQIQKMQPDAQGKYPYTGSFDCAMKTLKSGGPFKFYTGFPVYCVRIAPHVMMTWIFLNQIQKVEKKIGL

SEQ ID NO: 98353 - DNA, 1427 bp, Arabidopsis thaliana
  CDS (276)..(1217)
gaccttctctctccctctctataacaaacattaatacacacaccaaaaaaaaaacctgtttatgtctcaaagatctctgattcctcattcttcttctatagcttttggtctccattctcatctcttaatctccagtgagatcagctccaattctaactggtctctctaaataaaaaacagaaataaaaatccaacctttttcaattttcgttcaattttcccggaaaaaaaagcgatccttttgatttttcgatttctccaagtaacaattcaaaatgggtctaaagggttttgctgaaggaggaatagcttcgattgttgcgggttgttcgacccacccgcttgatctaatcaaggtccgaatgcaacttcaaggcgaatcagctccgattcaaaccaatctccgaccagctcttgcttttcagacttcgaccaccgtcaacgcgcctcctctacgtgttggtgtaatcggagtcggatctcgtttaataagagaagaaggcatgcgtgctctgttttccggcgtctccgccaccgttcttcgtcaaactctgtattcaacgactcgtatgggtttatacgacatcatcaaaggagaatggaccgacccggaaacaaaaacgatgcctttaatgaaaaaaatcggtgccggagccatcgccgtagcaatcggagccgccgttgggaatcctgctgacgtggcgatggtgaggatgcaagccgatggtcgtttaccgttgactgatagaagaaactacaaaagcgttttagacgcgatcacgcaaatgattcgcggtgaaggcgttacgtcgttgtggagaggatcgtctttgacgataaacagagcaatgcttgtgacgtcatcgcagttggcttcgtatgattctgttaaagagacgattttggagaaagggttgttgaaagatgggcttgggactcatgtgtcggcgagtttcgcggcggggtttgttgcgagcgttgcgagtaatcctgttgatgtgattaagacgagagtgatgaatatgaaggtggtggctggagttgctccgccgtataaaggagcggttgattgtgctttgaaaacggtgaaagcggaagggattatgtctttgtataaaggttttatcccgacggtttcgagacaagcaccgttcacggtggttttgtttgttacgcttgaacaagttaagaagttgttcaaggactatgacttttgaaaaaaacaagagttgaattatgttgaagaagatgaatgatggtggcgacaataagcttctctttttttctggttataattttcttttgattatttgagtagttttaaattgtttcccatttgttggaatagatctatgatatgataattcttctcatggagaagaaagaaagaaagaaacagttcatttgatccaaaaaaaaaaaaaaaa

SEQ ID NO: 98354 - protein, 313 aa, Arabidopsis thaliana
MGLKGFAEGGIASIVAGCSTHPLDLIKVRMQLQGESAPIQTNLRPALAFQTSTTVNAPPLRVGVIGVGSRLIREEGMRALFSGVSATVLRQTLYSTTRMGLYDIIKGEWTDPETKTMPLMKKIGAGAIAVAIGAAVGNPADVAMVRMQADGRLPLTDRRNYKSVLDAITQMIRGEGVTSLWRGSSLTINRAMLVTSSQLASYDSVKETILEKGLLKDGLGTHVSASFAAGFVASVASNPVDVIKTRVMNMKVVAGVAPPYKGAVDCALKTVKAEGIMSLYKGFIPTVSRQAPFTVVLFVTLEQVKKLFKDYDF

SEQ ID NO: 98355 - DNA, 1297 bp, Nicotiana tabacum
  CDS (74)..(967)
agagcttcagccccccatttattattctctttttctttttgaatctgaagggaaaagagaacaggaaaatagaatggtagagaagccaaaatctggaggtgtttggcccactgttaagccctttgttaatggaggtgcttctggtatgcttgccacctgtgttattcagcccatcgatatgatcaaggtgaggatacaattgggtcagggatcagcagttgatgtcaccaagaccatgcttaaaaatgaaggctttggtgccttttacaagggtttgtcagctgggcttcttaggcaggcaacctatacaacagccagacttgggtcattcagaattttgacgaacaaggccattgaggccaatgaaggaaagcccttgcctctgtaccaaaaggctttatgcggtcttactgctggagcaattggtgcatgttttggtagtccagcagatttagccctcattcgtatgcaagctgatgctaccttgcctttagcacagagacgtcattacacaaatgcatttcatgcactctcccgtattgtggctgatgaaggagttctagccctctggaaaggtgctggccccacagtagtaagggcaatggcattgaacatgggaatgcttgcctcttatgaccaaagtgtggagttctgtagggacaaccttggcatgagtgaggctgctacagtagtaggggccagcagtgtttctggattctttgctgctgcttgcagtttaccatttgattacgtcaagactcagatacagaaaatgcagccagatgctgaaggaaagttgccttactctggttctttcgattgtgccatgaaaactttgaaggcaggaggaccgttcaaattttacaccggatttccagtatattgtgttaggattgctcctcatgttatgatgacttggattttccttaaccaaattcagaaggcggagaagaaactcggattgtgatttgtttctaaaagatacatccgctcagttgagctctattagaataacatctttgcattgttgtattagtacttctttatctatttctttaatttcacaccttcaaagtgaaagggtgctttaagatttttttggcgataccttgactcgtgaaatttaggttaggcatttggtcttttttgatattcctaccaatttagttttgggaggactgctttatccaaatggatgggaagattcttttagctgaataagctatgtacttcaaaaacttttttgaagtaggttttatggagttttacaccaaaaaaaaaaaaaaaaaaaaaaaaa

SEQ ID NO: 98356 - protein, 297 aa, Nicotiana tabacum
MVEKPKSGGVWPTVKPFVNGGASGMLATCVIQPIDMIKVRIQLGQGSAVDVTKTMLKNEGFGAFYKGLSAGLLRQATYTTARLGSFRILTNKAIEANEGKPLPLYQKALCGLTAGAIGACFGSPADLALIRMQADATLPLAQRRHYTNAFHALSRIVADEGVLALWKGAGPTVVRAMALNMGMLASYDQSVEFCRDNLGMSEAATVVGASSVSGFFAAACSLPFDYVKTQIQKMQPDAEGKLPYSGSFDCAMKTLKAGGPFKFYTGFPVYCVRIAPHVMMTWIFLNQIQKAEKKLGL

SEQ ID NO: 98357 - DNA, 974 bp, Triticum aestivum
  CDS (70)..(930)
cttctacccttctttccctctgctcgccatcgaccgaaccacagccgccgccgcttccccggggataaaatggcgacggcctcttccttcgccgccgtcttcatcagcagcgccatcgcctcctgcttcgctgaggtgtgcaccattcctctggacacagccaaggtgcgtcttcagctgcaaaagaaaacagctgctgggcctgcaggtacagtaggaatgctgggcacaatgatgtcgattgcaagggaggaaggcgtcaccgcactttggaagggcatcatccctggctttcatcgccagtgcctctatggcggcctccgtgtcggcttgtatgagcctgtcaaagccttatttgtgtttgtaggtgatgccactttaatgaacaagattcttgccgctcttacaactggtgtcatagcgattgctgtcgcaaatccaactgatcttgtcaaagtgagattgcaagcagatggaaaatctactgccgtcaagaggcactattctggagcccttaatgcgtatgccaccatagtcagacaggaaggtatcggagctttgtggactggccttggtcctaatatggcacgaaatgctttgattaatgccgccgagttggccagctacgaccaatttaaacagatgtttctaggtcttcctgggtttacagataatgtttatactcatcttttagctggactcggtgccggtatttttgctgtttgcattggatctccagtggatgtggtgaaatcaagaatgatgggcgattcaacatacagaagtacatttgattgtttcgccaagacattaaaaaatgatggacttgctgctttctacaaggggtttattgcaaacttttgtcgagttgggtcatggaatgtgataatgttcttaactttggaacaggttagaagcttctttcagtaaggattatatatgaaatctgcgctgcaaggtttcatggaacaagc

SEQ ID NO: 98358 - protein, 286 aa, Triticum aestivum
MATASSFAAVFISSAIASCFAEVCTIPLDTAKVRLQLQKKTAAGPAGTVGMLGTMMSIAREEGVTALWKGIIPGFHRQCLYGGLRVGLYEPVKALFVFVGDATLMNKILAALTTGVIAIAVANPTDLVKVRLQADGKSTAVKRHYSGALNAYATIVRQEGIGALWTGLGPNMARNALINAAELASYDQFKQMFLGLPGFTDNVYTHLLAGLGAGIFAVCIGSPVDVVKSRMMGDSTYRSTFDCFAKTLKNDGLAAFYKGFIANFCRVGSWNVIMFLTLEQVRSFFQ

SEQ ID NO: 98359 - DNA, 888 bp, Candida glabrata
  CDS (1)..(888)
atgtctgaaaaacaagtgaagtacccttggtggtatggtggtgccgctggtatatttgcggtgatgaacacgcatccattggacttgacgaaagtgcggcttcaagcggccccaataccaaaacctacgattgtgcagatgcttcggagtattttgaagaatgaaggcattgtcggactttatgccggtctttctgcgtcgttgctacgtcaatgcacatacactactgcccggtttggtatgtatgatgctttgaaagagcatgttatcccccgggacaaactaaccaacatgtggtacctgttgggtgcctccatggttagtggtgcattgggtggtcttgccggaaatttcgcagacttgatcaacatccgtatgcagaatgactccgcgttaccattagataagagacgtaattacaagaacgctatcgatggcatggtcaagatatataaagcagaaggtgcaaagtctcttttcctcacgggttggaagcccaacatggtgagaggtgtgttgatgacagcatcgcaggttgtcacctatgatatgttcaagaatttcctggttaccaagtacaatatggacccaaagaaaaatagtactcacttgacatcgtcactcttagctgggtttgtggctacaactgtgtgttcgccagcggatgtcatcaaaactattgtcatgaatgctcacaagaagcccggtcacaatcatgactcctcctttaagatattgatggaagctataaataaagaaggcccatcgtttatgtttagaggttgggtccctagtttcaccagactggcgcctttcactatgctaatctttttcgcaatggagcagctcaagaaatatagagtagggatgcctaaggaggaagcataa

SEQ ID NO: 98360 - protein, 295 aa, Candida glabrata
MSEKQVKYPWWYGGAAGIFAVMNTHPLDLTKVRLQAAPIPKPTIVQMLRSILKNEGIVGLYAGLSASLLRQCTYTTARFGMYDALKEHVIPRDKLTNMWYLLGASMVSGALGGLAGNFADLINIRMQNDSALPLDKRRNYKNAIDGMVKIYKAEGAKSLFLTGWKPNMVRGVLMTASQVVTYDMFKNFLVTKYNMDPKKNSTHLTSSLLAGFVATTVCSPADVIKTIVMNAHKKPGHNHDSSFKILMEAINKEGPSFMFRGWVPSFTRLAPFTMLIFFAMEQLKKYRVGMPKEEA

SEQ ID NO: 98361 - DNA, 984 bp, Oryza sativa
  CDS (1)..(984)
atggggttcaagggatttgtggagggtggcatcgcgtccatcgtcgctgggtgctcgacgcacccgctcgatttgattaaggtgaggatgcagctgcagggggaggcgtcggcggcggcggcggcggtcgcgccggcgcaggcggcgctgcggccggcgctggcgttccacgcggggcaggccgtggcgatcccgcatgacgtgattgcgccgccgaggaagcccgggccgatagccgtcggcgcgcagatcctgcgggcggagggcgcggcggggctcttctccggcgtgtcggccaccatgctgcgccagacgctctactccaccacccggatggggctctacgacatactgaagaagaagtggacccaggagaacggcggcgtgctgccgctccaccgcaagatcgccgctgggctcatcgccggcggggtcggcgccgccgtggggaacccggccgacgtcgccatggtgcggatgcaggccgacgggcggctcccgctcgccgagcgccggaactaccgcagcgtcggggacgccatcggccggatggcgcgcgacgagggcgtccgcagcctgtggcgcgggtcgtcgctgacggtgaaccgcgccatgatcgtcacggcgtcgcagctggccacctacgaccaggccaaggaggccatcctggcgcgccgcggccccggcgccgacgggctgggcacgcacgtcgtggccagcttcgccgcggggctcgtcgccgccgcggcgtccaaccccgtggacgtggtgaagacgagggtgatgaacatgaaggtggcgcccggcgcgccgccgccctactccggcgccatcgactgcgcgctcaagacggtgcggtcggagggcgtcatggcgctgtacaaggggttcatccccaccgtgtcgcgccagggccccttcaccgtcgtgctcttcgtcacgctcgagcaggtgcgcaaggtcttcaacggcgtcgagttctaa

SEQ ID NO: 98362 - protein, 327 aa, Oryza sativa
MGFKGFVEGGIASIVAGCSTHPLDLIKVRMQLQGEASAAAAAVAPAQAALRPALAFHAGQAVAIPHDVIAPPRKPGPIAVGAQILRAEGAAGLFSGVSATMLRQTLYSTTRMGLYDILKKKWTQENGGVLPLHRKIAAGLIAGGVGAAVGNPADVAMVRMQADGRLPLAERRNYRSVGDAIGRMARDEGVRSLWRGSSLTVNRAMIVTASQLATYDQAKEAILARRGPGADGLGTHVVASFAAGLVAAAASNPVDVVKTRVMNMKVAPGAPPPYSGAIDCALKTVRSEGVMALYKGFIPTVSRQGPFTVVLFVTLEQVRKVFNGVEF

SEQ ID NO: 98363 - DNA, 906 bp, Oryza sativa
  CDS (1)..(906)
atgccggagcacgggtcgaagcccgacatctccttcgccggccgcttcaccgcaagcgccatcgctgcatgcttcgctgaggtgtgcacgatccccctggatacggccaaggtgaggcttcagctgcagaagaacgtggccgccgatgccgcccccaagtaccgcggcctcctcggcaccgccgccaccatcgcgcgcgaggaaggcgccgccgctctctggaagggcatcgtcccgggactccaccgccagtgcatctacggcggcctccgcatcggcctctacgagcccgtgaaatccttctacgttggcaaagaccatgtcggggatgtgcctctcaccaagaagatcgctgccggcttcaccactggtgccattgcgatcagtatcgccaaccccactgaccttgtcaaggttaggcttcaggcggagggcaagctggcgcccggcgccccgcgccgatatgctggggccatggatgcctatgccaagattgttaggcaggaagggtttgctgctttgtggactggcattggacccaatgttgcgcgcaatgccatcatcaatgctgccgagttggccagctatgatcaagtcaagcagactattttgaagcttcctgggttcaaagatgatgtggtcactcacctcttatctggtctgggcgcgggcttcttcgctgtctgtgttggttctccagtggatgtggtcaagtcaagaatgatgggtgactcggcctacacaagtactattgattgtttcgtgaagacgctgaagaatgatggacctctggcattttacaaaggcttcctcccaaactttgctagactgggatcatggaatgtgataatgttcttgacactggagcaggtccagaagctgtttgtgaggaaacctggtagttga

SEQ ID NO: 98364 - protein, 301 aa, Oryza sativa
MPEHGSKPDISFAGRFTASAIAACFAEVCTIPLDTAKVRLQLQKNVAADAAPKYRGLLGTAATIAREEGAAALWKGIVPGLHRQCIYGGLRIGLYEPVKSFYVGKDHVGDVPLTKKIAAGFTTGAIAISIANPTDLVKVRLQAEGKLAPGAPRRYAGAMDAYAKIVRQEGFAALWTGIGPNVARNAIINAAELASYDQVKQTILKLPGFKDDVVTHLLSGLGAGFFAVCVGSPVDVVKSRMMGDSAYTSTIDCFVKTLKNDGPLAFYKGFLPNFARLGSWNVIMFLTLEQVQKLFVRKPGS

SEQ ID NO: 98365 - DNA, 894 bp, Glycine max
  CDS (1)..(894)
atgggagatgtggctaaggaccttgcagctgggactgttggaggggcagcacagttgatatgtggacacccctttgacaccatcaaggtcaagctccaaagccagcctgcaccactccctggtcagcttcccaagtattcaggtgcatttgatgctgtcaagcagacaatagcagctgaaggaccaaggggtttatacaaaggcatgggtgctccgcttgctacggtagcagccttcaatgctgtcctgtttacagtgaggggacaaatggaaacattagtgaggtccaatcctggtgcccccctcacagtggatcagcaggttgtttgtggggctggagccggagtagctgtttccattcttgcttgcccaactgaattgatcaaatgcaggttgcaagcacaaagtgcgcttgctggctctgaaacagctaccgtggctgttaagtatggaggacccatggatgtggccaggcatgttctcaagtcagaagggggcatgagaggtcttttcaagggcttggttcccactatggggcgtgagatacctggaaatgctatcatgtttggtgtatacgaagcattaaagcaaaagtttgcaggaggcactgatacttctgggctaagtagaggttctctgattgttgccggaggcttggctggagcttccttctggttcttagtttacccaactgatgttattaagagtgtgattcaagtagatgatcacagaaacccaaaattttctggttcatttgatgcattcagaaagattcgagctacagaagggttcaaaggcttgtataagggttttggtcctgcaatggctcgaagtgttcctgcaaatgcagcatgtttcttggcatatgagatgacaagatcagctctgggatga

SEQ ID NO: 98366 - protein, 297 aa, Glycine max
MGDVAKDLAAGTVGGAAQLICGHPFDTIKVKLQSQPAPLPGQLPKYSGAFDAVKQTIAAEGPRGLYKGMGAPLATVAAFNAVLFTVRGQMETLVRSNPGAPLTVDQQVVCGAGAGVAVSILACPTELIKCRLQAQSALAGSETATVAVKYGGPMDVARHVLKSEGGMRGLFKGLVPTMGREIPGNAIMFGVYEALKQKFAGGTDTSGLSRGSLIVAGGLAGASFWFLVYPTDVIKSVIQVDDHRNPKFSGSFDAFRKIRATEGFKGLYKGFGPAMARSVPANAACFLAYEMTRSALG

SEQ ID NO: 98367 - DNA, 897 bp, Zea mays
  CDS (1)..(897)
atgcagccgcggtacggagaagcacgacaaccgctgccggggcggtacgcgctgtaccacttcggcaccagcggcgccgccgtcgccgccgccaccgccgtgacccatccgttcgatgttatcaaagtcaggcttcaaatgcagcttgctgggcaaagaggaaacttagttggaatgggaacaatatttacacaaatggttgaaagggaagggactcggtcactctacctgggacttgcaccagcgttggcgagagctgttgtctatggtggccttcggtttggactgtatgagccctgcaagcatgtctgcagttatgcatttggttcaacaaactttgcttttaaatttgcatctggagtcattgctgggggccttgcaactgctttaacaaatcccatggaagttttgaaggtgaggctgcagatgagtaaaagcagtaccagtacaataagagagatgagaaaagttatagcgcacgaagggtttaaagcactttggaaaggagtcggcccagcaatgacaagagcaggttgccttactgcatcacaaatggcgacttacgatgaggccaaacaggccttaatgaagtggacaccacttgaagaaggttttcagttacatctcatctcgagtttcatagctggaacagctggtactcttgtgacctcacctgtagacatgatcaaaacacggttaatgctgcaacaggagtccaaaggcgccagagtatacaggaacggattccattgtgcttcccaggttgtggtgacagagggtgtgaaatcactttataaaggtggatttgccacattcgcgagagtaggccctcagacaacgattacctttatcgtgtgcgagaaactgcgcgaacttgcaggaatgactgccatctag

SEQ ID NO: 98368 - protein, 298 aa, Zea mays
MQPRYGEARQPLPGRYALYHFGTSGAAVAAATAVTHPFDVIKVRLQMQLAGQRGNLVGMGTIFTQMVEREGTRSLYLGLAPALARAVVYGGLRFGLYEPCKHVCSYAFGSTNFAFKFASGVIAGGLATALTNPMEVLKVRLQMSKSSTSTIREMRKVIAHEGFKALWKGVGPAMTRAGCLTASQMATYDEAKQALMKWTPLEEGFQLHLISSFIAGTAGTLVTSPVDMIKTRLMLQQESKGARVYRNGFHCASQVVVTEGVKSLYKGGFATFARVGPQTTITFIVCEKLRELAGMTAI

SEQ ID NO: 98369 - DNA, 1068 bp, Glycine max
  CDS (1)..(1068)
atggcttcggagaatgtgaagaccggggattccgccgtcaccaccatcgtcaatctcgccgaggaggccaagctcgccagagaaggcgtcgtcaaagctcccagctacgccctcgccagcatctgcaagtcgctcgtcgccggtggcgtcgccggaggagtgtcacgtactgcagttgctcctctggaacgattgaaaattttgctgcaggtccagaatcctcataacattaaatacaatggaacagtacaaggcctaaaatatatatggaggactgaaggatttcgtggacttttcaaagggaatggtactaattgtgctagaattgtccctaattctgctgttaagttcttcagttatgagcaagcttctaaaggtatactgcatctgtatcagcagcaaactggaaatgaggatgctcagctgactcctcttttacgtcttggagctggagcatgtgctggaataattgctatgtctgcaacttatccaatggatatggttcgaggcaggattactgtgcagactgaggcatccccatatcagtacagaggaatgttccatgctttgtctactgtgcttagggaagaaggtcctcgtgctttatataagggctggcttccttcagttattggagttattccttatgtaggtctcaactttgctgtctatgagtctctaaaagattatttaattaaatccaacccatttggtctagttgaaaattctgagttgagtgtgacaacacgcctggcttgtggtgctgctgctggaactgttggacaaactgttgcttaccctcttgacgttatccgtcgaagaatgcagatggtcggttggaaccatgctgcttctgttctaactggcgatggaagaggcaaagttccactggaatacactggaatggtcgatgcattcagaaaaactgttcagcatgagggatttggtgcattatacaagggtctggtgcccaactctgtaaaggtggtcccatcaatagcaattgcattcgtaacatatgaggtggtgaaggacattttaggagttgagatcagaatatcggactaa

SEQ ID NO: 98370 - protein, 355 aa, Glycine max
MASENVKTGDSAVTTIVNLAEEAKLAREGVVKAPSYALASICKSLVAGGVAGGVSRTAVAPLERLKILLQVQNPHNIKYNGTVQGLKYIWRTEGFRGLFKGNGTNCARIVPNSAVKFFSYEQASKGILHLYQQQTGNEDAQLTPLLRLGAGACAGIIAMSATYPMDMVRGRITVQTEASPYQYRGMFHALSTVLREEGPRALYKGWLPSVIGVIPYVGLNFAVYESLKDYLIKSNPFGLVENSELSVTTRLACGAAAGTVGQTVAYPLDVIRRRMQMVGWNHAASVLTGDGRGKVPLEYTGMVDAFRKTVQHEGFGALYKGLVPNSVKVVPSIAIAFVTYEVVKDILGVEIRISD

SEQ ID NO: 98371 - DNA, 972 bp, Triticum aestivum
  CDS (1)..(972)
atggcatcggaggacgtggtggggaagagcaggggcgacacggccgtcaacaccatcgtcaacctggccgaggaggccaagctcgcgcgcgagggcgtcaagggccccggccaccaggtcctcaccgtctgcaagtccctcttcgccggaggcgtcgccgggggcctatcgaggactgctgttgctccgcttgagcgattgaagatcctgcttcaggttcaaaatcctcacagtatcaagtacaatggtaccgttcaagggcttaagtatatatggagaaccgaaggtcttcgtggactgtttaagggcaatggaactaactgtgccaggattgtcccaaattctgctgtgaaattcttcagctatgagcaagcatcaaggggtattttgtatctttaccggcaacagactggggatgagaatgctcagcttagtccaatcttgcgccttggagctggagccacagctggtatcatagccatgtctgctacttatcccatggatatggttaggggtaggattactgttcagacagagaagtctccctaccagtaccgtggtatgtttcatgcattgggcactgtgtaccgtgaagaaggcttccgtgctttatatagaggctggcttccatcagtgattggagttgtcccttatgttggccttaactttgctgtgtacgagtctctgaaggactggctcctccggtcaaatgcattcgatcttgcaaaggacaatgagctgcacgtagtaacaaggcttggatgcggagctgtggctggaaccataggccagactgtggcataccctcttgatgttgtgaggagaagagagagagaccgacacgcaggatttggtgctctgtacaagggtcttgtgcccaactcggtcaaggtggtgccttccatcgccatcgcgtttgtgacgtacgaggccgtgaaggatgttctaggagtagagatgaggatagactga

SEQ ID NO: 98372 - protein, 323 aa, Triticum aestivum
MASEDVVGKSRGDTAVNTIVNLAEEAKLAREGVKGPGHQVLTVCKSLFAGGVAGGLSRTAVAPLERLKILLQVQNPHSIKYNGTVQGLKYIWRTEGLRGLFKGNGTNCARIVPNSAVKFFSYEQASRGILYLYRQQTGDENAQLSPILRLGAGATAGIIAMSATYPMDMVRGRITVQTEKSPYQYRGMFHALGTVYREEGFRALYRGWLPSVIGVVPYVGLNFAVYESLKDWLLRSNAFDLAKDNELHVVTRLGCGAVAGTIGQTVAYPLDVVRRRERDRHAGFGALYKGLVPNSVKVVPSIAIAFVTYEAVKDVLGVEMRID

SEQ ID NO: 98373 - DNA, 936 bp, Zea mays
  CDS (1)..(936)
atggcggacgcgaagcagcagcagcagcagcagcagcagccacagcaggcggcagcggcagccaccggcgtgtggaagacggtcaagcccttcgttaacggcgaggcctctgggatgctcgcgacctgcgtcatccagcctatcgacatggtcaaggtgaggatccagttgggtgagggctctgctggtcaggtcacaaggaacatgcttgcaaatgagggtgtccgttctttctacaagggtttgtccgccggattgctgaggcaagcgacgtacacgactgctcgtcttggatcctttagggttctaactaacaaagcagttgaaaagaatgaagggaagccattgcctctatttcagaaagcttttattggtctgactgctggtgcaattggtgcttgtgttggtagtcctgctgatctggcactcattagaatgcaagccgattcgaccctgccagttgcacaacgacgcaactataagaatgctttccatgcactctaccgtatcagtggtgatgagggagtccttgcgctttggaagggtgcaggtccaactgtggtgagagctatggcactcaatatgggtatgcttgcttcctatgaccagagtgtcgagctatttagggacaaatttggcgcaggagaaatttctactgttgttggagccagcgctgtttctggattctttgcctcagcatgcagtttgccctttgactatgtgaagacacagattcagaagatgcaacctgatgcgaatggcaagtacccatacacagggtctttggactgtgctgtgaagaccttcaagagcggtggcccattcaagttctacactggtttcccggtgtactgcgtcaggattgcaccccatgtcatgatgacctggatattcttgaatcagatccagaagtttgagaagaagatcggcatatag

SEQ ID NO: 98374 - protein, 311 aa, Zea mays
MADAKQQQQQQQQPQQAAAAATGVWKTVKPFVNGEASGMLATCVIQPIDMVKVRIQLGEGSAGQVTRNMLANEGVRSFYKGLSAGLLRQATYTTARLGSFRVLTNKAVEKNEGKPLPLFQKAFIGLTAGAIGACVGSPADLALIRMQADSTLPVAQRRNYKNAFHALYRISGDEGVLALWKGAGPTVVRAMALNMGMLASYDQSVELFRDKFGAGEISTVVGASAVSGFFASACSLPFDYVKTQIQKMQPDANGKYPYTGSLDCAVKTFKSGGPFKFYTGFPVYCVRIAPHVMMTWIFLNQIQKFEKKIGI

SEQ ID NO: 98375 - DNA, 900 bp, Brassica napus
  CDS (1)..(900)
atggcggaagagaagaaagtagctccgattggtgtctggaccgccgtgaagcccttcgtcaatggcggagcctccggtatgctcgctacttgcgttatccagccgatcgacatgatcaaggtgaggattcaactaggtcagggatctgcagtcagtgtgaccaagaacatgttgaagaatgatggtattggtgctttctacaagggattgtctgctggtttgctgaggcaagcaacttacaccacagcccgtcttggatccttcaagatgctgactgcaaaagcaattgaggctaacgatgggaagccgctacctctgtaccagaaggctctatgtggtctgacagctggtgctattggtgcttgcgttggtagtccagccgatttggcgcttatcagaatgcaagctgataacaccttgccgttagctcagcgcaggaactacaccaatgccttccatgcgctttaccgtatcagcgctgatgaaggagttttggcgctctggaaaggttgtggtcccactgtggtcagagctatggctttgaacatggggatgcttgcttcttatgatcagagtgctgagtacatgagagataatctcggtcttggggagacttctacggtcgtaggagcaagtgctgtttctggattctgcgctgcggcttgcagtcttccatttgactttgtcaaaactcagatccagaaaatgcaaccggacgctcaggggaagtatccatacacgggttcgctcgactgtgccatgcaaaccttgaagtcaggaggacctctgaaattctacacaggtttccctgtttactgcgtcaggatcgcccctcacgtcatgatgacatggatcttcctgaaccagattacaaagtttcaaaagaccattggtctgtga

SEQ ID NO: 98376 - protein, 299 aa, Brassica napus
MAEEKKVAPIGVWTAVKPFVNGGASGMLATCVIQPIDMIKVRIQLGQGSAVSVTKNMLKNDGIGAFYKGLSAGLLRQATYTTARLGSFKMLTAKAIEANDGKPLPLYQKALCGLTAGAIGACVGSPADLALIRMQADNTLPLAQRRNYTNAFHALYRISADEGVLALWKGCGPTVVRAMALNMGMLASYDQSAEYMRDNLGLGETSTVVGASAVSGFCAAACSLPFDFVKTQIQKMQPDAQGKYPYTGSLDCAMQTLKSGGPLKFYTGFPVYCVRIAPHVMMTWIFLNQITKFQKTIGL

SEQ ID NO: 98377 - DNA, 903 bp, Brassica napus
  CDS (1)..(903)
atggcggatgcggcgaaagatttagcttcagggactgttggaggagcggctcagctaatcgtaggccacccatttgacacaatcaaggtcaagcttcagagccagcctgctccatcaccgggacaaccaccgaggtacacgggagcaatcgatgcggttaagcagaccgttgcttctgaaggacctaaaggtttgtacaaaggtatgggagctcctcttgcaaccgttgctgccttcaacgcggttctgttcaccgtgagaggtcagatggaaggtctgcttaggtctgaacctggagtgccgttgaccattagtcaacagtttgtgtgcggtgcaggcgctggtttcgctgtctcgttccttgcttgtcctaccgagttgatcaaatgcaggttgcaagcacaaggtgctggagggggagcctctaccacaggctcagtggttgcagctgtgaaatacggtggacctatggacgtggcccgtcacgtgctacgatcagaaggtggagcaagaggtctattcaaaggtttatttccgacatttgctcgtgaagtccccggaaacgcgacaatgtttgcagcctacgaagctttcaagaggttcttagctggtggttctgacacttcaagcttaggacaaggatcattgatcatggctggtggagttgctggtgcatccttctggggaattgtgtacccgaccgatgtggtgaagagtgttcttcaagtagatgattataagaaccctaagtacaagggttcaatggatgcttttaggaaaattctgaaagctgaaggagtgaaaggtttgtataaagggtttggtccagccatggctaggagtgttcctgctaatgctgcttgcttcttggcatatgagaagacaaggtcaagcttgggataa

SEQ ID NO: 98378 - protein, 300 aa, Brassica napus
MADAAKDLASGTVGGAAQLIVGHPFDTIKVKLQSQPAPSPGQPPRYTGAIDAVKQTVASEGPKGLYKGMGAPLATVAAFNAVLFTVRGQMEGLLRSEPGVPLTISQQFVCGAGAGFAVSFLACPTELIKCRLQAQGAGGGASTTGSVVAAVKYGGPMDVARHVLRSEGGARGLFKGLFPTFAREVPGNATMFAAYEAFKRFLAGGSDTSSLGQGSLIMAGGVAGASFWGIVYPTDVVKSVLQVDDYKNPKYKGSMDAFRKILKAEGVKGLYKGFGPAMARSVPANAACFLAYEKTRSSLG

SEQ ID NO: 98379 - DNA, 930 bp, Brassica napus
  CDS (1)..(930)
atgtccgctaattctcatcctactaccaattccacaaatgtcctctgtaatgccgccgccggtgccgccgccggggtaattgcggcaacgtttgtgtgtcctcttgacgttataaaaacgaggtttcaggttcatggcctccctaagcttgctcatcccaacatcaaaggtagtataattgttgggagtcttaagcagatcttcaagcaagaaggaacgcgtggcttataccgtggactttcccctaccgtcatggcccttctctccaattgggcggtttattttacaatgtatgaccagctcaagagcctttcaatctcaaatgataaggatcacaaactcagcgttggtgctaacgtaatggctgcctctggtgctggagctgctactactattgccactaatcctctttgggttgtcaagactcgtcttcagacacaaggaatgagagagggagtagtgccatacaagagtacactctctgctttaaggagaatagcttacgaggaaggaatccgcggattgtacagtggacttgtgcctgcactagccggtatcagtcacgttgccattcagtttcccacttatgagatggtcaaaacctacttggccaacaaaggtgataagtcaatcgatgatctgaatgctcgtgatgtagcagttgcctcttcaatcgcaaagatatttgcttccacattaacctacccgcacgaggtggtgcgagctaggcttcaagagcaaggacaccacagtgagaaacgttactcgggggtaagagattgcataaagaaagtgtttgagaaagatggtgttaggggtttttacagaggatgtgccactaatctcctgagaacaactcctgctgctgctatcactttcactagcttcgaaatggttcatcgtttccttgtcactcacttaccttcatag

SEQ ID NO: 98380 - protein, 309 aa, Brassica napus
MSANSHPTTNSTNVLCNAAAGAAAGVIAATFVCPLDVIKTRFQVHGLPKLAHPNIKGSIIVGSLKQIFKQEGTRGLYRGLSPTVMALLSNWAVYFTMYDQLKSLSISNDKDHKLSVGANVMAASGAGAATTIATNPLWVVKTRLQTQGMREGVVPYKSTLSALRRIAYEEGIRGLYSGLVPALAGISHVAIQFPTYEMVKTYLANKGDKSIDDLNARDVAVASSIAKIFASTLTYPHEVVRARLQEQGHHSEKRYSGVRDCIKKVFEKDGVRGFYRGCATNLLRTTPAAAITFTSFEMVHRFLVTHLPS

SEQ ID NO: 98381 - DNA, 1062 bp, Brassica napus
  CDS (1)..(1062)
atggcatcagaggatgtgaagagcaccgagtcggcagctgtatcaacgatcgtaaacctggcggaggaagcgaagttggcgagagaaggagtcaaagctccgagccatgctgtcctcagcatctgcaagtctctcttcgccggtggcgtcgctggtggagtgtcacgaactgcagttgcacctctggaaaggatgaagatattgcttcaggtccaaaatccacataacataaagtatagtgggacagtccaaggattgaagtatatttggagaaccgagggggttcgtggactgttcaaaggaaacggcaccaactgtgctcgtattgttcctaactcggctgtcaaatttttcagctatgagcaggcttcaaagggtatactgtacatgtatcgtcagcagacaggaaatgagaatgcacaactcactcctgttttacggcttggagctggtgcaactgctggaataatagccatgtctgcaacatacccaatggatatggttcgtggaaggctaactgtccagactgcaaattctccttatcaatatagaggaattgcacatgctttatcaactgtcctgagagaggaaggtccaagggccctgtaccgtggttggcttccatcagtgattggagttgttccatatgtgggcttgaactttgcggtctatgagtctctaaaggactggctagtcaaagacaatcctttcggactagtggagaacaacgagctgaccatcataacgagactctcgtgtggtgctatagctggaacggttggtcaaacaattgcttatccactcgatgtgattcgtaggagaatgcaaatggtggggtggaaagatgcttcctctgtcgttacaggcgaggggagaagcaagcttgaatacaacggtatggttgatgcatttaggaagacagttcgtcatgaaggctttggagctttgtacaagggtttggtccccaactcagtgaaggttgtaccatcaattgcgattgcatttgtgacatatgagatggtgaaagacgttctaggagtggagtttaagatatcagactaa

SEQ ID NO: 98382 - protein, 353 aa, Brassica napus
MASEDVKSTESAAVSTIVNLAEEAKLAREGVKAPSHAVLSICKSLFAGGVAGGVSRTAVAPLERMKILLQVQNPHNIKYSGTVQGLKYIWRTEGVRGLFKGNGTNCARIVPNSAVKFFSYEQASKGILYMYRQQTGNENAQLTPVLRLGAGATAGIIAMSATYPMDMVRGRLTVQTANSPYQYRGIAHALSTVLREEGPRALYRGWLPSVIGVVPYVGLNFAVYESLKDWLVKDNPFGLVENNELTIITRLSCGAIAGTVGQTIAYPLDVIRRRMQMVGWKDASSVVTGEGRSKLEYNGMVDAFRKTVRHEGFGALYKGLVPNSVKVVPSIAIAFVTYEMVKDVLGVEFKISD

SEQ ID NO: 98383 - DNA, 897 bp, Brassica napus
  CDS (1)..(897)
atggcggatgcggcgaaagatttagcttcagggactgttggaggagcggctcagctaatcgtaggccacccatttgatacaatcaaggtcaagcttcagagccagcctgctccatcaccgggacaaccaccgaggtacacgggagcaatcgatgcggttaagcagaccgttgcttctgaaggacctaaaggtttgtacaaaggtatgggagctcctcttgcaaccgttgctgccttcaacgcggttctgttcaccgtgagaggtcagatggaaggtctgcttaggtctgaacctggagtgccgttgaccattagtcaacagtttgtgtgcggtgcaggcgctggtttcgctgtctcgttccttgcttgtcctaccgagttgatcaaatgcaggttgcaagcacaaggtgctggagcctctaccacaggctcagtggttgcagctgtgaaatacggtggacctatggacgtggcccgtcacgtgctacgatcggaaggtggagcaagaggtctattcaaaggtttatttccgacatttgctcgtgaagtccccggaaacgcgacaatgtttgcagcctacgaagctttcaagaggttcttagctggtggttctgacacttcaagcttaggacaagggtcattgatcatggctggtggagttgctggtgcgtccttctgggggtttgtgtacccgaccgatgtggtgaagagtgttcttcaggttgatgattataagaaccctaagtacaagggttcgatggatgcttttaggaagattctgaaagctgaaggagtgaaaggtttgtataaagggtttggtccagctatggctaggagtgttcctgctaatgctgcttgtttcttggcttatgagatgactaggtcaagcttgggataa

SEQ ID NO: 98384 - protein, 298 aa, Brassica napus
MADAAKDLASGTVGGAAQLIVGHPFDTIKVKLQSQPAPSPGQPPRYTGAIDAVKQTVASEGPKGLYKGMGAPLATVAAFNAVLFTVRGQMEGLLRSEPGVPLTISQQFVCGAGAGFAVSFLACPTELIKCRLQAQGAGASTTGSVVAAVKYGGPMDVARHVLRSEGGARGLFKGLFPTFAREVPGNATMFAAYEAFKRFLAGGSDTSSLGQGSLIMAGGVAGASFWGFVYPTDVVKSVLQVDDYKNPKYKGSMDAFRKILKAEGVKGLYKGFGPAMARSVPANAACFLAYEMTRSSLG

SEQ ID NO: 98385 - DNA, 930 bp, Brassica napus
  CDS (1)..(930)
atgtccgctaattctcatcctactaccaattccacaaatgtcctctgtaatgccgccgccggtgccgccgccggggtaattgcggcaacgtttgtgtgtcctcttgacgttataaaaacgaggtttcaggttcatggcctccctaagcttgctcatcccaacatcaaaggtagtataattgttgggagtcttaagcagatcttcaagcaagaaggcacgcgtggcttataccgtggtctttcccctaccgtcatggctcttctctccaattgggcggtttattttacaatgtatgaccagctcaagagcttttcaatctcaaatgataaggatcacaaattcagcgttggtgctaacgtaatggctgcctctggtgctggagctgctactactattgccactaatcctctttgggttgtcaagactcgtcttcagacacaaggaatgagagcgggagtagtgccatacaagagtacactctctgctttaaggagaatagcttacgaggagggaatccgcgggttgtacagtggacttgtgcctgcactagctggtatcagtcacgttgccattcagtttcccacttatgagctggtcaaaacctacttggccaacaaaggtgataagtcgatcgatgatctgaatgctcgtgatgtagcagttgcctcttcaattgcaaagatatttgcttccacattaacttacccgcacgaggtggtgcgagctaggcttcaggagcaaggacaccatagtgagaaacgttactcgggggtaagagattgcataaagaaagtgtttgagaaagatggtgttaggggtttttacagaggatgtgccactaatctcctgagaacaactcctgctgctgctatcactttcactagcttcgaaatggttcatcgtttccttgtcactcacttaccttcatag

SEQ ID NO: 98386 - protein, 309 aa, Brassica napus
MSANSHPTTNSTNVLCNAAAGAAAGVIAATFVCPLDVIKTRFQVHGLPKLAHPNIKGSIIVGSLKQIFKQEGTRGLYRGLSPTVMALLSNWAVYFTMYDQLKSFSISNDKDHKFSVGANVMAASGAGAATTIATNPLWVVKTRLQTQGMRAGVVPYKSTLSALRRIAYEEGIRGLYSGLVPALAGISHVAIQFPTYELVKTYLANKGDKSIDDLNARDVAVASSIAKIFASTLTYPHEVVRARLQEQGHHSEKRYSGVRDCIKKVFEKDGVRGFYRGCATNLLRTTPAAAITFTSFEMVHRFLVTHLPS

SEQ ID NO: 98387 - DNA, 1062 bp, Brassica napus
  CDS (1)..(1062)
atggcatcagaggatgtgaagagcaccgagtcggcagctgtatcaacgatcgtaaacctggcggaggaagcgaagttggcgagagaaggagtcaaagctccgagccatgctgtcctcagcatctgcaagtctctcttcgccggtggcgtcgctggtggagtgtcacgaactgcagttgcacctctggaaaggatgaagatattgcttcaggtccaaaatccacataacataaagtatagtgggacagtccaaggattgaagtatatttggagaaccgagggggttcgtggactgttcaaaggaaacggcaccaactgtgctcgtattgttcctaactcggctgtcaaatttttcagctatgagcaagcttcaaagggtatactgtacatgtatcgtcagcagccaggaaatgaaaatgcacaactcactcctgttttacggcttggagctggtgcaactgctggaataatagccatgtctgcaacatacccaatggatatggttcgtggaaggctaactgtccagactgcaaattctccttatcaatatagaggaattgcacatgctttatcaactgtcctgagagaggaaggtccaagggccctgtaccgtggttggcttccatcagtgattggagttgttccatatgtgggcttgaactttgcggtctatgagtctctaaaggactggctagtcaaagacaatcctttcggactagtggagaacaacgagctgaccatcataacgagactctcgtgtggtgccatagctggaacggttggtcaaacaattgcttatccactcgatgtgattcgtaggagaatgcaaatggtggggtggaaagatgcttcctctgtcgttacaggcgaggggagaagcaagcttgaatacaacggtatggttgatgcatttaggaagacagttcgtcatgaaggctttggagctttgtacaagggtttggtccccaactcagtgaaggttgtaccatcgattgcgattgcgtttgtgacatatgagatggtgaaagacgttctaggagtggagtttaagatatcagactga

SEQ ID NO: 98388 - protein, 353 aa, Brassica napus
MASEDVKSTESAAVSTIVNLAEEAKLAREGVKAPSHAVLSICKSLFAGGVAGGVSRTAVAPLERMKILLQVQNPHNIKYSGTVQGLKYIWRTEGVRGLFKGNGTNCARIVPNSAVKFFSYEQASKGILYMYRQQPGNENAQLTPVLRLGAGATAGIIAMSATYPMDMVRGRLTVQTANSPYQYRGIAHALSTVLREEGPRALYRGWLPSVIGVVPYVGLNFAVYESLKDWLVKDNPFGLVENNELTIITRLSCGAIAGTVGQTIAYPLDVIRRRMQMVGWKDASSVVTGEGRSKLEYNGMVDAFRKTVRHEGFGALYKGLVPNSVKVVPSIAIAFVTYEMVKDVLGVEFKISD

SEQ ID NO: 98389 - DNA, 900 bp, Brassica napus
  CDS (1)..(900)
atggcggaagagaaaaaagtagctccgattggtgtctggaataccgtgaagcccttcgtcaatggcggtgcctccggtatgctcgccacttgcgttatccagccgatcgacatgatcaaggtgaggattcaactaggtcagggatctgcagtcagtgtgaccaagaacatgttgaagaatgatggtattggtgctttctacaagggattgtctgctggtttgctaaggcaagcaacttacaccacagcccgtcttggatccttcaagatgctgactgcaaaagcaattgaggctaacgatgggaagccgctacctctgtaccagaaggctctatgtggtctgacagctggtgcaatcggtgcttgcgttggtagtccagctgacttggcgcttatcagaatgcaagctgataacaccttgccgttagctcagcgcaggaactataccaatgctttccatgcgctttaccgtattagcgctgatgaaggagttttggcactttggaaaggttgtggtcctactgtggtcagagctatggctttgaacatgggaatgcttgcttcttatgatcagagtgctgagtacatgagagataatctcggtcttggggagacttctacggtcgtaggagcaagtgctgtttctggattttgtgctgcggcttgcagtcttccatttgactttgtcaaaactcagatccagaagatgcaaccggacgctcaggggaagtatccatacacgggttcgctcgactgtgccatgcaaaccttgaagtcaggaggacctcttaaattctacacaggtttccctgtttactgcgtcaggatcgcccctcacgtcatgatgacatggatcttcctgaaccagattacaaagtttcaaaagaccattggtctgtga

SEQ ID NO: 98390 - protein, 299 aa, Brassica napus
MAEEKKVAPIGVWNTVKPFVNGGASGMLATCVIQPIDMIKVRIQLGQGSAVSVTKNMLKNDGIGAFYKGLSAGLLRQATYTTARLGSFKMLTAKAIEANDGKPLPLYQKALCGLTAGAIGACVGSPADLALIRMQADNTLPLAQRRNYTNAFHALYRISADEGVLALWKGCGPTVVRAMALNMGMLASYDQSAEYMRDNLGLGETSTVVGASAVSGFCAAACSLPFDFVKTQIQKMQPDAQGKYPYTGSLDCAMQTLKSGGPLKFYTGFPVYCVRIAPHVMMTWIFLNQITKFQKTIGL

SEQ ID NO: 98391 - DNA, 915 bp, Brassica napus
  CDS (1)..(915)
atggtagctgatagcaaatcaaacctttcattgcccaaaactttcgcctgcagtgccttctctgcctgcgtcgccgaggtatgtacgattccgttggacactgctaaagtgaggcttcagctccaaaagtctgccattgctggagatgttactttgcctaagtatcgtggattgctgggaactgttggtaccatagcaagggaagaagggcttcgttctctttggaaaggtgttgtaccaggcttgcatcgccaatgcctctttggaggtctaaggatcgggatgtatgagccggtcaaaaatttgtacgttggcaaagaccatgtaggcgatgttccgttgagcaagaagatccttgctggtttgacaacaggtgctctgggtatcatggtagcgaatccaactgatcttgtgaaagttagacttcaggctgaagggaaactagctgcaggtgtgccaagacggtatactggatcgttgaatgcgtattcaaccattgtgagacaggaaggagtcagagctctgtggactggtcttggacctaatgtagctagaaacgcaatcatcaatgctgctgaattagcgagttacgatcaagtgaaacagacaatcttgaagattccgggtttcactgataacgttgtcacacacattctatctggactgggagcaggtttctttgctgtctgcattggttcccctgttgacgtcgttaagtcaagaatgatgggagatccttcttacaaaggcactattgactgcttcgtcaaaacactgaaggcagacggacctatggcattttacaagggtttcatccccaactttggacgtctaggctcatggaacgtcatcatgtttttgaccctcgaacaggcaaagaagtatgtccgggaactagaatcgtccaagaaataa

SEQ ID NO: 98392 - protein, 304 aa, Brassica napus
MVADSKSNLSLPKTFACSAFSACVAEVCTIPLDTAKVRLQLQKSAIAGDVTLPKYRGLLGTVGTIAREEGLRSLWKGVVPGLHRQCLFGGLRIGMYEPVKNLYVGKDHVGDVPLSKKILAGLTTGALGIMVANPTDLVKVRLQAEGKLAAGVPRRYTGSLNAYSTIVRQEGVRALWTGLGPNVARNAIINAAELASYDQVKQTILKIPGFTDNVVTHILSGLGAGFFAVCIGSPVDVVKSRMMGDPSYKGTIDCFVKTLKADGPMAFYKGFIPNFGRLGSWNVIMFLTLEQAKKYVRELESSKK

SEQ ID NO: 98393 - DNA, 1068 bp, Glycine max
  CDS (1)..(1068)
atggcttcggagaatgtgaagaccggggattccgccgtcaccaccatcgtcaatctcgccgaggaggccaagctcgccagagaaggcgtcgtcaaagctcccagctacgccctcgccagcatctgcaagtcgctcgtcgccggtggcgtcgccggaggagtgtcacgtactgcagttgctcctctggaacgattgaaaattttgctgcaggtccagaatcctcataacattaaatacaacggaacagtacaaggcctaaaatatatatggagaactgaaggattccgtggacttttcaaagggaatggtactaattgtgctagaattgtccctaattctgctgtgaagttcttcagttatgagcaagcttctaaaggtatactgcatctgtataagcagcaaactggaaatgaggatgctcagctgactcctcttttacgccttggagctggagcttgtgctggaataattgctatgtctgcaacttatccaatggatatggttcgaggcaggattactgtgcagactgaggcatccccatatcagtacagaggaatgttccatgctttgtctactgtgcttagggaagaaggtcctcgtgctttatataagggctggcttccttcagttattggagttattccttatgtaggtctcaactttgctgtctatgagtctctaaaagattatttaattaaatccaacccatttggtctagttgaaaattctgagttgagtgtgacaacacgcctggcttgtggtgctgctgctggaactgttggacaaactgttgcttaccctcttgacgttatccgtcgaagaatgcagatggtcggttggaaccatgctgcttctgttctaactggcgatggaagaggcaaagttccactggaatacactggaatggtcgatgcattcagaaaaactgttcagcatgagggatttggtgcattatacaagggtctggtgcccaactctgtaaaggtggtcccatcaatagcaattgcattcgtaacatatgaggtggtgaaggacattttaggagttgagatcagaatatcggactaa

SEQ ID NO: 98394 - protein, 355 aa, Glycine max
MASENVKTGDSAVTTIVNLAEEAKLAREGVVKAPSYALASICKSLVAGGVAGGVSRTAVAPLERLKILLQVQNPHNIKYNGTVQGLKYIWRTEGFRGLFKGNGTNCARIVPNSAVKFFSYEQASKGILHLYKQQTGNEDAQLTPLLRLGAGACAGIIAMSATYPMDMVRGRITVQTEASPYQYRGMFHALSTVLREEGPRALYKGWLPSVIGVIPYVGLNFAVYESLKDYLIKSNPFGLVENSELSVTTRLACGAAAGTVGQTVAYPLDVIRRRMQMVGWNHAASVLTGDGRGKVPLEYTGMVDAFRKTVQHEGFGALYKGLVPNSVKVVPSIAIAFVTYEVVKDILGVEIRISD

SEQ ID NO: 98395 - DNA, 1068 bp, Glycine max
  CDS (1)..(1068)
atggcttcggagaatgtgaagaccggggattcggccgtgacgacgatcgtcaatctcgccgaggaggccaagctcgccagggaaggcgtcgtcaaggctcccagctacgccctcgccagcatctgcaagtcgctcgtcgccggtggcgtcgccggaggagtgtcacgtactgcagttgctcctctggaacgattgaaaattttgctgcaggtccagaatcctcataacattaaatacaacggaacagtacaaggcctaaaatatatatggagaactgaaggattccgtggacttttcaaagggaatggtactaattgtgctagaattgtccctaattctgctgtgaagttcttcagttatgagcaagcttctaaaggtatactgcatctgtataagcagcaaactggaaatgaggatgctcagctgactcctcttttacgccttggagctggagcttgtgctggaataattgctatgtctgcaacttatccaatggatatggttcgaggcaggattactgtgcagactgaggcatccccatatcagtacagaggaatgtttcatgctttgtctactgtgctcagggaagaaggtgctcgtgctttatataagggttggcttccttcagttattggagttattccttatgtaggtctcaactttgctgtctatgagtctctgaaagattatttaattaaatccaacccatttgatctagttgaaaattctgagttgagtgtgacaacacgcctggcttgtggtgctgctgctggaactgttggacaaactgttgcttaccctcttgatgttattcgtcgaagaatgcagatggttggttggaaccacgctgcttctgttctaactggtgatggaagaggcaaagtcccacttgaatacactggaatgattgatgcattcagaaaaactgttcagcacgagggatttggtgcattatacaagggtctggtgcccaactctgtaaaggtggtcccatcgatagcaattgcattcgtaacatatgaggttgtgaaagacgttttaggagttgagatcagaatatccgactaa

SEQ ID NO: 98396 - protein, 355 aa, Glycine max
MASENVKTGDSAVTTIVNLAEEAKLAREGVVKAPSYALASICKSLVAGGVAGGVSRTAVAPLERLKILLQVQNPHNIKYNGTVQGLKYIWRTEGFRGLFKGNGTNCARIVPNSAVKFFSYEQASKGILHLYKQQTGNEDAQLTPLLRLGAGACAGIIAMSATYPMDMVRGRITVQTEASPYQYRGMFHALSTVLREEGARALYKGWLPSVIGVIPYVGLNFAVYESLKDYLIKSNPFDLVENSELSVTTRLACGAAAGTVGQTVAYPLDVIRRRMQMVGWNHAASVLTGDGRGKVPLEYTGMIDAFRKTVQHEGFGALYKGLVPNSVKVVPSIAIAFVTYEVVKDVLGVEIRISD

SEQ ID NO: 98397 - DNA, 954 bp, Glycine max
  CDS (1)..(954)
atgactgccgacacccacgccgctcctaatatcaatcccaagggcctcctctgcaatgccgccgccggtgcttccgccggggttattgctgctacatttgtgtgtcctttagatgtcatcaaaactaggtttcaggttcacggtgtcccgcagctcgcgcatcgaagtgttaaaggaagcataatagttgctagtttggaacaaatatttcacaaggagggattacgtggcatgtaccgtgggctcgcgcccactgtgctggctttacttccaaattgggcggtttattttagtgcatatgagcagcttaagagccttcttcagtctgatgatagccatcatctttcaattggagctaatatgatagctgcttctggtgctggagctgcgactaccatgtttacaaatcccctttgggttgtcaagactagactccaaacacagggaatgagacctggtgttgtgccatataggggcacactatctgcattgaggagaattgcacacgaggagggcattcgagggctgtacagtggccttgttcctgctctggctggtatcagtcatgttgccatccaatttcctacatatgagacaataaaattttatttggcaaatcaagatgacacagcaatggaaaaacttggtgcacgtgatgttgcaattgcatcatcagtttccaaaatttttgcatccacgttgacatatcctcatgaggttgtacgttccagactgcaagaacaagggcatcattcggagaaacggtactctggtgtgattgattgtattagaaaggtttttcatcaagaaggtgtatcaggcttttaccgaggctgtgccaccaatcttctgaggacaacgccagctgctgtgattacattcaccagctttgaaatgatacaccgatttcttgtttcttattttccttctgatccacggcctcatattttgtga

SEQ ID NO: 98398 - protein, 317 aa, Glycine max
MTADTHAAPNINPKGLLCNAAAGASAGVIAATFVCPLDVIKTRFQVHGVPQLAHRSVKGSIIVASLEQIFHKEGLRGMYRGLAPTVLALLPNWAVYFSAYEQLKSLLQSDDSHHLSIGANMIAASGAGAATTMFTNPLWVVKTRLQTQGMRPGVVPYRGTLSALRRIAHEEGIRGLYSGLVPALAGISHVAIQFPTYETIKFYLANQDDTAMEKLGARDVAIASSVSKIFASTLTYPHEVVRSRLQEQGHHSEKRYSGVIDCIRKVFHQEGVSGFYRGCATNLLRTTPAAVITFTSFEMIHRFLVSYFPSDPRPHIL

SEQ ID NO: 98399 - DNA, 954 bp, Glycine max
  CDS (1)..(954)
atgggcgtcaaaggttttgttgaaggaggcatcgcttccatcatcgcaggatgttccacacacccacttgatctcatcaaggtccgcatgcagctccagggtgaaaacaatttgcccaaaccggttcaaaatctccgacccgcactcgccttccaaaccggttcgaccctacacgtggcagctgcagttccgccgccccgcgtgggccccatctcggttggggttcgcctcgtccagcaagagggcctcgccgccttgttctccggcgtctccgccaccgtcctccgccagacgctctactccaccacccgcatgggcctctacgacgtgctcaagaccaagtggaccgactccgtcaccggcaccatgccactcggaaaaaagatcgaggccgggctcatcgccggcggcatcggcgccgccgtgggaaaccccgccgacgtggcgatggtccgaatgcaggccgacggccgcctccctccggcgcagcggcgcaactacaagtccgttgtggacgccatcacgcgaatggcgaagcaagagggcgtcactagcctgtggagaggctcatcgcttacggtgaaccgcgccatgctcgtgacggcgtcgcagctggcttcctacgaccagttcaaagaaatgattctcgagaacggcgtgatgcgcgacggcctcgggacccacgtcacggcgagcttcgcggcggggttcgtggcggcggtggcgtccaaccccatcgacgtgatcaagaccagggtgatgaacatgagggtggagcccggggaggcgccgccgtacgccggcgcgttggattgtgctctgaagacggtgcgcgcggagggtcccatggcgctttataagggttttattcctacgatctcaaggcagggaccgttcactgttgtgctgttcgtgactctggaacaggttcgcaagttgcttaaggatttctga

SEQ ID NO: 98400 - protein, 317 aa, Glycine max
MGVKGFVEGGIASIIAGCSTHPLDLIKVRMQLQGENNLPKPVQNLRPALAFQTGSTLHVAAAVPPPRVGPISVGVRLVQQEGLAALFSGVSATVLRQTLYSTTRMGLYDVLKTKWTDSVTGTMPLGKKIEAGLIAGGIGAAVGNPADVAMVRMQADGRLPPAQRRNYKSVVDAITRMAKQEGVTSLWRGSSLTVNRAMLVTASQLASYDQFKEMILENGVMRDGLGTHVTASFAAGFVAAVASNPIDVIKTRVMNMRVEPGEAPPYAGALDCALKTVRAEGPMALYKGFIPTISRQGPFTVVLFVTLEQVRKLLKDF

SEQ ID NO: 98401 - DNA, 906 bp, Glycine max
  CDS (1)..(906)
atgggagacgagaagaagggcaagcctgctgcttccggcgtgtggtccaccatcaagcctttcgtcaatggtggagcctgcggcatgctcgccacctgcgtcattcaacccatcgatatgatcaaggtgaggattcaacttgggcaaggatcagctgcgcaggtcacttccaccatgcttaagaatgagggttttgctgccttctataagggtctatctgctggattactcaggcaggctacatacaccactgcccgtcttgggtcatttaaaatcttgacggccaaagctattgaggctaatgatgggaagcccctgccactgtatcagaaagctctatgtgggctgactgctggtgctatcggagcaactgttggtagtccagcagatttggcactcattcggatgcaggctgatgcaacattacctgctgctcagcgccgaaattacactaatgccttccatgcactctatcgaattactgctgatgaaggggttttggcgctttggaaaggtgctgggcctactgttgttagagccatggcattgaacatgggcatgcttgcatcttatgatcaaagtgttgagttcttcagggattctgttggtcttggtgaagctgctactgttctaggtgcaagttccgtttctggatttttcgcagcagcttgcagtttgccatttgactatgtgaagacccagatccagaagatgcaacctgatgctgatggaaaatatccatacactggctctgttgattgtgctgtcaaaaccttcaaagcaggtggaccgttcaaattttacactggattccctgtctattgtgttaggattgctcctcatgtcatgatgacatggattttcctcaaccaggttcagaaattgcagaaatcctacgggttgtag

SEQ ID NO: 98402 - protein, 301 aa, Glycine max
MGDEKKGKPAASGVWSTIKPFVNGGACGMLATCVIQPIDMIKVRIQLGQGSAAQVTSTMLKNEGFAAFYKGLSAGLLRQATYTTARLGSFKILTAKAIEANDGKPLPLYQKALCGLTAGAIGATVGSPADLALIRMQADATLPAAQRRNYTNAFHALYRITADEGVLALWKGAGPTVVRAMALNMGMLASYDQSVEFFRDSVGLGEAATVLGASSVSGFFAAACSLPFDYVKTQIQKMQPDADGKYPYTGSVDCAVKTFKAGGPFKFYTGFPVYCVRIAPHVMMTWIFLNQVQKLQKSYGL

SEQ ID NO: 98403 - DNA, 918 bp, Glycine max
  CDS (1)..(918)
atggtggcagattctaagtccaattccgacctctccttcggaaaaatctttgccagcagtgctttctctgcatgtttcgctgaggtgtgtactattcctttggatactgccaaagtgaggcttcagcttcaaaagcaagctgtagctggtgatgttgtctccttacctaaatataagggtatgctgggaacagttggaaccattgccagggaagaaggtctttcagcactctggaagggcattgtgccagggttacatcgtcaatgtttgtatggaggcttaagaattgggttatatgaacctgttaagactttctatgtggggaaagaccatgttggagatgttccattgtcaaagaaaattcttgctgcatttacaactggtgcttttgcaattgcagtggcaaatccaaccgatcttgtcaaagttagacttcaagctgaaggaaaattacctcctggtgttcccaggcgctactctggatctttaaatgcttattcaacaattgtgagacaggaaggagttggggctctttggactgggcttggccccaatatagcaagaaatggtatcatcaatgctgccgaattagccagctatgatcaagtgaaacagactattttgaaaattccaggattcactgacaatgttgtaactcatcttcttgctggtcttggggcagggtttttcgccgtctgtattggctccccagttgatgtggttaagtcgagaatgatgggagattctagttacaagaacacccttgattgttttatcaaaacattgaagaatgatggacccttagccttttataaagggttcctcccaaattttggacggctgggatcttggaatgtgatcatgtttctaaccttagaacagactaaaaagttcgtcaaaagtttagagtcgtcctga

SEQ ID NO: 98404 - protein, 305 aa, Glycine max
MVADSKSNSDLSFGKIFASSAFSACFAEVCTIPLDTAKVRLQLQKQAVAGDVVSLPKYKGMLGTVGTIAREEGLSALWKGIVPGLHRQCLYGGLRIGLYEPVKTFYVGKDHVGDVPLSKKILAAFTTGAFAIAVANPTDLVKVRLQAEGKLPPGVPRRYSGSLNAYSTIVRQEGVGALWTGLGPNIARNGIINAAELASYDQVKQTILKIPGFTDNVVTHLLAGLGAGFFAVCIGSPVDVVKSRMMGDSSYKNTLDCFIKTLKNDGPLAFYKGFLPNFGRLGSWNVIMFLTLEQTKKFVKSLESS

SEQ ID NO: 98405 - DNA, 918 bp, Glycine max
  CDS (1)..(918)
atgaaatcaggctatcaacacggtggagttgatattactcacactaaggcctttctaacatcactgtcagctatggtggctgagaccacaactttccccatagatttgatcaagaccaggctccaactccatggcgagtcactttcctcgagtcaccccactagtgcatttcgagtaggcttgggcattattcgtgaacaaggtgcccttggcctttacagtggcctgtcaccagcaattattagacacatgttctactcgcctattcgaattgttgggtatgagaacctgagaaatgttgtttctgttgataatgcttcgttctctatcgttggcaaggctgtagttggtggaatctctggtgtcttggctcaggttatagccagcccagctgatcttgtcaaggtgaggatgcaagctgatggccaaagggtgagccaaggtcttcaaccccggtattcggggccatttgatgctctaaacaaaattgttcgtgctgaaggatttcaaggattgtggaagggtgtttttcctaatatccaaagagccttcttagtgaacatgggagaattagcctgttatgatcatgctaaacaatttgttattagaagtaggatagctgatgacaatgtttttgcccacacttttgcttccatcatgtcaggtttagcggcaacgtctttgagctgcccggctgatgttgtgaagactagaatgatgaatcaggcagctaaaaaggaagggaaagtcttatataatagctcttatgattgcttggtgaagacaattaaagttgaaggaataagagcattgtggaaaggattcttccccacatgggcaaggcttggcccatggcaatttgtgttctgggtttcctatgagaagttcaggaaatttgcagggctctcttctttctaa

SEQ ID NO: 98406 - protein, 305 aa, Glycine max
MKSGYQHGGVDITHTKAFLTSLSAMVAETTTFPIDLIKTRLQLHGESLSSSHPTSAFRVGLGIIREQGALGLYSGLSPAIIRHMFYSPIRIVGYENLRNVVSVDNASFSIVGKAVVGGISGVLAQVIASPADLVKVRMQADGQRVSQGLQPRYSGPFDALNKIVRAEGFQGLWKGVFPNIQRAFLVNMGELACYDHAKQFVIRSRIADDNVFAHTFASIMSGLAATSLSCPADVVKTRMMNQAAKKEGKVLYNSSYDCLVKTIKVEGIRALWKGFFPTWARLGPWQFVFWVSYEKFRKFAGLSSF

SEQ ID NO: 98407 - DNA, 954 bp, Glycine max
  CDS (1)..(954)
atgggcgtcaaaggttttgtcgaaggaggcatcgcttccatcattgcaggatgttccacacacccacttgatctcatcaaggtccgcatgcagcttcagggcgaaaacaatttgcccaaaccggttcaaaatctccgacccgcactcgccttccaaaccggttcgaccgtccacgtggcagcggctattccgcagacccgcgtgggtcccatcgcggttggggttcgcctcgtccagcaagaaggccttgcggccttgttctccggcgtctccgccactgtcctccgccagacgctctactccaccacccgtatgggcctctacgacgtcctcaagaccaagtggaccgactccgtcaccggcaccatgccgctcagccgcaagatcgaggccggtctcatcgccggtggcatcggcgccgccgtggggaaccccgccgacgtggccatggtccgaatgcaggcagacgggcgcctccctccggcacagcggcgcaactacaagtccgtcgtggacgccatcacgcgaatggcgaagcaagaaggcgtcactagcctttggagaggctcatcgcttacggtgaaccgcgccatgctcgtgacggcgtcgcagctcgcgtcgtacgaccagttcaaagaaacgatcttggagaacggcatgatgcgcgacgggctcgggacccatgtcacggcgagcttcgcggcggggttcgtggcggcggtggcgtcgaaccccgtcgacgtgatcaagacgagggtgatgaacatgagggtggagcccggggcgacgccgccctacgccggcgcgttagattgtgctctgaagactgtgcgcgcggagggtcccatggcgctttataaggggtttattcctacgatctcgaggcagggaccgttcactgtggtgctgttcgtgacactggaacaggttcgcaagttgcttaaggatttctga

SEQ ID NO: 98408 - protein, 317 aa, Glycine max
MGVKGFVEGGIASIIAGCSTHPLDLIKVRMQLQGENNLPKPVQNLRPALAFQTGSTVHVAAAIPQTRVGPIAVGVRLVQQEGLAALFSGVSATVLRQTLYSTTRMGLYDVLKTKWTDSVTGTMPLSRKIEAGLIAGGIGAAVGNPADVAMVRMQADGRLPPAQRRNYKSVVDAITRMAKQEGVTSLWRGSSLTVNRAMLVTASQLASYDQFKETILENGMMRDGLGTHVTASFAAGFVAAVASNPVDVIKTRVMNMRVEPGATPPYAGALDCALKTVRAEGPMALYKGFIPTISRQGPFTVVLFVTLEQVRKLLKDF

SEQ ID NO: 98409 - DNA, 954 bp, Glycine max
  CDS (1)..(954)
atgactgctgacacccacgccgctcctaatatcaatcccaagggcctcctctgcaatgccgccgccggtgcttccgctggggttattgctgctacatttgtgtgtcctcttgatgtcatcaaaactaggtttcaggttcacggtgtcccgcagctcgcgcatggaagtgttaaaggaagcataatagttgctagtttggaacaaatatttcacaaggagggattacgtggcatgtaccgtgggctcgcgcccactgtgctggctttacttccaaattgggcggtttattttagtgcatatgagcagcttaagagccttcttcagtctgatgatagccatcatctttcaattggagctaatatgatagctgcttctggtgctggagctgcgactaccatgtttacaaatcccctttgggttgtcaagactagactccaaacacagggaataagacctggtgttgtgccatataggggcacactatctgcattgaggagaattgctcatgaggagggcattcgagggctgtacagtggccttgtacctgctctggctggtatcagtcatgttgccatccaatttcctacttatgagacaataaaattttatttggcaaatcaagatgacacagcaatggaaaaacttggtgcacgtgatgttgcaattgcatcatcagtttccaaaatttttgcatccacgttgacatatcctcatgaggttgtacgttccagactgcaagaacaagggcatcattcggagaaacggtactctggtgtgattgattgtattagaaaggtttttcatcaagaaggtgtatcaggcttttaccgaggctgtgccaccaatcttctgaggacaacgccagctgctgtgattacattcaccagctttgaaatgatacaccgatttcttgtttcttattttccttctgatccacggcctcatattttgtga

SEQ ID NO: 98410 - protein, 317 aa, Glycine max
MTADTHAAPNINPKGLLCNAAAGASAGVIAATFVCPLDVIKTRFQVHGVPQLAHGSVKGSIIVASLEQIFHKEGLRGMYRGLAPTVLALLPNWAVYFSAYEQLKSLLQSDDSHHLSIGANMIAASGAGAATTMFTNPLWVVKTRLQTQGIRPGVVPYRGTLSALRRIAHEEGIRGLYSGLVPALAGISHVAIQFPTYETIKFYLANQDDTAMEKLGARDVAIASSVSKIFASTLTYPHEVVRSRLQEQGHHSEKRYSGVIDCIRKVFHQEGVSGFYRGCATNLLRTTPAAVITFTSFEMIHRFLVSYFPSDPRPHIL

SEQ ID NO: 98411 - DNA, 906 bp, Glycine max
  CDS (1)..(906)
atgggagacgagaagaagggcaagcctgctgcttccggcgtgtggtccaccatcaagcctttcgtcaatggtggagcctccggcatgctcgccacctgcgtcattcaacccatcgatatgatcaaggtgaggattcaacttgggcaaggatcagctgcgcaggtcacttccaccatgcttaagaatgagggttttgctgccttctataagggtctatctgctggattactcaggcaggctacatacaccactgcccgtcttgggtcatttaaaatcttgacggccaaagctattgaggctaatgatgggaagcccctgccactgtatcagaaagctctgtgtgggctgactgctggtgctatcggagcaagtgttggtagtccagcagacttggcactcattcggatgcaggctgatgcaacattacctgctgctcagcgccgaaattacacaaatgccttccatgcactctatcgaattactgcagatgaaggggttttggcgctttggaaaggtgctgggcctactgttgtaagagccatggcattgaacatgggcatgcttgcatcttatgatcaaagtgttgagttcttcagggattctgttggtcttggtgaaggtgctactgtgctaggtgcaagttctgtttctggatttttcgcagcagcttgcagtttaccatttgactatgtcaagacccagatccagaagatgcaacctgatgctgatgggaaatatccatacactggctccgttgattgtgctgtcaaaaccttcaaagcaggaggaccattcaaattttacaccggattccctgtctattgtgttaggattgctcctcatgtgatgatgacatggattttcctgaaccagatacagaaattgcagaaatcctacgggttgtag

SEQ ID NO: 98412 - protein, 301 aa, Glycine max
MGDEKKGKPAASGVWSTIKPFVNGGASGMLATCVIQPIDMIKVRIQLGQGSAAQVTSTMLKNEGFAAFYKGLSAGLLRQATYTTARLGSFKILTAKAIEANDGKPLPLYQKALCGLTAGAIGASVGSPADLALIRMQADATLPAAQRRNYTNAFHALYRITADEGVLALWKGAGPTVVRAMALNMGMLASYDQSVEFFRDSVGLGEGATVLGASSVSGFFAAACSLPFDYVKTQIQKMQPDADGKYPYTGSVDCAVKTFKAGGPFKFYTGFPVYCVRIAPHVMMTWIFLNQIQKLQKSYGL

SEQ ID NO: 98413 - DNA, 948 bp, Brassica napus
  CDS (1)..(948)
atgggcgtcaaaagtttcgtggaaggtgggattgcccctgtagtcgccggctgctccactcaccctctcgatctcatcaaggttcgccttcagctccacggcgaagcttccgccgtcactctcctccgcccagctctcgctttccacaattctcccccagcttttctggagacgactcattcggtccctaaagtaggacccatctccctcggaatcaacctcgtcaaaaccgaaggcgccgccgcgcttttctccggcgtctccgccacactcctccgtcagactctctactccaccaccaggatgggtctctacgaggtgttgaaaaacaaatggactgatcccgagtccggtaagctgagtctcactcgtaaaatcgccgcggggctagtcggtggcgggatcggagccgccgtcgggaacccagccgacgtggcgatggtaaggatgcaagccgacgggaggcttcccgtggcagagcgtcgtaactacgcgggcgtaggagacgcgatcaagaggatggcgaagcaagaaggcgtggtgagcctgtggcgcggctcggctctgacgatcaacagggcgatgatagtgacggcggcgcagctcgcgtcgtacgatcagttcaaggaagggatggtggagagcggggggatgaaagatgggctcgggactcacgtggtggcgagcttcgcggcggggatcgtggcggctgttgcgtcgaatccggtggatgtgataaagacgagggtgatgaatatgaaggtggaggcgcgtggtggggaggctcagtacaaaggcgcgtgggattgtgcggtgaagacggttagagcggaaggaccgatggctctttataaagggtttgttcctacggtttgtaggcaaggacctttcactgttgtgctctttgttacgttggagcaagtcaagaagctgcttcgtgatttttga

SEQ ID NO: 98414 - protein, 315 aa, Brassica napus
MGVKSFVEGGIAPVVAGCSTHPLDLIKVRLQLHGEASAVTLLRPALAFHNSPPAFLETTHSVPKVGPISLGINLVKTEGAAALFSGVSATLLRQTLYSTTRMGLYEVLKNKWTDPESGKLSLTRKIAAGLVGGGIGAAVGNPADVAMVRMQADGRLPVAERRNYAGVGDAIKRMAKQEGVVSLWRGSALTINRAMIVTAAQLASYDQFKEGMVESGGMKDGLGTHVVASFAAGIVAAVASNPVDVIKTRVMNMKVEARGGEAQYKGAWDCAVKTVRAEGPMALYKGFVPTVCRQGPFTVVLFVTLEQVKKLLRDF

SEQ ID NO: 98415 - DNA, 936 bp, Zea mays
  CDS (1)..(936)
atggcggacgcgaagcagcagcagcagcagcagcagcagccacagcaggcggcagcggcagccaccggcgtgtggaagacggtcaagcccttcgttaacggcggggcctctgggatgctcgcgacctgcgtcatccagcctatcgacatggtcaaggtgaggatccagttgggtgagggctctgctggtcaggtcacaaggaacatgcttgcaaatgagggtgtccgttctttctacaagggtttgtccgccggattgctgaggcaagcgacgtacacgactgctcgtcttggatcctttagggttctaactaacaaagcagttgaaaagaatgaagggaagccattgcctctaattcagaaagcttttattggtctgactgctggagcaattggtgcttgtgttggtagtcctgctgatctggcactcattagaatgcaagccgattcgaccctgccagttgcacaacgacgcaactataagaatgctttccatgcactctaccgtatcagtgctgatgagggagtccttgcgctttggaagggtgcaggtccaactgtggtgagagctatggcactcaatatgggtatgcttgcttcctatgaccagagtgtcgagctatttagggacaaatttggcgcaggagaaatttctactgttgttggagccagcgctgtttctggattcttcgcctcagcatgcagtttgccctttgactatgtgaagacacagattcagaagatgcaacctgatgcgaatggcaagtacccatacacagggtctttggactgtgctgtgaagaccttcaagagcggtggcccattcaagttctacactggtttcccggtgtactgcgtcaggattgcaccccatgtcatgatgacctggatattcttgaatcagatccagaagtttgagaagaagatcggcatatag

SEQ ID NO: 98416 - protein, 311 aa, Zea mays
MADAKQQQQQQQQPQQAAAAATGVWKTVKPFVNGGASGMLATCVIQPIDMVKVRIQLGEGSAGQVTRNMLANEGVRSFYKGLSAGLLRQATYTTARLGSFRVLTNKAVEKNEGKPLPLIQKAFIGLTAGAIGACVGSPADLALIRMQADSTLPVAQRRNYKNAFHALYRISADEGVLALWKGAGPTVVRAMALNMGMLASYDQSVELFRDKFGAGEISTVVGASAVSGFFASACSLPFDYVKTQIQKMQPDANGKYPYTGSLDCAVKTFKSGGPFKFYTGFPVYCVRIAPHVMMTWIFLNQIQKFEKKIGI

SEQ ID NO: 98417 - DNA, 1068 bp, Zea mays
  CDS (1)..(1068)
atggcatcggaggacgtggtgggcaagagcaggggcgacacggccgtcaccaccatcgtcaacctggcggaggaggccaagctcgcgcgcgagggcgtcaaggcgcccggccaccagatcctcaccatctgcaagtcgctcgtcgccggcggcgtagcaggcggagtgtctcgtactgctgttgctccacttgaacgattgaaaatattgcttcaggttcaaaatccgcacagcatcaagtacaatggtactgttcagggtctcaagtatatctggagaacagagggcctccgtggacttttcaagggcaatggtaccaattgtgcaaggattgttccaaattctgccgtgaagttttttagctacgagcaggcgtcaaagggaattctgtgggcctaccgtcaacagactggtgaagaggatgctcagcttactccgctcttgcgccttggagctggagcatgtgctggtatcatagctatgtctgctacttacccgatggatatggttaggggaaggatcactgttcagacagacaaatctccctaccagtaccgtggtatgtttcatgcactgggtacagtctaccgtgaagaaggctttcgtgctctatacaaagggtggcttccatctgtaatcggagttgttccatatgttggtctcaacttcgctgtatatgagtccctcaaagactggctactccagacaaattcatttggccttgcaaatgacaacgagctgcacgtagttacaaggcttgggtgtggagctgtggcgggaaccattggccagactgttgcatacccgcttgatgtcatcaggagaagaatgcagatggttggttggagccatgctgactctattgttactgggcaaggcaaagaagcactccagtacaatggcatgatcgatgcattcaggaagactgttcgtcatgaaggagttggtgctctgtacaagggtcttgtgccgaactcagtcaaggtggtgccctcaattgccattgcatttgtgacttacgaggttgtgaaggatgtgctaggagtagagatgaggatatcagactga

SEQ ID NO: 98418 - protein, 355 aa, Zea mays
MASEDVVGKSRGDTAVTTIVNLAEEAKLAREGVKAPGHQILTICKSLVAGGVAGGVSRTAVAPLERLKILLQVQNPHSIKYNGTVQGLKYIWRTEGLRGLFKGNGTNCARIVPNSAVKFFSYEQASKGILWAYRQQTGEEDAQLTPLLRLGAGACAGIIAMSATYPMDMVRGRITVQTDKSPYQYRGMFHALGTVYREEGFRALYKGWLPSVIGVVPYVGLNFAVYESLKDWLLQTNSFGLANDNELHVVTRLGCGAVAGTIGQTVAYPLDVIRRRMQMVGWSHADSIVTGQGKEALQYNGMIDAFRKTVRHEGVGALYKGLVPNSVKVVPSIAIAFVTYEVVKDVLGVEMRISD

SEQ ID NO: 98419 - DNA, 903 bp, Glycine max
  CDS (1)..(903)
atgagtcttaagggatttttcgagggtggtgtcgcttccatcgtcgcaggctgcaccactcacccactcgacctcatcaaagttcgaatgcaacttcaagaaacccacactctccgcccagcctttgcctttcacgctcccactccaatgcctcctccgccgccctccggccccatctccgtcggcctccgcatcgttcagtcggagggactcgccgctcttttctccggcgtctccgccaccgtcctccgccagacgctctactccaccacccgcatgggcctctacgacgtcctcaagcgccactggaccgaccccgaccgcggaaccatgcccctcacaagaaaaatcacggccgggctcgtcgccggcgggatcggagccgccgtgggcaaccccgccgacgtggcgatggtgcgaatgcaggccgacgggcgcctcccgccggcggagcgtcgcaactacaacggcgtgttcgacgcgatacggcgcatgagtaaccaagaaggcgttggtagcctgtggcgcggttcagcgcttacggtgaaccgcgcgatgatcgttacggcttctcagttggcctcgtacgaccagtttaaggaaagcattttaggacgcggctggatggaggacgggcttgggacccacgtgttagcgagttttgcggcgggttttgtggcctcgattgcgtcgaaccccattgatgttataaagactagggtgatgaacatgaaggctgaggcttacaatggggccttggattgtgctctcaagactgttagggccgaaggacctcttgccctttataagggtttcatccctacaatttcaaggcagggtcctttcaccgttgtcctctttgtcaccctcgaacaagtcaggaagctcttcaaggacttttga

SEQ ID NO: 98420 - protein, 300 aa, Glycine max
MSLKGFFEGGVASIVAGCTTHPLDLIKVRMQLQETHTLRPAFAFHAPTPMPPPPPSGPISVGLRIVQSEGLAALFSGVSATVLRQTLYSTTRMGLYDVLKRHWTDPDRGTMPLTRKITAGLVAGGIGAAVGNPADVAMVRMQADGRLPPAERRNYNGVFDAIRRMSNQEGVGSLWRGSALTVNRAMIVTASQLASYDQFKESILGRGWMEDGLGTHVLASFAAGFVASIASNPIDVIKTRVMNMKAEAYNGALDCALKTVRAEGPLALYKGFIPTISRQGPFTVVLFVTLEQVRKLFKDF

SEQ ID NO: 98421 - DNA, 906 bp, Glycine max
  CDS (1)..(906)
atgggagacgagaataagaccaagtcccctgcttccggcgtgtggtccaccatcaagcctttcgtcaatggcggagcctccggcatgctcgccacctgcgtcattcaacccatcgatatgatcaaggtgaggattcaacttgggcaaggatcagctgcgcaggtcacttccaccatgcttaagaatgagggtgttgctgccttctataagggtctatctgctggattactcaggcaggctacatacaccactgcccgtcttggatcatttaaaatcttgacggccaaagctattgaggctaatgatgggaagcccctgccactgtatcagaaagctctgtgtgggctgactgctggtgctatcggagcaagtgttggtagtccagcagacttggcactcattcggatgcaggctgatgcaacattacctgctgctcagcgccgaaattacacaaatgccttccatgcactctatcgaattactgcagatgaaggggttttggcgctttggaaaggtgctgggcctactgttgtaagagccatggcattgaacatgggcatgcttgcatcttatgatcaaagtgttgagttcttcagggattctgttggtcttggtgaaggtgctactgtgctaggtgcaagttctgtttctggatttttcgcagcagcttgcagtttaccatttgactatgtcaagacccagatccagaagatgcaacctgatgctgatgggaaatatccatacactggctccgttgattgtgctgtcaaaaccttcaaagcaggaggaccattcaaattttacaccggattccctgtctattgtgttaggattgctcctcatgtgatgatgacatggattttcctgaaccagatacagaaattgcagaaatcctacgggttgtag

SEQ ID NO: 98422 - protein, 301 aa, Glycine max
MGDENKTKSPASGVWSTIKPFVNGGASGMLATCVIQPIDMIKVRIQLGQGSAAQVTSTMLKNEGVAAFYKGLSAGLLRQATYTTARLGSFKILTAKAIEANDGKPLPLYQKALCGLTAGAIGASVGSPADLALIRMQADATLPAAQRRNYTNAFHALYRITADEGVLALWKGAGPTVVRAMALNMGMLASYDQSVEFFRDSVGLGEGATVLGASSVSGFFAAACSLPFDYVKTQIQKMQPDADGKYPYTGSVDCAVKTFKAGGPFKFYTGFPVYCVRIAPHVMMTWIFLNQIQKLQKSYGL

SEQ ID NO: 98423 - DNA, 993 bp, Zea mays
  CDS (1)..(993)
atgctgctgcagtgctgcctcccccgcgccctacccctcgcccagcagcagggagcagccatgccaggggaccacggctccaagggcgacatctccttcgccggacgcttcacggccagcgccatcgcagcatgcttcgcagagatatgtaccatcccgctcgacacggccaaggtcaggctccagctgcagaagaacgtcgtcgccgccgccgcctccggggacgccgcgccagcgcttcccaagtaccgcggcctgctcggaactgccgccaccatcgctagggaggaaggggccgcagcgctctggaagggcatcgtcccgggcctccaccgacagtgcatctacggggggctccgcattggcctctacgagcctgtcaaatccttctacgtcggcaaagaccacgttggggatgtccctttgtccaagaagatagccgccggcttcacaactggtgccatcgctatcagcatcgccaaccctactgaccttgtcaaggtcaggctccaggccgagggcaagcttgcgcctggtgtgccacgccgctacactggcgcaatggatgcttattccaagattgctagacaggaaggggttgccgctctgtggactggccttggaccaaatgtagcgcggaatgctatcatcaatgctgctgagttggccagttatgatcaagtcaagcagtcaattttgaaactccctgggttcaaagatgatgtggtcacccacctttttgctggtcttggtgctggcttctttgctgtttgtgttggttccccagttgatgtggttaagtcgagaatgatgggtgactcagcctacaaaagcactctcgattgttttgtgaagacgctaaagaacgatggccctttggcattttacaaaggcttcctgccaaactttgcaagactgggatcttggaatgtgattatgttcttgacattggagcaggttcaaaagctgtttgtgaggaaagcgacaagctga

SEQ ID NO: 98424 - protein, 330 aa, Zea mays
MLLQCCLPRALPLAQQQGAAMPGDHGSKGDISFAGRFTASAIAACFAEICTIPLDTAKVRLQLQKNVVAAAASGDAAPALPKYRGLLGTAATIAREEGAAALWKGIVPGLHRQCIYGGLRIGLYEPVKSFYVGKDHVGDVPLSKKIAAGFTTGAIAISIANPTDLVKVRLQAEGKLAPGVPRRYTGAMDAYSKIARQEGVAALWTGLGPNVARNAIINAAELASYDQVKQSILKLPGFKDDVVTHLFAGLGAGFFAVCVGSPVDVVKSRMMGDSAYKSTLDCFVKTLKNDGPLAFYKGFLPNFARLGSWNVIMFLTLEQVQKLFVRKATS

SEQ ID NO: 98425 - DNA, 897 bp, Zea mays
  CDS (1)..(897)
atgcagccgcggtacggagaagcacgacaaccgctgccggggcggtacgcgctgtaccacttcggcaccagcggcgccgccgtcgccgccgccaccgccgtgacccatccgttcgatgttatcaaagtcaggcttcaaatgcagcttgctgggcaaagaggaaacttagttggaatgggaacaatatttacacaaatggttgaaagggaagggactcggtcactctacctgggacttgcaccagcgttggcgagagctgttgtctatggtggccttcggtttggactgtatgagccctgcaagcatgtctgcagttatgcatttggttcaacaaactttgcttttaaatttgcatctggagtcattgctgggggccttgcaactgctgtaacaaatcccatggaagctttgaaggtgaggctgcagatgagtaaaagcagtaccagtacaataagagagatgagaaaagttatagcgcacgaagggtttaaagcactttggaaaggagtcggcccagcaatgacaagagcaggttgccttactgcatcacaaatggcgacttacgatgaggccaaacaggccttaatgaagtggacaccacttgaagaaggttttcagttacatctcatctcgagtttcatagctggaacagctggtactcttgtgacctcacctgtagacatgatcaaaacacggttaatgctgcaacaggagtccaaaggcgccagagtatacaggaacggattccattgtgcttcccaggttgtggtgacagagggtgtgaaatcactttataaaggtggatttgccacattcgcgagagtaggccctcagacaacgattacctttatcgtgtgcgagaaactgcgcgaacttgcaggaatgactgccatctag

SEQ ID NO: 98426 - protein, 298 aa, Zea mays
MQPRYGEARQPLPGRYALYHFGTSGAAVAAATAVTHPFDVIKVRLQMQLAGQRGNLVGMGTIFTQMVEREGTRSLYLGLAPALARAVVYGGLRFGLYEPCKHVCSYAFGSTNFAFKFASGVIAGGLATAVTNPMEALKVRLQMSKSSTSTIREMRKVIAHEGFKALWKGVGPAMTRAGCLTASQMATYDEAKQALMKWTPLEEGFQLHLISSFIAGTAGTLVTSPVDMIKTRLMLQQESKGARVYRNGFHCASQVVVTEGVKSLYKGGFATFARVGPQTTITFIVCEKLRELAGMTAI

SEQ ID NO: 98427 - DNA, 1011 bp, Zea mays
  CDS (1)..(1011)
atggcgggtgacgtcgcgacctcgccagccccggcgccgctgtccgtgtcctcatcgtcgcagaaccaccaccaccacggccccacgaccgcccgcggtctcctctgccacgccggcgccggtgcctccgctggtgtggtggcggcgacgttcgtgtgcccactcgatgtcatcaagaccaggttccaggtccacggctggcccaagcttgccacaggtagtgtaattattgggagcttgcagcagattgctcaacaagaaggtttccggggaatgtatcgcggcctatccccaactattctggcactcttgcctaactgggcggtttactttactgtgtatgagcagcttaaaagttttctttcttccaacgatggaagccatcaactttctttaggggcaaatgttgttgctgcatcatgtgctggagctgcaacaactattgtaacaaatccactttgggttgtgaagacaagatttcagacccaaggaattagagccgggccaatcccgtataaaggtacacttgctgccttgagaagaatagcacatgaagaaggcatccgagggctatacagtggcctggtccctgccttggctggtatcagtcacgttgctattcagttccctgtgtacgagaagataaaagcttatctggctgagcgagataatactactgtagaagcattgagttttggtgatgtcgctgttgcttcgtctctggctaaagtagctgcgtcaacattgacatatcctcatgaggttgttcgatcaaggctgcaagaccagcgagcaaactctgatgccagatacaaaggtgtaatagactgcgtcagaaaggtttatcataaagagggtgtggctggcttctaccgtggatgtgccacaaatctgttgcggacgacccctgctgcagtgataactttcactagcttcgagatgatccataggtcccttcttgatctattccctgctgaacctgaacctcacatccaacctctaaagcattga

SEQ ID NO: 98428 - protein, 336 aa, Zea mays
MAGDVATSPAPAPLSVSSSSQNHHHHGPTTARGLLCHAGAGASAGVVAATFVCPLDVIKTRFQVHGWPKLATGSVIIGSLQQIAQQEGFRGMYRGLSPTILALLPNWAVYFTVYEQLKSFLSSNDGSHQLSLGANVVAASCAGAATTIVTNPLWVVKTRFQTQGIRAGPIPYKGTLAALRRIAHEEGIRGLYSGLVPALAGISHVAIQFPVYEKIKAYLAERDNTTVEALSFGDVAVASSLAKVAASTLTYPHEVVRSRLQDQRANSDARYKGVIDCVRKVYHKEGVAGFYRGCATNLLRTTPAAVITFTSFEMIHRSLLDLFPAEPEPHIQPLKH

SEQ ID NO: 98429 - DNA, 1023 bp, Zea mays
  CDS (1)..(1023)
atgccgggggacgtcgcgacctcgccggcgccggcgccgccgtccgtgtcctcgtcgtcgcagaaccaccaccatcacggccccacgaccgcccgcggcctcctctgccacgctgtcgccggcgcctccgctggcgtggtggcggcgaccttcgtgtgcccgctcgatgtcatcaagaccaggttccaggtacacggatggcccaagcttaccacaggcacaattggaggcagtgtaattattgggagtttacagcagattgctcaacaggaaggttttcggggcatgtaccgtggcctctccccaactgttctagcgctcttgcctaactgggcggtctactttactgtgtatgagcagcttaaaagcttactttcttccaatgatggaagtcatcaactttctttaggggcaaatgttgttgctgcatcatgtgctggtgctgcaacaactactgtaacaaatccactttgggttgttaagacaagatttcagactcaaggaacaagagccgggccaatgctgtataaaggtacacttgctgccttgcgaagaatagcacatgaagaaggcatccgaggactatacagtggtttggtccctgccttggctggtatcagtcatgttgctattcagttccctgcatacgagaagataaaagcttatctggctgagcgagataatactactgtagaagcattgagttttggtgatgttgctgttgcgtcgtctctggctaaagtagctgcatcaacattgacatatcctcatgaggttgttcggtcaaggctgcaagaccagcgagcgcactctgatgccagatacaagggtgtagtagactgcatcagaaaggtttatcataaagagggtgtggctggcttctacagtggatgcgccacaaatctattgcggacgacccctgccgcagtgataacattcactagcttcgagatgatccacaggttccttcttgatctattccctgctgaatctgaaccgcacatccaacctctcaagcattga

SEQ ID NO: 98430 - protein, 340 aa, Zea mays
MPGDVATSPAPAPPSVSSSSQNHHHHGPTTARGLLCHAVAGASAGVVAATFVCPLDVIKTRFQVHGWPKLTTGTIGGSVIIGSLQQIAQQEGFRGMYRGLSPTVLALLPNWAVYFTVYEQLKSLLSSNDGSHQLSLGANVVAASCAGAATTTVTNPLWVVKTRFQTQGTRAGPMLYKGTLAALRRIAHEEGIRGLYSGLVPALAGISHVAIQFPAYEKIKAYLAERDNTTVEALSFGDVAVASSLAKVAASTLTYPHEVVRSRLQDQRAHSDARYKGVVDCIRKVYHKEGVAGFYSGCATNLLRTTPAAVITFTSFEMIHRFLLDLFPAESEPHIQPLKH

SEQ ID NO: 98431 - DNA, 981 bp, Zea mays
  CDS (1)..(981)
atgggtgtcaagggattcgtcgagggcggcatcgcctccatcgtggccggctgctccacccacccgctggacctcatcaaggtccgcatgcagctgcagggggaggcggcggccgccgtggcgccgcagccggcgctgcgcccggcgctcgccttccacgccgggggccacgccgtcgcgctcccgcaccaccacgacatcccggcgccgccgcggaagcccgggccgctggccgtcggcgcgcagatcctgcggtccgagggcgccgcgggcctcttctcgggggtgtccgccaccatgctgcggcagacgctctactccaccacgcggatggggctgtacgacatcctcaagaccaggtgggcccgggagaacggcggcgtcctcccgctgcaccgcaagatcttggccggcctcgtcgccggcggcgtcggcgccgccgtgggcaacccggccgacgtggccatggtgcggatgcaggcggacgggcgcctgcccctcgcggagcgccggaactaccgcggcgtcggcgacgccatcggccggatggcgcgcgacgagggcgtgcgcagcctctggcgcgggtcctcgctcaccgtcaaccgcgccatgatcgtcacggcgtcgcagctggccacgtacgaccaggccaaggaggccatcctggcgcgccgcggcccgggcgccgacggcctcgccacgcacgtggccgccagcttcaccgccggcatcgtcgccgccgccgcgtccaaccccgtcgacgtcgtcaagacgaggatgatgaacatgaaggtggcgcccggcgcgcccccgccctacgccggcgccgtcgactgcgccctcaagaccgtcaggtcggagggacccatggcgctgtacaaggggttcatccccaccgtgatgcgccaggggcccttcaccgttgtgctcttcgtcacgctcgagcaggtgcgcaaggtcttcaagggcgtcgagttctga

SEQ ID NO: 98432 - protein, 326 aa, Zea mays
MGVKGFVEGGIASIVAGCSTHPLDLIKVRMQLQGEAAAAVAPQPALRPALAFHAGGHAVALPHHHDIPAPPRKPGPLAVGAQILRSEGAAGLFSGVSATMLRQTLYSTTRMGLYDILKTRWARENGGVLPLHRKILAGLVAGGVGAAVGNPADVAMVRMQADGRLPLAERRNYRGVGDAIGRMARDEGVRSLWRGSSLTVNRAMIVTASQLATYDQAKEAILARRGPGADGLATHVAASFTAGIVAAAASNPVDVVKTRMMNMKVAPGAPPPYAGAVDCALKTVRSEGPMALYKGFIPTVMRQGPFTVVLFVTLEQVRKVFKGVEF

SEQ ID NO: 98433 - DNA, 897 bp, Zea mays
  CDS (1)..(897)
atgcagccgcggtacggagaagcacgacagccgctgccggggcggtacgcgctgtaccacttcggcaccagcggcgccgccgtcgccgccgccaccgccgtgacccatccgttcgatgttatcaaagtcaggcttcaaatgcagcttgctgggcaaagaggaaacttagttggaatgggaacaatatttacacaaatggttgaaagggaaggggctcggtcactctacctgggacttgcaccagcgttggcgagagctgttgtctatggtggccttcggtttggactgtatgagccctgcaagcatgtctgcagttatgcatttggttcaacaaactttgcttttaaatttgcatctggagtcattgctgggggccttgcaactgctttaacaaatcccatggaagttttgaaggtgaggctgcagatgagtaaaagcagtaccagtacaataagagagatgagaaaagttatagcgcacgaagggtttaaagcactttggaaaggagtcggcccagcaatgacaagagcaggttgccttactgcatcacaaatggcgacttacgatgaggccaaacaggccttaatgaagtggacaccacttgaagaaggttttcagttacatctcatctcgagtttcatagctggaacagctggtactcttgtgacctcacctgtagacatgatcaaaacacggttaatgctgcaacaggagtccaaaggcgccagagtatacaggaacggattccattgtgcttcccaggttgtggtgacagagggtgtgaaatcactttataaaggtggatttgccacattcgcgagagtaggccctcagacaacgattacctttatcgtgtgcgagaaactgcgcgaacttgcaggaatgactgccatctag

SEQ ID NO: 98434 - protein, 298 aa, Zea mays
MQPRYGEARQPLPGRYALYHFGTSGAAVAAATAVTHPFDVIKVRLQMQLAGQRGNLVGMGTIFTQMVEREGARSLYLGLAPALARAVVYGGLRFGLYEPCKHVCSYAFGSTNFAFKFASGVIAGGLATALTNPMEVLKVRLQMSKSSTSTIREMRKVIAHEGFKALWKGVGPAMTRAGCLTASQMATYDEAKQALMKWTPLEEGFQLHLISSFIAGTAGTLVTSPVDMIKTRLMLQQESKGARVYRNGFHCASQVVVTEGVKSLYKGGFATFARVGPQTTITFIVCEKLRELAGMTAI

SEQ ID NO: 98435 - DNA, 936 bp, Zea mays
  CDS (1)..(936)
atggcggacgcgaagcagcagcagcagcagcagcagcagccacagcaggcggcagcggcagccaccggcgtgtggaagacggtcaagcccttcgttaacggcggggcctctgggatgctcgcgacctgcgtcatccagcctatcgacatggtcaaggtgaggatccagttgggtgagggctctgctggtcaggtcacaaggaacatgcttgcaaatgagggtgtccgttctttctacaagggtttgtccgccggattgctgaggcaagcgacgtacacgactgctcgtcttggatcctttagggttctaactaacaaagcagttgaaaagaatgaagggaagccattgcctctatttcagaaagcttttattggtctgactgctggtgcaattggtgcttgtgttggtagtcctgctgatctggcactcattagaatgcaagccgattcgaccctgccagttgcacaacgacgcaactataagaatgctttccatgcactctaccgtatcagtggtgatgagggagtccttgcgctttggaagggtgcaagtccaactgtggtgagagctatggcactcaatatgggtatgcttgcttcctatgaccagagtgtcgagctatttagggacaaatttggcgcaggagaaatttctactgttgttggagccagcgctgtttctggattctttgcctcagcatgcagtttgccctttgactatgtgaagacacagattcagaagatgcaacctgatgcgaatggcaagtacccatacacagggtctttggactgtgctgtgaagaccttcaagagcggtggcccattcaagttctacactggtttcccggtgtactgcgtcaggattgcaccccatgtcatgatgacctggatattcttgaatcagatccagaagtttgagaagaagatcggcatatag

SEQ ID NO: 98436 - protein, 311 aa, Zea mays
MADAKQQQQQQQQPQQAAAAATGVWKTVKPFVNGGASGMLATCVIQPIDMVKVRIQLGEGSAGQVTRNMLANEGVRSFYKGLSAGLLRQATYTTARLGSFRVLTNKAVEKNEGKPLPLFQKAFIGLTAGAIGACVGSPADLALIRMQADSTLPVAQRRNYKNAFHALYRISGDEGVLALWKGASPTVVRAMALNMGMLASYDQSVELFRDKFGAGEISTVVGASAVSGFFASACSLPFDYVKTQIQKMQPDANGKYPYTGSLDCAVKTFKSGGPFKFYTGFPVYCVRIAPHVMMTWIFLNQIQKFEKKIGI

SEQ ID NO: 98437 - DNA, 1023 bp, Zea mays
  CDS (1)..(1023)
atgagttcctcacaagaatccaccttcacctcggcctcagcggctgcacaagttaatgcttccgctttggacttgctcccggtctatgccaaggagcttatcgccggcggcgctgctggtgcatttgcaaagactgcggtagcaccactggagagggtcaagatcttattgcagacaagaactgaaggtttccagtccctcgggatcctccagtccttgaggaagctgtggcaatacgagggaattcgaggcttctacaaagggaacggtgcaagcgtgcttcggattgttccatatgcagcattgcattacatgacatatgagcagtataggtgctggatattgaataattctgcttcatcaataggtacagggcctgtcgttgatcttttagctggctctgctgctggtggtactgcagttttgtgtacatacccattagacttggctaggaccaagctggcataccaggtttcaaatgttggccaaactggtaatgctttgggaaattctggtcaacaacaaacgtataatggcataaaagatgttttcaagactgtttacaaggaaggaggtgcacgatctttgtatcgtggagtaggcccaactcttattggtattcttccatatgctggcttgaagttttacatatatgaagatctgaaatctcaagttccagacgattacaaggattctgttatactgaagctctcttgtggagctttagctggtctatttggacaaaccctcacttatccactggatgttgtccggagacaaatgcaggttcagagcaagcagtctcaaaattcgagcgatggcttccgtataagaggaacttttcagggtctcttgctcatcattcggtgccaagggtggagacaactctttgctggcttgagccttaactatgtcaaggttgtcccttcagtagctatcggtttcacaacatacgacatgatgaaggcattgcttggagttcctccccgagagagagtccatgcgtcaggtggtaacaagtga

SEQ ID NO: 98438 - protein, 340 aa, Zea mays
MSSSQESTFTSASAAAQVNASALDLLPVYAKELIAGGAAGAFAKTAVAPLERVKILLQTRTEGFQSLGILQSLRKLWQYEGIRGFYKGNGASVLRIVPYAALHYMTYEQYRCWILNNSASSIGTGPVVDLLAGSAAGGTAVLCTYPLDLARTKLAYQVSNVGQTGNALGNSGQQQTYNGIKDVFKTVYKEGGARSLYRGVGPTLIGILPYAGLKFYIYEDLKSQVPDDYKDSVILKLSCGALAGLFGQTLTYPLDVVRRQMQVQSKQSQNSSDGFRIRGTFQGLLLIIRCQGWRQLFAGLSLNYVKVVPSVAIGFTTYDMMKALLGVPPRERVHASGGNK

SEQ ID NO: 98439 - DNA, 891 bp, Zea mays
  CDS (1)..(891)
atgggggacgttgcgaaggacttgacggctgggaccgtgggaggggctgccaacctcatcgtcgggcacccgttcgacaccatcaaggtcaagctccagagccagcccacccctgctcccggacagctccccaagtacgccggcgccatcgatgctgtgaagcagacggtcgcggctgaaggtccgaggggcctatacaaggggatgggggcacctctggccaccgtagcggccttcaacgctgtcttgttcagtgtcagggggcagatggaggcgtttctcaggtcagagcctggtgtgccgctgacagtgaagcagcaggttgttgcgggcgccggtgctggaatcgcagtctccttcttggcttgtccaacagaactgatcaagtgcaggttgcaagcccagagttccttagccgaggcagccaccgcttctggtgtggctcttcccaaaggtccgatcgacgtggcgaagcatgttgtccgggacgccggcgccaaaggtctcttcaagggcctggtcccgacgatgggacgcgaggtccctggcaacgcactgatgttcggcgtgtacgaagccacgaagcagtacctggccggcggcccggacacgtcgggcctcggcaggggctcccaggtcctggcgggcggcctcgccggcgccgccttctggctgtccgtgtacccgacggacgtggtgaagagcgtgatccaggtggacgattacaagaagcccaagtactccgggtccctcgacgcgctgaggaagatcgtggcggctgatggggtgaagggcctgtacaaggggttcggacccgccatggcacgcagcgttccagccaatgccgcgacattcgtggcctacgagatcacgagatcggcgcttggttga

SEQ ID NO: 98440 - protein, 296 aa, Zea mays
MGDVAKDLTAGTVGGAANLIVGHPFDTIKVKLQSQPTPAPGQLPKYAGAIDAVKQTVAAEGPRGLYKGMGAPLATVAAFNAVLFSVRGQMEAFLRSEPGVPLTVKQQVVAGAGAGIAVSFLACPTELIKCRLQAQSSLAEAATASGVALPKGPIDVAKHVVRDAGAKGLFKGLVPTMGREVPGNALMFGVYEATKQYLAGGPDTSGLGRGSQVLAGGLAGAAFWLSVYPTDVVKSVIQVDDYKKPKYSGSLDALRKIVAADGVKGLYKGFGPAMARSVPANAATFVAYEITRSALG

SEQ ID NO: 98441 - DNA, 24 bp, Artificial sequence
  primer
atgtcaaccaacgcaaaagagtct

SEQ ID NO: 98442 - DNA, 23 bp, Artificial sequence
  primer
ctacttgtcttcctttggcatgc

SEQ ID NO: 98443 - protein, 339 aa, Artificial sequence
  consensus sequence
  Variant (2)..(6): Xaa in position 2 to 6 is any amino acid
  Variant (8)..(8): Xaa in position 8 is any amino acid
  Variant (10)..(10): Xaa in position 10 is any amino acid
  Variant (11)..(11): Xaa in position 11 is any or no amino acid
  Variant (13)..(15): Xaa in position 13 to 15 is any amino acid
  Variant (17)..(33): Xaa in position 17 to 33 is any amino acid
  Variant (34)..(88): Xaa in position 34 to 88 is any or no amino acid
  Variant (90)..(93): Xaa in position 90 to 93 is any amino acid
  Variant (94)..(95): Xaa in position 94 to 95 is any or no amino acid
  Variant (97)..(102): Xaa in position 97 to 102 is any amino acid
  Variant (104)..(137): Xaa in position 104 to 137 is any amino acid
  Variant (138)..(149): Xaa in position 138 to 149 is any or no amino acid
  Variant (151)..(158): Xaa in position 151 to 158 is any amino acid
  Variant (160)..(165): Xaa in position 160 to 165 is any amino acid
  Variant (167)..(167): Xaa in position 167 is any amino acid
  Variant (169)..(171): Xaa in position 169 to 171 is any amino acid
  Variant (172)..(189): Xaa in position 172 to 189 is any or no amino acid
  Variant (191)..(202): Xaa in position 191 to 202 is any amino acid
  Variant (203)..(203): Xaa in position 203 is any or no amino acid
  Variant (206)..(208): Xaa in position 206 to 208 is any amino acid
  Variant (209)..(209): Xaa in position 209 is any or no amino acid
  Variant (211)..(212): Xaa in position 211 to 212 is any amino acid
  Variant (214)..(219): Xaa in position 214 to 219 is any amino acid
  Variant (221)..(230): Xaa in position 221 to 230 is any amino acid
  Variant (231)..(231): Xaa in position 231 is any or no amino acid
  Variant (233)..(235): Xaa in position 233 to 235 is any amino acid
  Variant (237)..(257): Xaa in position 237 to 257 is any amino acid
  Variant (258)..(265): Xaa in position 258 to 265 is any or no amino acid
  Variant (267)..(274): Xaa in position 267 to 274 is any amino acid
  Variant (276)..(276): Xaa in position 276 is any amino acid
  Variant (278)..(279): Xaa in position 278 to 279 is any amino acid
  Variant (281)..(288): Xaa in position 281 to 288 is any amino acid
  Variant (289)..(321): Xaa in position 289 to 321 is any or no amino acid
  Variant (323)..(328): Xaa in position 323 to 328 is any amino acid
  Variant (330)..(335): Xaa in position 330 to 335 is any amino acid
  Variant (337)..(338): Xaa in position 337 to 338 is any amino acid
AXXXXXPXDXXKXXXQXXXXXXXXXXXXXXXXXXXXXXXXXXXXXXXXXXXXXXXXXXXXXXXXXXXXXXXXXXXXXXXXXXXXXXXXGXXXXXXGXXXXXXRXXXXXXXXXXXXXXXXXXXXXXXXXXXXXXXXXXXXXXXXXXXXXXGXXXXXXXXPXXXXXXRXQXXXXXXXXXXXXXXXXXXXXXYXXXXXXXXXXXXXEGXXXXLXXGXXXXXXRXXXXXXXXXXXYXXXKXXXXXXXXXXXXXXXXXXXXXXXXXXXXXGXXXXXXXXPXDXXKXXXXXXXXXXXXXXXXXXXXXXXXXXXXXXXXXXXXXXXXXGXXXXXXGXXXXXXRXXP

SEQ ID NO: 98444 - protein, 16 aa, Artificial sequence
  protein pattern
  Variant (2)..(6): Xaa in position 2 to 6 is any amino acid
  Variant (8)..(8): Xaa in position 8 is any amino acid
  Variant (10)..(11): Xaa in position 10 to 11 is any amino acid
  Variant (13)..(13): Xaa in position 13 is Asn, Thr or Val
  Variant (14)..(14): Xaa in position 14 is any amino acid
  Variant (15)..(15): Xaa in position 15 is Phe, Ile, Leu or Met
AXXXXXPXDXXKXXXQ

SEQ ID NO: 98445 - DNA, 1476 bp, Saccharomyces cerevisiae; identical to SEQ ID NO: 14241
  CDS (1)..(1476)

SEQ ID NO: 98446 - protein, 491 aa, Saccharomyces cerevisiae; identical to SEQ ID NO: 14242

SEQ ID NO: 98447 - DNA, 1230 bp, Strongylocentrotus purpuratus
  CDS (1)..(1230)
atggctcatgccacaagaaacccaaatatgaccactcttggttttaagaagctgcagagttttgaaaacgaaaatgtcggtgccaggcttggtgggaaaagcatggctgtacagaagcctgctcagagagctgccctgggtaacatcagtaacatggtgcgcacaacacatgctggtggtaaaaaggttgtaaagaaagagctcaggacaaagacgctggccaaatccaaggctacttcatcactccaatctgtagtgagtctaccagtggacaatgtcaaaacggacatctgtaggtcacccttgccagaagtggtggatcaaatggaagtagaccccatcgaatcggccattgaagcattttctcagcgactgattgatctgcaagtagaagacatcgacaaggacgacggagataaccctcagctttgcagcgagtatgccaaggagatctacctgtacatgagaaccttggagaaccagatgaaggtacctgctggctacctggacagagagggtcaggtcacgggtcgtatgcgtcacatcctggtcgactggctagtgcaggtccatcttaggttccatctcctccaggagacactcttcctcacagttcaactcattgacagattcctggttgatcacgcggtctccaaaggaaagctgcagcttgtgggtgtaacagcaatgttcattgccagcaagtatgaagagatgtaccctcctgaaatcaacgactttgtttacatcacagaccaggcttacaccaagacccagatcaggcagatggaggtcttcatgctgaaggggctcaaatacagtctaggaaagcccctatgccttcacttcctacgacgcaactcaaaagcagctggggttgatcctcagaagcatacactagccaagtacctcatggagatcacccttccggaatacagcatggtgcaatacgatccctcagagattgctgctgcagccatctacctgtccatggctctgttgggttccgaggacaactggggcgccaagatgacacattacagcatgtacagcgaagatcacatcaaacccatcatccaaaagatggcaacagccgttaccagggaagatgctatgtcagaaaagtaccatgctgtcaagacaaagtaccgcagcaatcgtttcatgaccatcagttcgctctcacagctgaaatcggatttcatgaagacactagtggaagaatcgtag

SEQ ID NO: 98448 - protein, 409 aa, Strongylocentrotus purpuratus
MAHATRNPNMTTLGFKKLQSFENENVGARLGGKSMAVQKPAQRAALGNISNMVRTTHAGGKKVVKKELRTKTLAKSKATSSLQSVVSLPVDNVKTDICRSPLPEVVDQMEVDPIESAIEAFSQRLIDLQVEDIDKDDGDNPQLCSEYAKEIYLYMRTLENQMKVPAGYLDREGQVTGRMRHILVDWLVQVHLRFHLLQETLFLTVQLIDRFLVDHAVSKGKLQLVGVTAMFIASKYEEMYPPEINDFVYITDQAYTKTQIRQMEVFMLKGLKYSLGKPLCLHFLRRNSKAAGVDPQKHTLAKYLMEITLPEYSMVQYDPSEIAAAAIYLSMALLGSEDNWGAKMTHYSMYSEDHIKPIIQKMATAVTREDAMSEKYHAVKTKYRSNRFMTISSLSQLKSDFMKTLVEES

SEQ ID NO: 98449 - DNA, 1578 bp, Bombyx mori; identical to SEQ ID NO: 14173
  CDS (1)..(1578)

SEQ ID NO: 98450 - protein, 525 aa, Bombyx mori; identical to SEQ ID NO: 14174

SEQ ID NO: 98451 - DNA, 1503 bp, Nasonia vitripennis
  CDS (1)..(1503)
atggcaccttctaaggtactgcagaccaagacaactgcggccagccaggtcactggagttgttactcggcgaggattagccactcgacaacagaatgctgttatctctgatccaaagcagcaagcccttctgtttaaagacaccaggattaagaggaaggccgatgcctctcctctaaaagacaagacgacgaaacggtctgctcttggtaacatcactaatgccattggaaagtccattggtgcccagcttcaagatgctaagaaagcagcaaagaaagttaccgttagccagcctgttaaaagcgttactcaaacaactagcacattaaggactttagaaaaaatattaaacatacctgccgagaacaatgttattcacagacatccaaaacaagttatacgagccaaagcacccgtgaaaaaggaagaagagaggccagaaattcccagtaaaattgccaatgtgaggcggagtcttgacttggaaaaatccaacgatagctcgttgtatgtcagtgccttggaaactctaccagaggaaaacgttaaacgattatcaaggacaggcaaagatgccgacaaaaaatctcccgtggaagaggtccaggagtcagaagtcgaggtcgaagaaaagacagaagctcccgtgaatcgcaatcctcctccagaaagggaactaccagaaggtgtagcgtgggattttgacgtagaaaactggcaagatccctaccaggtgccacactatgctatggacatattcgactacctgaaggaacgcgagagcctctttccgatcaacgattatatggagcgtcaagtctgtctgtcgcgctggatgcgctcactgcttgtggattggatggtcgcggtccaagaatctttcgaactaaatcacgagactctctacttggctgtgaaattggtcgatctatatctgaccaaagtcacagtggggaaagaaacgctccaacttcttggagctgccagtcttttcatagctagcaaattcgatgaaagaatccctccaatgattgaagactttttgtacatatgtgatggtgcttatagtcatcgggaactcatcagaatggagatgagtgttctcaaagttatggatttcgatttaggaatacctctatcttatagatttttaagacgatatgctaggtgtgcaaaggtttcaatgcctacgttgacattagctcgttacattctggagtactcgctgatggactacacgacgatatcattcagcgatagtaagatggcggctgcggcccttttcctagcgttacaaatgaaggaacttggtggctggacgcccacgttagagtactacacgggctacaaactgtctgaattcaaagacatcgtcctcactctcaatgaaggactgcaccggaaacacaaagatgcactttcgactgttcggaataaatatagtcataagatattctttgaagtagcaaaagtgccattgaaagacgaactagatatttaa

SEQ ID NO: 98452 - protein, 500 aa, Nasonia vitripennis
MAPSKVLQTKTTAASQVTGVVTRRGLATRQQNAVISDPKQQALLFKDTRIKRKADASPLKDKTTKRSALGNITNAIGKSIGAQLQDAKKAAKKVTVSQPVKSVTQTTSTLRTLEKILNIPAENNVIHRHPKQVIRAKAPVKKEEERPEIPSKIANVRRSLDLEKSNDSSLYVSALETLPEENVKRLSRTGKDADKKSPVEEVQESEVEVEEKTEAPVNRNPPPERELPEGVAWDFDVENWQDPYQVPHYAMDIFDYLKERESLFPINDYMERQVCLSRWMRSLLVDWMVAVQESFELNHETLYLAVKLVDLYLTKVTVGKETLQLLGAASLFIASKFDERIPPMIEDFLYICDGAYSHRELIRMEMSVLKVMDFDLGIPLSYRFLRRYARCAKVSMPTLTLARYILEYSLMDYTTISFSDSKMAAAALFLALQMKELGGWTPTLEYYTGYKLSEFKDIVLTLNEGLHRKHKDALSTVRNKYSHKIFFEVAKVPLKDELDI

SEQ ID NO: 98453 - DNA, 1416 bp, Magnaporthe grisea 70-15
  CDS (1)..(1416)
atgcccccagcccggactgcgcggggacagttggtctcgaacgagaacgatgagaatgcagggtcaacacgcatgacaaggacgaaggccaaagccgccgccctcaatgttgacgagcttgcacttcccacgaagcagttgcaaacaaagaagggggttgctggtaaacccgcgccgacgacaagaaccacacgtaatgctctcggagatgtgagcaatgtcaccaaggtcgatgctggaaggaaagcagttggaggaaaagccggtgcagtcgcgaaggctgccgccccagccggggtacagaagagcagcgcgcgtacggcgccgacccggagtgcactaagcagcaagccagccaacgtcacaaatggaaacgccgagaagcagtcgggtaggggcacactctccaagaggaaagcacctgcccaggccgctgcaaacaatatcaaggaggagtccacactagagggagagccggctcgcaagcaagcgcgcgtcgccgctactgctgccgtcgacacgaagcgagcagctcccgcgaaggagctcaagtgtgtcgagcctgaactcaaacctaccagagagttcatccgtgacccacggcttctggcaggtgaagtccctcccggcgttatcgatctttccatggacgactatgacgaccctctgatggtggccgagtacgccgaggagattttcagttatatgttgaatctcgagcttagctcaatgcccaaccccaactacatggaccaccaggacgacgttgagtggaagacacgaggcattctcatcgattggctgattgaggtgcacactcgcttccatcttgtgccggaaaccctgttcctcgctgtcaacatcgtcgaccgcttcctttctgagaaggttgtgcagctagaccgcctgcaacttgttggaatcactgccatgttcatcgcttccaagtacgaggaagtcatgtcaccccacgttaccaacttccgccacgttaccgacgacggctttagcgagagcgagattctcagcgccgagcgctttatcctttcgaccctgaactacgacctgagctaccccaaccccatgaacttccttcgtcgggtatccaaagcagacaactatgacactccgtgcagaaccattggcaagtatctcatggaaatcagccttctcgatcatcgcttcttgcagtaccgccccagtcttgttgccgcatctgctatggctctctcccgtattattcttgaccgcggtgaatgggacaagaccatctcatactactcgggttacaacgaggatgacgttgagcccgttgtaaacctcatggttgattacctctctcgccccgttattcatgaggcattcttcaagaaatatgccagcaagaaattcttcaaggctatcgaccagctgtag

SEQ ID NO: 98454 - protein, 471 aa, Magnaporthe grisea 70-15
MPPARTARGQLVSNENDENAGSTRMTRTKAKAAALNVDELALPTKQLQTKKGVAGKPAPTTRTTRNALGDVSNVTKVDAGRKAVGGKAGAVAKAAAPAGVQKSSARTAPTRSALSSKPANVTNGNAEKQSGRGTLSKRKAPAQAAANNIKEESTLEGEPARKQARVAATAAVDTKRAAPAKELKCVEPELKPTREFIRDPRLLAGEVPPGVIDLSMDDYDDPLMVAEYAEEIFSYMLNLELSSMPNPNYMDHQDDVEWKTRGILIDWLIEVHTRFHLVPETLFLAVNIVDRFLSEKVVQLDRLQLVGITAMFIASKYEEVMSPHVTNFRHVTDDGFSESEILSAERFILSTLNYDLSYPNPMNFLRRVSKADNYDTPCRTIGKYLMEISLLDHRFLQYRPSLVAASAMALSRIILDRGEWDKTISYYSGYNEDDVEPVVNLMVDYLSRPVIHEAFFKKYASKKFFKAIDQL

SEQ ID NO: 98455 - DNA, 1473 bp, Apis mellifera
  CDS (1)..(1473)
atgaatcagagcacaaccaatcagagaaataatactaatgtaataagaaaaggaataactacaagaagtcaaaattctgcattaaataatgttttacttaaagcacctgctaatggtaaagaatctcgtgtgaaaaggaaagcagaagcatcaccaccaaaggaaaaaacaacaaaaagatctgcattgggaaatattaccaatgcaattggaaaaacattgggtacacatcaaacacaagaaccaaagaaagcagtaaaaaaaacaacagttactcaaataaaatccttcactcagacaagttccattagaacgcttgaaaaaggtgtaattaaaccagaggtaatacctcagaaaccaaagccagtgcctcgtgtaaaaccgataaaaaaggacgaagaaaaaactgaaatacctagtaaaattttaaatgttagacgtagtttagatttagaaaaatcagaggacagttctttgtatgtaagtgcattagaagaaataacagatgatagtacaaagaagtccagaagaagtaatattcagactgaggaacctgaaaaaacagaagtagaaaatgaatcaaatgagcctcaagtacctgcaaaaactcaagaaaggtcagcagctcaattagatgctgctcctgagcaaatattgccagaaggagttcagtgggattttgatgcagaaaattggttagatccatttcaagtctctcattatgccatggacattttcaattacttaaaaagtagagaacatttatttcctattggagattatatggaaagacaagtatgtctttcgccatggatgagagctttactagttgattggatggtagaagttcaagaatcttttgaactcaatcatgaaactttatatttggctgtgaaattagttgatctatatttgacaaaagtaactgttgtaaaagaaacattacaattattaggtgctgcaagtcttttcatagcaagtaaatatgatgaaagaattcctccaatggtggaagattttttgtatatatgtgatggtgcttataagcaaagagcattaattagaatggaaatgagtatattaaaagtagttgattttgatcttggcatacctctctcttatcgatttcttagacgatatgctaggtgtgcaaaagtttcaatgccaacattaactttagctcgatatattttggagtattcgttaatggattactcgacgataaggattagtgatagtaaaatagctgcagctgcacttttacttgcattacgaatgaaagatttaggagggtggacttcaactctagagtattatagtggatataaagttgatgacatacgagatatcgtacatcttttaaaccaaggattacatcgaaaagaaactcttactactgtacgtaataagtacagtcataagatattttttgaagtagcaaagctgccattaaaagatactttagatatataa

SEQ ID NO: 98456 - protein, 490 aa, Apis mellifera
MNQSTTNQRNNTNVIRKGITTRSQNSALNNVLLKAPANGKESRVKRKAEASPPKEKTTKRSALGNITNAIGKTLGTHQTQEPKKAVKKTTVTQIKSFTQTSSIRTLEKGVIKPEVIPQKPKPVPRVKPIKKDEEKTEIPSKILNVRRSLDLEKSEDSSLYVSALEEITDDSTKKSRRSNIQTEEPEKTEVENESNEPQVPAKTQERSAAQLDAAPEQILPEGVQWDFDAENWLDPFQVSHYAMDIFNYLKSREHLFPIGDYMERQVCLSPWMRALLVDWMVEVQESFELNHETLYLAVKLVDLYLTKVTVVKETLQLLGAASLFIASKYDERIPPMVEDFLYICDGAYKQRALIRMEMSILKVVDFDLGIPLSYRFLRRYARCAKVSMPTLTLARYILEYSLMDYSTIRISDSKIAAAALLLALRMKDLGGWTSTLEYYSGYKVDDIRDIVHLLNQGLHRKETLTTVRNKYSHKIFFEVAKLPLKDTLDI

SEQ ID NO: 98457 - DNA, 1431 bp, Candida glabrata CBS 138; identical to SEQ ID NO: 14183
  CDS (1)..(1431)

SEQ ID NO: 98458 - protein, 476 aa, Candida glabrata CBS 138; identical to SEQ ID NO: 14184

SEQ ID NO: 98459 - DNA, 1620 bp, Kluyveromyces lactis NRRL Y-1140
  CDS (1)..(1620)
atgtcaaaggataaatatgatagaagcttgaaaaacttgaacatgctaagaagaccagtgttaaacaatgttactaatactactgaatctacgttcggtaaagttttgaggcaggctaaatcaagactgcagaatagcaggacgaataatcttccccagggtaccgcaaactcgtattcgaacacaaaaccggcaccattgagagatgacataatggtacctgaggataaggagaattacaatccgctagctaagattgatgaaagagaggagctggattctaatctagttcataatcacaaatccctgggtacacaaaagcatgttacgatcgatgaaagacaagaaataattggatattcacatctggatactgaaaagtctgctccatcatcatcaacatacagcagtgagcatacggaaaatgacggcgttcacgacgtcaacccaaatgttcagcgttcagataatgaagctgatttcaagatgcaaaccacaaacgcttttcacgaaaacgtcaacgatggcagtgacgcaacagatgatgccagtagtggaagtaagagtagcaatgaatgccctgctgttaacgtcggaaacagccttgcgcctatgccaattgacgaaaatgctaacaatagcgctagcagtgtcgaattgagagcaaagcaacttcaggttgaggattcgaaaaagagaccaataagcactgtcgttgaacaaacgttacctaagaaatttaaagtatgtgaaaagggtaaagaatatgaatgggaagatcttgatgaagaagatatcaatgatcccttcatggtaagcgaatatgttacagatatctttgaatatttgcacagattggaaatgatgactttgcctaacagacacgaactattcaaacatgccaacattcagcaaaatagggatattttagttaactggatggtaaagattcataacaagtttggcctactgccggaaaccttatatttggcgttgaatatcatggatagattcctttgcaaagagttagtacagctggaaaaactacaattagtaggaacagcgtgcttattcatcgcttcgaaatatgaagaagtgtatagccccagtgtgaaacacttcgcttacgaaacggatggtgcatgcgatgaagaagaaatcaaagaaggagagaaatttattctaaaaacgttagagttcaatctcaattatccaaatcccatgaatttcctaagaaggatatctaaggcagatgactatgatatacaatccagaacattggcgaaatatttgcttgagatatccatagttgacttcaaattcattgggattctaccctcattgtgcgccgcagcatctatgttcttatcgagaaagatgttaggaaagggccaatgggatggaaatctaatacactatagtggaggatataccaaagacgaactagctcccgtgtgtaatatggttatggaatatttggtccagcctgttgtacatgatgaattgtttaagaaatacgcttcgagaagatttatgaaagcatcggtaatttctagacaatgggcaaagaaagtcatgtcccacaactatgatataatgacactacatgattcagaataa

SEQ ID NO: 98460 - protein, 539 aa, Kluyveromyces lactis NRRL Y-1140
MSKDKYDRSLKNLNMLRRPVLNNVTNTTESTFGKVLRQAKSRLQNSRTNNLPQGTANSYSNTKPAPLRDDIMVPEDKENYNPLAKIDEREELDSNLVHNHKSLGTQKHVTIDERQEIIGYSHLDTEKSAPSSSTYSSEHTENDGVHDVNPNVQRSDNEADFKMQTTNAFHENVNDGSDATDDASSGSKSSNECPAVNVGNSLAPMPIDENANNSASSVELRAKQLQVEDSKKRPISTVVEQTLPKKFKVCEKGKEYEWEDLDEEDINDPFMVSEYVTDIFEYLHRLEMMTLPNRHELFKHANIQQNRDILVNWMVKIHNKFGLLPETLYLALNIMDRFLCKELVQLEKLQLVGTACLFIASKYEEVYSPSVKHFAYETDGACDEEEIKEGEKFILKTLEFNLNYPNPMNFLRRISKADDYDIQSRTLAKYLLEISIVDFKFIGILPSLCAAASMFLSRKMLGKGQWDGNLIHYSGGYTKDELAPVCNMVMEYLVQPVVHDELFKKYASRRFMKASVISRQWAKKVMSHNYDIMTLHDSE

SEQ ID NO: 98461 - DNA, 1527 bp, Debaryomyces hansenii CBS767
  CDS (1)..(1527)
atgccacaaaccgttaataatgagaatgaatacaggttaaccaggtcgaaagcaatgcagaaccagagcttgcgagggaacgaaggggggcccaagacacacgcacaaacacagatggaggcacagagccagaaaggaggacgaggagaggcggtaatgggagatggaaacggcgacacgaaggacgggttgtacaatttgtcacagcactcgtcggaggaggtgttggcgggaacacgaagctacttgggagacgtctcgaaccagtacgggtcgagtggtgtcaagcccaatatggggtcgaaaagacggccgcttgggggagataatgctccgttgcagcagcaccagcggattatgttgaagccaaacaattcgagcacgaacactaatcatttacttgcatcacaaccgaaagacaccgtcacgacgaccaccgcgactattaatgacaacactaacggcaatatcactactaataatcatacatctgcatcgtcatcgaactcgtcgacccagaatctcgcagtgcctgccaggatgccgcagaagagacaggccaccgagtcgtccaccaatttggtggaaaaattgcacatctcgggtccccacagcaaccacgtctcgtacaaaaagtcgagaatcatcgactacgaatggcaggacttggatgaggaagacattgacgaccccttaatggtaagtgagtatgtcaatgatatcttcccctacctcagcgagttggaacacaaaacattacctgactcgcaatatttgtttaaacaaaagcatttgaaacccaaaatgagatccatccttgtcgactggcttgttgaaatgcacaccagattccgcttgttgccggaaaccttattcttggctatcaatatcatggacagattcatgtcgctcgaaatcgtccagatcgacaaattacaactcttggccacaggatccttatttatcgctgccaaatacgaggaggtgttttctccctctgttaaaaactatgcatattttactgatggttcatacactgaagatgaaatcttacaggccgaaaaatatatcttgaccatcttgaacttcgaccttaactatcctaaccccatgaactttttgagaagaatctcaaaagccgacgactacgatgtccaatcaagaacattaggtaaatacttactagaaatcacaataattgactacaaatttattggcatgttaccgtcgttatgttcggcttcggccatgtacattgcccggttgattttgggtaagaccccagtatggaacgggaacttgattcattattcaggcggctatagagtcagtgatatgaaggactgcatcgaattgctcgtccaatacctcattgctccggtcgaacacgatgaatttttcaaaaaatacgctaccagaaaattcatgaaagccagtatattatgtcgaagctgggctaaaaaaatcgtgtctgagaataaggatatatttgctaatgatttattcattaataaggctgaaaattaa

SEQ ID NO: 98462 - protein, 508 aa, Debaryomyces hansenii CBS767
MPQTVNNENEYRLTRSKAMQNQSLRGNEGGPKTHAQTQMEAQSQKGGRGEAVMGDGNGDTKDGLYNLSQHSSEEVLAGTRSYLGDVSNQYGSSGVKPNMGSKRRPLGGDNAPLQQHQRIMLKPNNSSTNTNHLLASQPKDTVTTTTATINDNTNGNITTNNHTSASSSNSSTQNLAVPARMPQKRQATESSTNLVEKLHISGPHSNHVSYKKSRIIDYEWQDLDEEDIDDPLMVSEYVNDIFPYLSELEHKTLPDSQYLFKQKHLKPKMRSILVDWLVEMHTRFRLLPETLFLAINIMDRFMSLEIVQIDKLQLLATGSLFIAAKYEEVFSPSVKNYAYFTDGSYTEDEILQAEKYILTILNFDLNYPNPMNFLRRISKADDYDVQSRTLGKYLLEITIIDYKFIGMLPSLCSASAMYIARLILGKTPVWNGNLIHYSGGYRVSDMKDCIELLVQYLIAPVEHDEFFKKYATRKFMKASILCRSWAKKIVSENKDIFANDLFINKAEN

SEQ ID NO: 98463 - DNA, 1422 bp, Debaryomyces hansenii CBS767; identical to SEQ ID NO: 14191
  CDS (1)..(1422)

SEQ ID NO: 98464 - protein, 473 aa, Debaryomyces hansenii CBS767; identical to SEQ ID NO: 14192

SEQ ID NO: 98465 - DNA, 1461 bp, Candida albicans SC5314; identical to SEQ ID NO: 14199
  CDS (1)..(1461): transl_table=12

SEQ ID NO: 98466 - protein, 486 aa, Candida albicans SC5314; identical to SEQ ID NO: 14200

SEQ ID NO: 98467 - DNA, 1479 bp, Candida albicans SC5314; identical to SEQ ID NO: 14201
  CDS (1)..(1479): transl_table=12

SEQ ID NO: 98468 - protein, 492 aa, Candida albicans SC5314; identical to SEQ ID NO: 14202

SEQ ID NO: 98469 - DNA, 2028 bp, Ustilago maydis 521
  CDS (1)..(2028)
atgtctcagaacatcgcatcccgtcgcatcccgttgcggacgcgcagcaccgcctctgctagcggtgcacaagcaaaggagaatgctggcgttaccagtgtctcctccaggggcgctcgctaccgccacgatggtgctgctgccgacgctggtccttccaagccagcctcgaccgcgactgcggccaccaaggcgtcggttgcttcagccgcttcaggcgttctcggaactcggaagagagccgcgcttggcgatctcacaaacgccaaccgcacccgatccgccatggctggcaacgatgacaagggcaaagctgctttgaaggatgccatcaagccccgcgccaccacctcggcttctacatcatcgcgatcagccgtcggcactgcggcctctgccaccaccaccggcaccggcgctgctcgtcgcgtcgttcgcactcgacccaccaccgcctccagcaccaccgcttctactactgtcacagatgccgccagcgaccgccccttccgtgcttctagacgcgtcgccggcaccactgcttccacagcatcaggtatcccatcagcaacctctagaccaacatccaccactactgctacatcagctgtcactgctgctcgcaaggcttcaatggtccgtgcgtcctcggccggctcgcagactgatgttcgccgcgatgtctccaatacctccgctgtcaccaccaacacgacagctcccatcaccgctgcgtcgcggtcgtccaaggtacagctcaatgaggttcacgacacggatgacaagatggaggcacctcaggccaagcgtctcaaaactgaacagaccaacaagcctgccaaagatgagggatgggaggacctcgacgccgaagatgctgacgacccgttgatggttgctgaatacgtcaacgacatctttgagtacatgaaggagctcgaaatcatcaacatgcccaacggagactacatggccaaccagaaggagatcaattgggacgtgcgtgccatcctcatcgactggctcgtcgatgtccacgccaaattccgcctgctccccgagacgctctatctcgccgtcaacatcatcgaccgcttcctctctcgacgaaccatctcgctatccaagctccagcttgttggtgtcactgccatgtgcatcgcctccaagtacgaagaggtcatgtgcccctcgattcagaacttctgccacctcgctgacggcggctacacagatgtcgagatcctccgcgccgaacgatacatgctcaaggtgctcgactttagcatgtcgtacgccaaccccatgaacttcctccgtcgcatcagcaaggccgacaactacgacatccagacgcgtaccgttgccaagtactttatggagatttcgctgctcgactaccgtcttatggagcatccaccatctctcatcgctgctgcctctgtctggctcgctcgcgaggtgcttgaacgtggtgagtggacgcccacgctggtgcactactctacctactcggagcaggagctgctgggtaccgctgagatcatgctcgactactgcttgcgacccatcgcccaccaattcttccacaagaagtacgcgcacaagaagttcatgcgcgcttcaacttatgtcattgaatgggcgcacaaggccttccccgaaggcgttgtcggcgttgacgagcagcaggacctcaacgtgcttcgcatcgacctctacgagcgcaacgagatcgaacgaccggaaatgtcgcccgtctcttcgtcgcgcgccacatcgccggtcagcatgcatgggcaggctcactttgaggtcgagccaagtcagaacgtcgatggcgacgacacggtctcgtacgcgcatgatgacgatcacgaggaagaagacgacctcgtggacgacgcacaagagatcgaaggcgacgtgcagctgctcgacgatgtcaaggctgctgcccagcgtcaagatacccgacaggtgctgcgtgatgtgaccaacgcgtacgaagcgacggagaccttctag

SEQ ID NO: 98470 - protein, 675 aa, Ustilago maydis 521
MSQNIASRRIPLRTRSTASASGAQAKENAGVTSVSSRGARYRHDGAAADAGPSKPASTATAATKASVASAASGVLGTRKRAALGDLTNANRTRSAMAGNDDKGKAALKDAIKPRATTSASTSSRSAVGTAASATTTGTGAARRVVRTRPTTASSTTASTTVTDAASDRPFRASRRVAGTTASTASGIPSATSRPTSTTTATSAVTAARKASMVRASSAGSQTDVRRDVSNTSAVTTNTTAPITAASRSSKVQLNEVHDTDDKMEAPQAKRLKTEQTNKPAKDEGWEDLDAEDADDPLMVAEYVNDIFEYMKELEIINMPNGDYMANQKEINWDVRAILIDWLVDVHAKFRLLPETLYLAVNIIDRFLSRRTISLSKLQLVGVTAMCIASKYEEVMCPSIQNFCHLADGGYTDVEILRAERYMLKVLDFSMSYANPMNFLRRISKADNYDIQTRTVAKYFMEISLLDYRLMEHPPSLIAAASVWLAREVLERGEWTPTLVHYSTYSEQELLGTAEIMLDYCLRPIAHQFFHKKYAHKKFMRASTYVIEWAHKAFPEGVVGVDEQQDLNVLRIDLYERNEIERPEMSPVSSSRATSPVSMHGQAHFEVEPSQNVDGDDTVSYAHDDDHEEEDDLVDDAQEIEGDVQLLDDVKAAAQRQDTRQVLRDVTNAYEATETF

SEQ ID NO: 98471 - DNA, 1305 bp, Dreissena polymorpha; identical to SEQ ID NO: 14207
  CDS (1)..(1305)

SEQ ID NO: 98472 - protein, 434 aa, Dreissena polymorpha; identical to SEQ ID NO: 14208

SEQ ID NO: 98473 - DNA, 1738 bp, Candida albicans; identical to SEQ ID NO: 14209
  CDS (164)..(1687): transl_table=12

SEQ ID NO: 98474 - protein, 507 aa, Candida albicans; identical to SEQ ID NO: 14210

SEQ ID NO: 98475 - DNA, 1428 bp, Solanum lycopersicum
  CDS (1)..(1428)
atgcgaatcacaagagcacgggcaaaaaccttgggttcatcaggaggactaccacctctacacccatctgtcagacaggataagaaacagggacttgtaacacaaggaacaaaatccaaaagaccagccccagatgagaacaaaccagctaattcttccagtactgcttctcaacagcctaagcgaagggctgttctcagggatgtcactaatgtgctttgtgaaaatccgtacatgaattgcatcaatggaagcaaatttcaggttaagaaattctctgataagaggaattcaaaggtgacacctgctcttttggtgaaaaagcctgagcttgaagatagaaaagagagtgtgattgaagaagcaaaaatggtaaaggttgaggaatcacaagaacactgttcacaagcacacttcaaggaccacccatttactcagccaagtgaatatatcaccgccgctcaaagtggtttagttgatcttatgcctgtgaataggagttcatgtaatgacattaccctccagactacaacaccaaaagatgaaagcaaggtttgcttgaaacaggaaggctccaattcgcttagtattgcagatatagattcaaaacacaaggatccactaatgtgtagtctgtatgctcctgatatatataacaatttgcaagccatggagcttgaccggcggccttcctttaattatatggaaaagcttcagcgggacattaacaagggtatgcgaagtattcttattgattggcttgtggaggtatctgaagaatataggctggttccggacactctttacctgactgtacatcttattgataggttcctttctgagcattacattgaaaaacaaaaactgcagctgcttggagttacctgcatgctaattgcttccaaatatgaagaaatttgtgcacctcgtgtggaagaattttgctttattacagacaacacttactcgaaagaagaggtagtaagaatggaaagtctggttctgaattttttgggctttcaacttgctgctccgaccaccaaaaagttcctgaggagattcgttcaggcatcacaagcttcttatgaggttccctctgttgaactggaattcatggcaaactatttagcagagttaacactagctgaatatagttttctcaagtttcttccatctgttactgctgcatcagctgtatttctagccagatggacacttgatcaatctaaccacccatggaattcaactttggagcactacactacatataaggcgtcagatctgaaaactacagttcttttgctgcaagatttacagatgaacaccagtggaagcactctgaatgccatccgtgaaaagtataaacaaccaaagttcaagtccgtggcaactttatcgtctccaaaaccagtccaatcactgttctag

SEQ ID NO: 98476 - protein, 475 aa, Solanum lycopersicum
MRITRARAKTLGSSGGLPPLHPSVRQDKKQGLVTQGTKSKRPAPDENKPANSSSTASQQPKRRAVLRDVTNVLCENPYMNCINGSKFQVKKFSDKRNSKVTPALLVKKPELEDRKESVIEEAKMVKVEESQEHCSQAHFKDHPFTQPSEYITAAQSGLVDLMPVNRSSCNDITLQTTTPKDESKVCLKQEGSNSLSIADIDSKHKDPLMCSLYAPDIYNNLQAMELDRRPSFNYMEKLQRDINKGMRSILIDWLVEVSEEYRLVPDTLYLTVHLIDRFLSEHYIEKQKLQLLGVTCMLIASKYEEICAPRVEEFCFITDNTYSKEEVVRMESLVLNFLGFQLAAPTTKKFLRRFVQASQASYEVPSVELEFMANYLAELTLAEYSFLKFLPSVTAASAVFLARWTLDQSNHPWNSTLEHYTTYKASDLKTTVLLLQDLQMNTSGSTLNAIREKYKQPKFKSVATLSSPKPVQSLF

SEQ ID NO: 98477 - DNA, 1384 bp, Arabidopsis thaliana
  CDS (1)..(1353)
atggggaaggaaaatgctgtgtctcggccattcactcgttcccttgcctctgctttgcgcgcttcagaagtgacttctactacacagaatcaacagagagtaaacacaaaaagaccagccttggaggatacaagagccactggacccaacaagaggaagaagcgagcggttctaggggagatcacaaatgttaactccaatacagctatacttgaggccaaaaacagcaagcagataaagaaaggacgcggtcatggattggcgagtacatcccagttggcaacttctgttacttcagaagtcacagatcttcagtccaggaccgatgcaaaagttgaagttgcatcaaatacagcaggaaacctttctgtttctaaaggcacagataacacagctgataactgtattgagatatggaattctagattgcctccaagacctcttgggagatcagcttctacagctgagaaaagtgctgttattggtagttcaactgtaccggatatcccaaaatttgtagacatcgattcagatgacaaggatcctttactgtgctgcctctatgcccctgaaatccactacaatttgcgtgtttcagagcttaaacgcagaccacttccggactttatggagagaatacagaaggatgtcacccagtccatgcggggaattctggttgattggcttgtggaggtctctgaagaatacacacttgcatctgacactctctacctcacagtgtatctcatagactggttcctccatggaaactacgtgcaaagacagcaacttcaactgctcggcatcacttgcatgctaattgcctcgaagtatgaggaaatctctgctccacgcattgaggagttttgcttcattacggataacacctacacaagagatcaggtcctggaaatggagaaccaagtacttaagcattttagctttcaaatatacactcccactccaaaaacgttccttaggagatttctcagagcagctcaagcctctcgcctgagcccaagccttgaagtcgagtttctagccagctatctaacagagttgacattaatagactaccatttcttaaagtttcttccttccgttgttgctgcttcagcggtttttctcgccaagtggacaatggaccaatcaaaccacccatggaatccaacacttgagcattacacaacgtacaaagcatcggatctgaaagcatctgttcatgccttacaagatctgcagcttaacaccaaaggttgccccttgagcgctatacgcatgaagtataggcaagagaaatacaaatctgtggcggttctcacgtctccaaagctacttgacacgctattctgaaggtttcaactcctaaccgataatagttttg

SEQ ID NO: 98478 - protein, 450 aa, Arabidopsis thaliana
MGKENAVSRPFTRSLASALRASEVTSTTQNQQRVNTKRPALEDTRATGPNKRKKRAVLGEITNVNSNTAILEAKNSKQIKKGRGHGLASTSQLATSVTSEVTDLQSRTDAKVEVASNTAGNLSVSKGTDNTADNCIEIWNSRLPPRPLGRSASTAEKSAVIGSSTVPDIPKFVDIDSDDKDPLLCCLYAPEIHYNLRVSELKRRPLPDFMERIQKDVTQSMRGILVDWLVEVSEEYTLASDTLYLTVYLIDWFLHGNYVQRQQLQLLGITCMLIASKYEEISAPRIEEFCFITDNTYTRDQVLEMENQVLKHFSFQIYTPTPKTFLRRFLRAAQASRLSPSLEVEFLASYLTELTLIDYHFLKFLPSVVAASAVFLAKWTMDQSNHPWNPTLEHYTTYKASDLKASVHALQDLQLNTKGCPLSAIRMKYRQEKYKSVAVLTSPKLLDTLF

SEQ ID NO: 98479 - DNA, 1619 bp, Antirrhinum majus
  CDS (96)..(1421)
ggatccgggtaccatgggcaaagagcctctcagagagagaaagagaaaacattgaaaatatagagtaaaagtctgtctaatcaaaagtctgtgcaatgggttcaagacaccaggtggtccaacagcagaacagaggagatgtagttcctggagctattaagcagaagagtatggcagtcgagaaaaagaatcgtcgtgcactaggcgacatagggaacgtcgttacagttcgtggggtcgaaggcaaggcacttcctcaagtttctcgacccattactaggggcttttgtgctcagttaattgctaatgcagaggctgcagcagctgaaaacaacaagaattccttggctgtcaatgctaagggagccgatggagctttaccgattaaacgggccgtggctcgtgtgccggtgcagaaaaaaactgtcaaatctaagccacaagagataattgaaatcagccctgatactgagaagaagaaagctccagttcttgagaaggaaattacaggagagaagtctttgaaaaagaaggctccaactctaacttcgaccctcactgcaaggagcaaggctgctagtgtggtgagaactaagcctaaggagcagatagttgacattgatgccgcagatgtgaataacgatttagctgttgttgaatacgtcgaagacatgtacaagttttacaagtcagctgagaatgacagcagaccgcatgattatatggactcacaacccgagataaatgagaaaatgagagccattctcatagattggttagttcaagttcactacaaattcgaactttctccagagaccctttaccttaccatcaacatcgttgatcgataccttgcatcgaagactacatcaagacgggagctgcaattgttgggcatgagttccatgcttatcgcgtccaagtacgaagaaatttgggcgcctgaggtaaatgacttagtttgcatctcggatggaagctactccaacgagcaagtcttgcgtatggagaagaaaattcttggtgcgttggaatggtacttaactgttccgactccatacgtgtttcttgtacgattcataaaagcctctcttccggattcagatgtggaaaagaacatggtttattttctggcagagctaggaatgatgaattatgcaactattattatgtactgtccctcaatgattgctgcagcggctgtgtacgcagcgcggtgcacgttgaataagatgccaatctggaacgaaacactgagaatgcacacgggtttctcagaagtgcagcttatggattgtgcgaagctgttgattgattttcatggagggtcgaccgatcagaagttgcaagggatttataggaaatactcgcgtttagagaaaggggctgttgcactcttgccacagccactgctggcatgagcaactgatgggatgatgatgatgatgatgatatatagaagaaaataaagatttagagggggggtttgtttgatgctaattttcgaggaacatttatcttagatgttccttttgttgttgatttgtttaaaactattgaaacatcgacaagatttactgctctgaaaaaaaaaaaaaaaaccatggtacccggatccc

SEQ ID NO: 98480 - protein, 441 aa, Antirrhinum majus
MGSRHQVVQQQNRGDVVPGAIKQKSMAVEKKNRRALGDIGNVVTVRGVEGKALPQVSRPITRGFCAQLIANAEAAAAENNKNSLAVNAKGADGALPIKRAVARVPVQKKTVKSKPQEIIEISPDTEKKKAPVLEKEITGEKSLKKKAPTLTSTLTARSKAASVVRTKPKEQIVDIDAADVNNDLAVVEYVEDMYKFYKSAENDSRPHDYMDSQPEINEKMRAILIDWLVQVHYKFELSPETLYLTINIVDRYLASKTTSRRELQLLGMSSMLIASKYEEIWAPEVNDLVCISDGSYSNEQVLRMEKKILGALEWYLTVPTPYVFLVRFIKASLPDSDVEKNMVYFLAELGMMNYATIIMYCPSMIAAAAVYAARCTLNKMPIWNETLRMHTGFSEVQLMDCAKLLIDFHGGSTDQKLQGIYRKYSRLEKGAVALLPQPLLA

SEQ ID NO: 98481 - DNA, 1700 bp, Medicago varia
  CDS (133)..(1419)
cacttcaactactgtcactgtttctctcttccattttttttcaaggatcttcattttcacgcccttcttcttttaggatcttccatttttttttgtgggttgtgtttgattttttttttcattgaagaaaaaatgaagttttctgaggagaagaatgtttctaacaaccccacaaattttgaaggagggttagattctagaaaggttgggcaaaacagaagagcattgggtgtgattaatcagaatttggttgtggaaggacgtccttatccttgtgttgttaacaagagggcattgtcagagagaaatgatgtttgtgagaagaaacaagcggatccggttcatcgacccatcactaggaggtttgctgcaaagattgctagcacaaaaacatctaatgctgagggaactaccaaaaggtcaaacttggcaaaatcaagttcaaatggatttggagatttcatatttgttgatgatgaacacaagccagtggaggatcagccagtgccaatggctttagagcaaacagaaccaatgcatagtgaatcagatcagatggaggaagttgagatggaggatatcatggaagagcctgttatggacattgacacccctgatgcaaatgaccctcttgcagttgctgaatatattgaagatctttactcttactacagaaaagttgagagtactagctgtgtttcaccaaactatatggcacagcaatttgacattaatgaaaggatgagggctatactggttgactggcttattgaggtgcatgacaaattcgacctcatgcatgagacattgtttctcactgtcaatcttatagacagatttttggaaaagcagtctgtggtaagaaagaagcttcagttggttggtttagtggcaatgcttttggcatgcaagtatgaggaagtttcagtgcctgtggttggagatctaattcttatatcagacagagcatacacccggaaagaagttctggaaatggagaaggtgatggtcaatgcattgaagtttaacatatctgtgccgacagcctatgttttcatgagaaggttcttaaaggcggctcaagcagacagaaaacttgagctgctagctttcttcttgattgagctatctcttgtagaatatgcaatgttgaagttctctccttctcaactagctgccgctgctgtctatacagctcaatgcactatgtatggtgtcaaacagtggagtaagacatgtgaatggcacaccaactactctgaagatcaactcttagaatgctctagtttaatggttgactttcacaagaaggctgggacagggaaacttacaggagcacataggaagtattgcacatcaaaatttagctatactgcgaaatgtgaaccagcaagttttcttctggagaacgagttgtagctggccatagcttagctactaatgattgaataacaaacaattaactttcataaatgggtttaagaatgttgtaagcaacttgggttgcaatggggatgggaatttactaatactaaggattctgaaatcctcactcagtgttttacttgtctgttctctagttatttctctgtaatgttctgattgaacatagtttacatttacaactgtatttctgatgttcccattgaacataataatggaaatatatagaaaattttcaataaaaaaaaaaaaaaaaa

SEQ ID NO: 98482 - protein, 428 aa, Medicago varia
MKFSEEKNVSNNPTNFEGGLDSRKVGQNRRALGVINQNLVVEGRPYPCVVNKRALSERNDVCEKKQADPVHRPITRRFAAKIASTKTSNAEGTTKRSNLAKSSSNGFGDFIFVDDEHKPVEDQPVPMALEQTEPMHSESDQMEEVEMEDIMEEPVMDIDTPDANDPLAVAEYIEDLYSYYRKVESTSCVSPNYMAQQFDINERMRAILVDWLIEVHDKFDLMHETLFLTVNLIDRFLEKQSVVRKKLQLVGLVAMLLACKYEEVSVPVVGDLILISDRAYTRKEVLEMEKVMVNALKFNISVPTAYVFMRRFLKAAQADRKLELLAFFLIELSLVEYAMLKFSPSQLAAAAVYTAQCTMYGVKQWSKTCEWHTNYSEDQLLECSSLMVDFHKKAGTGKLTGAHRKYCTSKFSYTAKCEPASFLLENEL

SEQ ID NO: 98483 - DNA, 1287 bp, Spisula solidissima
  CDS (1)..(1287)
atgactacaagagccgcttcggcgaatcttgctaatgcaagaatgatgcataatatggaggaagctggccacatggctaacctcaaaggtagaccacacacgtcacatgcctcccagagaaacactttgggggatattggcaatcaagtgtccgccatcacaatatcagatgtcccacggaaggatcccatcatcaagaaagaaatagttcatttatctagtcaccaacacaagatactaacaaagagcaaagctaccacatcattaaaaagtttagcagaagaaagtcatatacctaagaaacaagaagcatttacttttttggaacctgttgctgccatgccaaagccaaccacagtgcctactgcaacagtacttccacaaccaacagtcccggttcctatggatataagtgaaaatgttccagaatcgttctccagagttttgctcaatgtacaaaatatagatgcaaatgacaaagaaaacccacaactagtcagtgaatatgtcaatgacatctacgattacatgagagatttagagggaaaatatcctatacgacataattatttagaaaatcaagaaatcacaggaaagatgcgtgcaattttaatagattggttatgtcaggtgcatcatagattccacttgttacaagagacactttacctcacagtagccattatagacagattgttacaggaaagcccagtgcctagaaataaactacaattagtcggagttacttctatgttaatagcttccaaatatgaagaaatgtatgcacctgaagttgcagactttgtgtatataactgacaatgcttatacgaaaaaagaaatcttagaaatggaacaacatatacttaaaaaattaaacttcagttttggtcgaccactttgtctgcatttcttacggagagattcaaaagctggccaggttgatgccaacaaacacacgttagcaaagtatcttatggagctgactatcacagagtatgatatggtgcaatatctaccttcaaaaatagctgctgcagccctgtgtctttctatgaaacttcttgatagtactcattggacggagacattaacacactacagttcatattgtgaaaaggatttggtgtcaacaatgcagaaacttgccagtctagtcattaaagcagagaacagcaaactcactgctgttcatacaaagtactcaagctctaaatttatgaagatcagtaaattagctgccttgaaatctccattggttaaagaattggcagctgcctcagtatga

SEQ ID NO: 98484 - protein, 428 aa, Spisula solidissima
MTTRAASANLANARMMHNMEEAGHMANLKGRPHTSHASQRNTLGDIGNQVSAITISDVPRKDPIIKKEIVHLSSHQHKILTKSKATTSLKSLAEESHIPKKQEAFTFLEPVAAMPKPTTVPTATVLPQPTVPVPMDISENVPESFSRVLLNVQNIDANDKENPQLVSEYVNDIYDYMRDLEGKYPIRHNYLENQEITGKMRAILIDWLCQVHHRFHLLQETLYLTVAIIDRLLQESPVPRNKLQLVGVTSMLIASKYEEMYAPEVADFVYITDNAYTKKEILEMEQHILKKLNFSFGRPLCLHFLRRDSKAGQVDANKHTLAKYLMELTITEYDMVQYLPSKIAAAALCLSMKLLDSTHWTETLTHYSSYCEKDLVSTMQKLASLVIKAENSKLTAVHTKYSSSKFMKISKLAALKSPLVKELAAASV

SEQ ID NO: 98485 - DNA, 1437 bp, Emericella nidulans; identical to SEQ ID NO: 14233
  CDS (1)..(1437)

SEQ ID NO: 98486 - protein, 478 aa, Emericella nidulans; identical to SEQ ID NO: 14234

SEQ ID NO: 98487 - DNA, 1416 bp, Saccharomyces cerevisiae; identical to SEQ ID NO: 14237
  CDS (1)..(1416)

SEQ ID NO: 98488 - protein, 471 aa, Saccharomyces cerevisiae; identical to SEQ ID NO: 14238

SEQ ID NO: 98489 - DNA, 1236 bp, Schizosaccharomyces pombe; identical to SEQ ID NO: 14239
  CDS (1)..(1236)

SEQ ID NO: 98490 - protein, 411 aa, Schizosaccharomyces pombe; identical to SEQ ID NO: 14240

SEQ ID NO: 98491 - DNA, 1449 bp, Schizosaccharomyces pombe; identical to SEQ ID NO: 14243
  CDS (1)..(1449)

SEQ ID NO: 98492 - protein, 482 aa, Schizosaccharomyces pombe; identical to SEQ ID NO: 14244

SEQ ID NO: 98493 - DNA, 1284 bp, Saccharomyces cerevisiae; identical to SEQ ID NO: 14171
  CDS (1)..(1284)

SEQ ID NO: 98494 - protein, 427 aa, Saccharomyces cerevisiae; identical to SEQ ID NO: 14172

SEQ ID NO: 98495 - DNA, 1383 bp, Saccharomyces cerevisiae; identical to SEQ ID NO: 14245
  CDS (1)..(1383)

SEQ ID NO: 98496 - protein, 460 aa, Saccharomyces cerevisiae; identical to SEQ ID NO: 14246

SEQ ID NO: 98497 - DNA, 1308 bp, Saccharomyces cerevisiae; identical to SEQ ID NO: 14247
  CDS (1)..(1308)

SEQ ID NO: 98498 - protein, 435 aa, Saccharomyces cerevisiae; identical to SEQ ID NO: 14248

SEQ ID NO: 98499 - DNA, 1470 bp, Zea mays; identical to SEQ ID NO: 14253
  CDS (1)..(1470)

SEQ ID NO: 98500 - protein, 489 aa, Zea mays; identical to SEQ ID NO: 14254

SEQ ID NO: 98501 - DNA, 1275 bp, Zea mays; identical to SEQ ID NO: 14255
  CDS (1)..(1275)

SEQ ID NO: 98502 - protein, 424 aa, Zea mays; identical to SEQ ID NO: 14256

SEQ ID NO: 98503 - DNA, 1509 bp, Zea mays
  CDS (1)..(1509)
atgtcgacccacgccgcctcccgccgctcctcctcctcgtccgcggtcgccaagcgccccgcgatagcggagggagctaccaaggcggcgggaccgggccccaccgccgcgcaggcgaagaagcgcaccgcgctcgtcaacatcaccaacgtcgccgctccgggggcgagggtcgccgccgttgggaaggtcgcgccaccggtcaccggcgcgaagttgaatccagctacctcaggtgcacccttaaagaagccatctttggcaaatgctcgcaccatccggggttctgctgcgaagtcggcttccatcaagccagctccaccagtatcacgccatgacagcagctcagagcagaagcataatgttcttgtgcctaccactgtccatgtgccaagtcgtgctcctgccttggtaccctacagcagtttcgtgtctcctggacgttcaagagattcagtttctactgatgagacgatgtcgacttgtgactccatgaaaagcccggacttcgagtacatagacaatgggggttgctcgatgctggcttcgttgcagcgacgggcggatgaacatctgcgtacatcagaggacagagacgttgaagaaaataagtggaagaaaaatggccctgccccaatggaaatcgacagcatctgtgaagttgacagtaacctcgaggatccacagttgtgcgccgctctggcttctgacatctacatgcatctgcgagaagctgagatgaagaaaagaccatcgactgatttcatgaagacgattcaaaaggatgtcaaccctagcatgagggcaattttgatagactggctcgtggaagttgctgaagaatatcgtcttgctcctgataccttgtacctgacagtcaactacatcgaccgttatctttctggcaacgagatcaatcgccaaaggctgcaattacttggtgttgcttgcatgcttatagcggcaaaatacgaggagatatgtgcaccccaggttgaagaattctgctacataacagacaatacatacttcagagacgaggttctagaaatggaagcttctgtgctgaactacttgaagtttgaaatgacagcgcctacggcaaagtgtttcttgaggagatttgctcgttctgcacaggcgtgtgatgaggatcctgctctgcatctggagttcctggccaattacatcgctgagctatccctgctggagtacagtcttctgtcttaccctccatcactaatcgctgcctcagctattttcttggcgagatttgtactccagccaacgaagtatccttggaactccacgcttgctcactacacgcagtacaagccgtccgaattgagcgagtgtgtaaagacactgcaccgcctttccagtgttggtcctgggagcaacctcccagcaatcagagaaaagtacagccagcacaaatacaaatttgtcgcgaagaagcagtgcccgccacaaatccctgccgaattcttcagggatgcggcatgctag

SEQ ID NO: 98504 - protein, 502 aa, Zea mays
MSTHAASRRSSSSSAVAKRPAIAEGATKAAGPGPTAAQAKKRTALVNITNVAAPGARVAAVGKVAPPVTGAKLNPATSGAPLKKPSLANARTIRGSAAKSASIKPAPPVSRHDSSSEQKHNVLVPTTVHVPSRAPALVPYSSFVSPGRSRDSVSTDETMSTCDSMKSPDFEYIDNGGCSMLASLQRRADEHLRTSEDRDVEENKWKKNGPAPMEIDSICEVDSNLEDPQLCAALASDIYMHLREAEMKKRPSTDFMKTIQKDVNPSMRAILIDWLVEVAEEYRLAPDTLYLTVNYIDRYLSGNEINRQRLQLLGVACMLIAAKYEEICAPQVEEFCYITDNTYFRDEVLEMEASVLNYLKFEMTAPTAKCFLRRFARSAQACDEDPALHLEFLANYIAELSLLEYSLLSYPPSLIAASAIFLARFVLQPTKYPWNSTLAHYTQYKPSELSECVKTLHRLSSVGPGSNLPAIREKYSQHKYKFVAKKQCPPQIPAEFFRDAAC

SEQ ID NO: 98505 - DNA, 1374 bp, Glycine max; identical to SEQ ID NO: 14259
  CDS (1)..(1374)

SEQ ID NO: 98506 - protein, 457 aa, Glycine max; identical to SEQ ID NO: 14260

SEQ ID NO: 98507 - DNA, 1458 bp, Glycine max
  CDS (1)..(1458)
atgtcgacccagaatcgtcgttcgtcgttttcgtcctcaacgacgtcgtccttggccaaacgccatgtatccgcctcaacgacgtcgtcgtctttggccgctcctgcaaacatggccaagaagcgacctcctctctccaacctcaccaacaccgttgctcaccgcaactcttcctcttcggttccatgcgcagctaaatttgccaagaccaagaaagacgttgttccggcgtgttcagggaacaaaagaccaacattggcgaatgtgaaacccactagcgcagctatttttccgaaggctaattctttccctgtaaagaatgaagctccaccaactcctcctcctccagttgccaccgttactgttccggctccggcggtggatgtttcacctactaaatcagagacaatgtccgtttctacggatgagtcaatgtcctcttgtgactccttcaagagccctgacattgaatatgtggacaatagtgatgttgcagccgttgattcaattgagaggaaaacattcagccatctcaacatctctgattctacagaaggaaacatatgtagtagagaaataattgttgagttggaagaaagagtggacaaaattgtcaatgttgataataattacgcggatcctcagctctgtgcaacctttgcttgtgatatctacaagcaccttcgtgcatctgaggcaaagaaaaggccttccacagacttcatggagaaaattcagaaggagataaactccagcatgcgtgctatattgattgactggcttgtcgaggtggctgaagagtatagactagtacctgatacattgtatttgacagtaaactacattgatcggtatctatcagggaatgtgatgaacagacaaaggttacagttacttggtgttgcctccatgatgattgcctctaaatacgaggaaatttgtgcacctcaggtggaggaattttgttacataactgataacacatacttcaaagaagaggttttgcagatggaatctgctgtcctgaattttctcaagttcgaaatgacagccccaacagtaaaatgtttcttaagaagatttgttcgtgcagctcaaggagttgatgaggtcccttcgctacaactagagtgcttgacaaactatattgctgaattgtctctcatggagtacagtatgcttggttatgctccatcacttgtagccgcttcagcaattttcctggccaaattcatacttttcccttcaaagaaaccatggaattccacattacagcattacaccttgtaccagccttctgatctgtgtgtctgcgtaaaggatcttcaccgtctttgttgcaacagccctaattctaatttgcctgcaattagggagaaatacagtcagcacaagtacaaatatgtggccaagaagtactgccctccttcaatacccccagaatttttccagaattga

SEQ ID NO: 98508 - protein, 485 aa, Glycine max
MSTQNRRSSFSSSTTSSLAKRHVSASTTSSSLAAPANMAKKRPPLSNLTNTVAHRNSSSSVPCAAKFAKTKKDVVPACSGNKRPTLANVKPTSAAIFPKANSFPVKNEAPPTPPPPVATVTVPAPAVDVSPTKSETMSVSTDESMSSCDSFKSPDIEYVDNSDVAAVDSIERKTFSHLNISDSTEGNICSREIIVELEERVDKIVNVDNNYADPQLCATFACDIYKHLRASEAKKRPSTDFMEKIQKEINSSMRAILIDWLVEVAEEYRLVPDTLYLTVNYIDRYLSGNVMNRQRLQLLGVASMMIASKYEEICAPQVEEFCYITDNTYFKEEVLQMESAVLNFLKFEMTAPTVKCFLRRFVRAAQGVDEVPSLQLECLTNYIAELSLMEYSMLGYAPSLVAASAIFLAKFILFPSKKPWNSTLQHYTLYQPSDLCVCVKDLHRLCCNSPNSNLPAIREKYSQHKYKYVAKKYCPPSIPPEFFQN

SEQ ID NO: 98509 - DNA, 1329 bp, Zea mays; identical to SEQ ID NO: 14263
  CDS (1)..(1329)

SEQ ID NO: 98510 - protein, 442 aa, Zea mays; identical to SEQ ID NO: 14264

SEQ ID NO: 98511 - DNA, 1509 bp, Zea mays
  CDS (1)..(1509)
atgtcgacccacgccgcctcccgccgctcctcctcctcgtccgcggtcgccaagcgccccgcgatagcggagggagctaccaaggcggcgggaccgggccccaccgccgcgcaggcgaagaagcgcaccgcgctcgtcaacatcaccaacgtcgccgctccgggggcgagggtcgccgccgttgggaaggtcgcgccaccggtcaccggcgcgaagttgaatccagctacctcaggtgcacccttaaagaagccatctttggcaaatgctcgcaccatccggggttctgctgcgaagtcggcttccatcaagccagctccaccagtatcacgccatgacagcagctcagagcagaagcataatgttcttgtgcctaccactgtccatgtgccaagtcgtgctcctgccttggtaccctacagcagtttcgtgtctcctggacgttcaagagattcagtttctactgatgagacgatgtcgacttgtgactccatgaaaagcccggacttcgagtacatagacaatgggggttgctcgatgctggcttcgttgcagcgacgggcggatgaacatctgcgtacatcagaggacagagacgttgaagaaaataagtggaagaaaaatggccctgccccaatggaaatcgacagcatctgtgaagttgacagtaacctcgaggatccacagttgtgcgccgctctggcttctgacatctacatgcatctgcgagaagctgagatgaagaaaagaccatcgactgatttcatggagacgattcaaaaggatgtcaaccctagcatgagggcaattttgatagactggctcgtggaagttgctgaagaatatcgtcttgctcctgataccttgtacctgacagtcaactacatcgaccgttatctttctggcaacgagatcaatcgccaaaggctgcaattacttggtgttgcttgcatgcttatagcggcaaaatacgaggagatatgtgcaccccaggttgaagaattctgctacataacagacaatacatacttcagagacgaggttctagaaatggaagcttctgtgctgaactacttgaagtttgaaatgacagcgcctacggcaaagtgtttcttgaggagatttgctcgttctgcacaggcgtgtgatgaggatcctgctctgcatctggagttcctggccaattacatcgctgagctatccctgctggagtacagtcttctgtcttaccctccatcactaatcgctgcctcagctattttcttggcgagatttgtactccagccaacgaagtatccttggaactccacgcttgctcactacacgcagtacaagccgtccgaattgagcgagtgtgtaaagacactgcaccgcctttccagtgttggtcctgggagcaacctcccagcaatcagagaaaagtacagccagcacaaatacaaatttgtcgcgaagaagcagtgcccgccacaaatccctgccgaattcttcagggatgcggcatgctag

SEQ ID NO: 98512 - protein, 502 aa, Zea mays
MSTHAASRRSSSSSAVAKRPAIAEGATKAAGPGPTAAQAKKRTALVNITNVAAPGARVAAVGKVAPPVTGAKLNPATSGAPLKKPSLANARTIRGSAAKSASIKPAPPVSRHDSSSEQKHNVLVPTTVHVPSRAPALVPYSSFVSPGRSRDSVSTDETMSTCDSMKSPDFEYIDNGGCSMLASLQRRADEHLRTSEDRDVEENKWKKNGPAPMEIDSICEVDSNLEDPQLCAALASDIYMHLREAEMKKRPSTDFMETIQKDVNPSMRAILIDWLVEVAEEYRLAPDTLYLTVNYIDRYLSGNEINRQRLQLLGVACMLIAAKYEEICAPQVEEFCYITDNTYFRDEVLEMEASVLNYLKFEMTAPTAKCFLRRFARSAQACDEDPALHLEFLANYIAELSLLEYSLLSYPPSLIAASAIFLARFVLQPTKYPWNSTLAHYTQYKPSELSECVKTLHRLSSVGPGSNLPAIREKYSQHKYKFVAKKQCPPQIPAEFFRDAAC

SEQ ID NO: 98513 - DNA, 1275 bp, Zea mays; identical to SEQ ID NO: 14267
  CDS (1)..(1275)

SEQ ID NO: 98514 - protein, 424 aa, Zea mays; identical to SEQ ID NO: 14268

SEQ ID NO: 98515 - DNA, 1539 bp, Zea mays; identical to SEQ ID NO: 14269
  CDS (1)..(1539)

SEQ ID NO: 98516 - protein, 512 aa, Zea mays; identical to SEQ ID NO: 14270

SEQ ID NO: 98517 - DNA, 25 bp, Artificial sequence
  primer
atgtccaacccaatagaaaacacag

SEQ ID NO: 98518 - DNA, 26 bp, Artificial sequence
  primer
tcattcatgcaaggtcattatatcat

SEQ ID NO: 98519 - protein, 266 aa, Artificial sequence
  consensus sequence
  Variant (2)..(2): Xaa in position 2 is any amino acid
  Variant (4)..(14): Xaa in position 4 to 14 is any amino acid
  Variant (15)..(15): Xaa in position 15 is any or no amino acid
  Variant (17)..(19): Xaa in position 17 to 19 is any amino acid
  Variant (21)..(27): Xaa in position 21 to 27 is any amino acid
  Variant (29)..(47): Xaa in position 29 to 47 is any amino acid
  Variant (48)..(51): Xaa in position 48 to 51 is any or no amino acid
  Variant (53)..(54): Xaa in position 53 to 54 is any amino acid
  Variant (56)..(56): Xaa in position 56 is any amino acid
  Variant (59)..(67): Xaa in position 59 to 67 is any amino acid
  Variant (69)..(70): Xaa in position 69 to 70 is any amino acid
  Variant (74)..(74): Xaa in position 74 is any amino acid
  Variant (76)..(80): Xaa in position 76 to 80 is any amino acid
  Variant (83)..(83): Xaa in position 83 is any amino acid
  Variant (85)..(93): Xaa in position 85 to 93 is any amino acid
  Variant (94)..(94): Xaa in position 94 is any or no amino acid
  Variant (98)..(98): Xaa in position 98 is any amino acid
  Variant (100)..(104): Xaa in position 100 to 104 is any amino acid
  Variant (107)..(107): Xaa in position 107 is any amino acid
  Variant (112)..(114): Xaa in position 112 to 114 is any amino acid
  Variant (116)..(124): Xaa in position 116 to 124 is any amino acid
  Variant (126)..(136): Xaa in position 126 to 136 is any amino acid
  Variant (138)..(143): Xaa in position 138 to 143 is any amino acid
  Variant (145)..(145): Xaa in position 145 is any amino acid
  Variant (147)..(150): Xaa in position 147 to 150 is any amino acid
  Variant (152)..(155): Xaa in position 152 to 155 is any amino acid
  Variant (160)..(162): Xaa in position 160 to 162 is any amino acid
  Variant (164)..(172): Xaa in position 164 to 172 is any amino acid
  Variant (173)..(177): Xaa in position 173 to 177 is any or no amino acid
  Variant (179)..(183): Xaa in position 179 to 183 is any amino acid
  Variant (185)..(196): Xaa in position 185 to 196 is any amino acid
  Variant (197)..(197): Xaa in position 197 is any or no amino acid
  Variant (200)..(201): Xaa in position 200 to 201 is any amino acid
  Variant (204)..(204): Xaa in position 204 is any amino acid
  Variant (206)..(217): Xaa in position 206 to 217 is any amino acid
  Variant (218)..(221): Xaa in position 218 to 221 is any or no amino acid
  Variant (223)..(228): Xaa in position 223 to 228 is any amino acid
  Variant (230)..(259): Xaa in position 230 to 259 is any amino acid
  Variant (260)..(264): Xaa in position 260 to 264 is any or no amino acid
DXDXXXXXXXXXXXXYXXXIXXXXXXXEXXXXXXXXXXXXXXXXXXXXXXXRXXLXDWXXXXXXXXXLXXETLXLXXXXXDRXLXXXXXXXXXXLQLXGXXXXXIAXKYEEXXXPXXXXXXXXXDXXXXXXXXXXXEXXXXXXLXFXXXXPXXXXFLRRXXXAXXXXXXXXXXXXXXLXXXXXEXXXXXXXXXXXXXPSXXAAXAXXXXXXXXXXXXXXXXWXXXXXXYXXXXXXXXXXXXXXXXXXXXXXXXXXXXXXXXXXXKY

SEQ ID NO: 98520 - protein, 31 aa, Artificial sequence
  protein pattern
  Variant (2)..(3): Xaa in position 2 to 3 is any amino acid
  Variant (4)..(4): Xaa in position 4 is any or no amino acid
  Variant (6)..(6): Xaa in position 6 is Ile, Leu, Met or Val
  Variant (7)..(7): Xaa in position 7 is Ile or Val
  Variant (8)..(8): Xaa in position 8 is any amino acid
  Variant (9)..(9): Xaa in position 9 is Ile or Val
  Variant (10)..(14): Xaa in position 10 to 14 is any amino acid
  Variant (16)..(17): Xaa in position 16 to 17 is any amino acid
  Variant (18)..(18): Xaa in position 18 is Asp or Glu
  Variant (21)..(21): Xaa in position 21 is Phe or Tyr
  Variant (23)..(23): Xaa in position 23 is Ala, Cys or Thr
  Variant (24)..(24): Xaa in position 24 is Ile, Leu, Met or Val
  Variant (25)..(26): Xaa in position 25 to 26 is any amino acid
  Variant (27)..(27): Xaa in position 27 is Ile, Met or Val
  Variant (29)..(29): Xaa in position 29 is any amino acid
  Variant (30)..(30): Xaa in position 30 is Phe or Tyr
LXXXWXXXXXXXXXLXXXTLXLXXXXXDXXL

SEQ ID NO: 98521 - protein, 52 aa, Artificial sequence
  protein pattern
  Variant (5)..(5): Xaa in position 5 is Ile, Met or Val
  Variant (6)..(6): Xaa in position 6 is any amino acid
  Variant (7)..(7): Xaa in position 7 is Ala, Cys, Ser or Val
  Variant (9)..(9): Xaa in position 9 is any amino acid
  Variant (10)..(10): Xaa in position 10 is Ile or Val
  Variant (11)..(16): Xaa in position 11 to 16 is any amino acid
  Variant (17)..(17): Xaa in position 17 is Ala, Cys, Ser or Thr
  Variant (19)..(19): Xaa in position 19 is any amino acid
  Variant (20)..(20): Xaa in position 20 is Ala, Gly, Ser or Thr
  Variant (21)..(24): Xaa in position 21 to 24 is any amino acid
  Variant (25)..(25): Xaa in position 25 is Asp, Glu or Gln
  Variant (26)..(26): Xaa in position 26 is Phe, Ile or Val
  Variant (27)..(29): Xaa in position 27 to 29 is any amino acid
  Variant (31)..(32): Xaa in position 31 to 32 is any amino acid
  Variant (33)..(34): Xaa in position 33 to 34 is Ile, Leu, Met or Val
  Variant (35)..(36): Xaa in position 35 to 36 is any amino acid
  Variant (38)..(38): Xaa in position 38 is any amino acid
  Variant (39)..(39): Xaa in position 39 is Phe, Trp or Tyr
  Variant (40)..(40): Xaa in position 40 is any amino acid
  Variant (41)..(41): Xaa in position 41 is Phe, Ile, Leu or Met
  Variant (42)..(42): Xaa in position 42 is Ala, Gly, Asn, Ser or Thr
  Variant (43)..(43): Xaa in position 43 is any amino acid
  Variant (44)..(44): Xaa in position 44 is Ala or Pro
  Variant (45)..(45): Xaa in position 45 is any amino acid
  Variant (46)..(46): Xaa in position 46 is Ala, Cys, Pro, Thr or Val
  Variant (47)..(48): Xaa in position 47 to 48 is any amino acid
  Variant (50)..(50): Xaa in position 50 is any amino acid
  Variant (51)..(51): Xaa in position 51 is any or no amino acid
KYEEXXXPXXXXXXXXXDXXXXXXXXXXXEXXXXXXLXXXXXXXXXXXFXXR

SEQ ID NO: 98522 - DNA, 570 bp, Arabidopsis thaliana
  CDS (1)..(570)
atgaaagcacccaacatggagacgataacggagtctctagagaaatcgatgatgaattgttctctgaatgatcggagaagaagggtcgtcggagatgggtttgggagatcgtcgagcaacgaacacatgactccgatctcagatagaacattggagctcaattctcacttatctcttccttgtcactgggaacagtgtcttgatcttaagacaggagagatttactacataaactggaaaaacggaatgagagtgaaagaggatccaaggaaagtgatgaatgcagatcctgacagtggagactcatatggaaccgtgtgttcagaagaagatagctcatattacgacagcgaagagtcttcatcagagtcatctccatcatcaagagagaatcataaagaagaagaagaagaagaagaagaggaggaagaagaagaagaagatgtgctagtggttgctggttgcaaagcttgtttcatgtacttcatggttcctaagcttgttgaggactgtcctaaatgtgcagcacagcttcttcactttgatcgacctcattctgcatcttcttga

SEQ ID NO: 98523 - protein, 189 aa, Arabidopsis thaliana
MKAPNMETITESLEKSMMNCSLNDRRRRVVGDGFGRSSSNEHMTPISDRTLELNSHLSLPCHWEQCLDLKTGEIYYINWKNGMRVKEDPRKVMNADPDSGDSYGTVCSEEDSSYYDSEESSSESSPSSRENHKEEEEEEEEEEEEEEDVLVVAGCKACFMYFMVPKLVEDCPKCAAQLLHFDRPHSASS

SEQ ID NO: 98524 - DNA, 868 bp, Glycine max
  CDS (176)..(769)
atatcgatcccaagcctccctccgtagccagttagttctcatttctaatattgcttccaaaatctctctctctctctctctctggggggtatgtgtgttgttcagtacaactagttttggtatagctagctgctcttcatttgattttgctcgcagtcgcagctccaatccaaatatggaggcgatcactgcttccttagagaggtctcttcaaaactgttccttaaacaataccaacaacaaccatcagcagagcaggaggccggaagaagatgatgggtcagctacagatggaggcataggaatctcatcctgctcagacgatgtcccggacccggataatagtcatatctccgacaccactttagagctcaactcccacatctcactcccttatcattgggagcaatgcctagatttaaagacgggggaaatatattacattaactggaggaacgggatgaaagcaaaggaggatccaagaagcaggagggcagattatagtgtaagtagggattgtgagtccgaagaagaagaagaagaagagagctggtacgacagcgaagagtcttcatcggagtcatgcccttcttcatccaaagagcactatgatgagggacaggtagagaaacagaataacaatgttctggtggtggctgggtgcaagggctgtctcatgtatttcatggtgcccaaacaggttgaagactgcccaaaatgtactggtcaactcctccacttcgatcgatccgaaaatggctctccatgattaattcccactcctcttttctccttgtgtttccttcttcgcttctcttttctttttgctgtgactgtcaaattaaactatagttctctctttttttgt

SEQ ID NO: 98525 - protein, 197 aa, Glycine max
MEAITASLERSLQNCSLNNTNNNHQQSRRPEEDDGSATDGGIGISSCSDDVPDPDNSHISDTTLELNSHISLPYHWEQCLDLKTGEIYYINWRNGMKAKEDPRSRRADYSVSRDCESEEEEEEESWYDSEESSSESCPSSSKEHYDEGQVEKQNNNVLVVAGCKGCLMYFMVPKQVEDCPKCTGQLLHFDRSENGSP

SEQ ID NO: 98526 - DNA, 531 bp, Arabidopsis thaliana
  CDS (1)..(531)
atggcggatataacagaatatctagagagatcgatgcagaattgttcacttattgatcggagaagtagtatgggagatggatttggtatgagcgatgaacatatcccgatctcagatagattcttggagctcagttctcacttctctgttccttctcatttggaacagtgtcttgatcttaagacaggagagatttactacagaagctggaatagtggaatgagagtgaaagaagatccgagaaaatcgatgagtcgtggtaactatgcagaccaatccagtggtgaatcgtctggaacagttttttcatcagaagaagttagctcgtattatgaaagcgaagagtcttcatcagagtcgtctccttcatcaagaaagtatcacaaagaggaacaagacgaagatgttcttgtggtagctggttgcaaagcttgtttaatgtatttcatggtacctaaactctttaaggattgccccaaatgtgcaactcagcttctccactttgatcaacttcactctacttctccttga

SEQ ID NO: 98527 - protein, 176 aa, Arabidopsis thaliana
MADITEYLERSMQNCSLIDRRSSMGDGFGMSDEHIPISDRFLELSSHFSVPSHLEQCLDLKTGEIYYRSWNSGMRVKEDPRKSMSRGNYADQSSGESSGTVFSSEEVSSYYESEESSSESSPSSRKYHKEEQDEDVLVVAGCKACLMYFMVPKLFKDCPKCATQLLHFDQLHSTSP

SEQ ID NO: 98528 - DNA, 810 bp, Oryza sativa subsp
  CDS (1)..(810)
atgactgccccgaacatcgagatgatcgcctcgtcgctgcgcaactgctccctcaacggcgggggaggaggaggaggagggcggcgcagggggaggcgcgcggcggcggcggaggggagcgacgacagcgagggggtcaccgtcgagctcaactccgaggtcgccctgccctaccactgggagcagtgcctcgacatccggacggggcaagtttactacatcaactgggaggacggcacccggacgaccatcgatccgcgctcgtcgtcggcgtactcgccgtcgccggcgtcgcggtccgcgtcgtcctcctcccgccgctgctcgcgcgcgcggggccgcggcggcggaggcggcgccgccgccgcggcgtcgaccaccacgtcgtcggggtacacctccgtgtcgtccgtgggcgcggtcaccgcggcggcggcggcgtggcgctcgcacgacagcagcgggcacggctacggctacggcagctatggctacggctacggctacgacggccgcgacggcgacgacgaggagagcagcagcagcagtagcagcagcagcagcagcagcagcgccagcagcagccggggctccgccgtgtcgtccacgctctcgtcgttctcccccaccgacgagtcggcctccggcgccggcagcggctacgccgtcggcgacaacggcgcccacgtcctcgtcgccgccggctgccgggcttgcttcatgtacttcatggtgccgaagaccgccgacgtgtgccccaagtgcggcagctccggcctcctccacctcagccgcaacggctacgtctga

SEQ ID NO: 98529 - protein, 269 aa, Oryza sativa subsp
MTAPNIEMIASSLRNCSLNGGGGGGGGRRRGRRAAAAEGSDDSEGVTVELNSEVALPYHWEQCLDIRTGQVYYINWEDGTRTTIDPRSSSAYSPSPASRSASSSSRRCSRARGRGGGGGAAAAASTTTSSGYTSVSSVGAVTAAAAAWRSHDSSGHGYGYGSYGYGYGYDGRDGDDEESSSSSSSSSSSSSASSSRGSAVSSTLSSFSPTDESASGAGSGYAVGDNGAHVLVAAGCRACFMYFMVPKTADVCPKCGSSGLLHLSRNGYV

SEQ ID NO: 98530 - DNA, 555 bp, Arabidopsis thaliana
  CDS (1)..(555)
atggagacgataacggagtctctagagaaatcgatgatgaattgttctctgaatgatcggagaagaagggtcgtcggagatgggtttgggagatcgtcgagcaacgaacacatgactccgatctcagatagaacattggagctcaattctcacttatctcttccttgtcactgggaacagtgtcttgatcttaagacaggagagatttactacataaactggaaaaacggaatgagagtgaaagaggatccaaggaaagtgatgaatgcagatcctgacagtggagactcatatggaaccgtgtgttcagaagaagatagctcatattacgacagcgaagagtcttcatcagagtcatctccatcatcaagagagaatcataaagaagaagaagaagaagaagaagaggaggaagaagaagaagaagatgtgctagtggttgctggttgcaaagcttgtttcatgtacttcatggttcctaagcttgttgaggactgtcctaaatgtgcagcacagcttcttcactttgatcgacctcattctgcatcttcttga

SEQ ID NO: 98531 - protein, 184 aa, Arabidopsis thaliana
METITESLEKSMMNCSLNDRRRRVVGDGFGRSSSNEHMTPISDRTLELNSHLSLPCHWEQCLDLKTGEIYYINWKNGMRVKEDPRKVMNADPDSGDSYGTVCSEEDSSYYDSEESSSESSPSSRENHKEEEEEEEEEEEEEEDVLVVAGCKACFMYFMVPKLVEDCPKCAAQLLHFDRPHSASS

SEQ ID NO: 98532 - DNA, 1002 bp, Oryza sativa subsp
  CDS (1)..(1002)
atggcaccgctgcggcagcaacagcaaaagcaaattcctttctcctcctccttctcctcctcctcctcctcctcctccttcttcttcttcttcttcttcttcctcgccgtccgtttggttcttgttggagagggggaggggtgggggggtggggtggtggtggtggtggtggacttgatgactgccccgaacatcgagatgatcgcctcgtcgctgcgcaactgctccctcaacggcgggggaggaggaggaggagggcggcgcagggggaggcgcgcggcggcggcggaggggagcgacgacagcgagggggtcaccgtcgagctcaactccgaggtcgccctgccctaccactgggagcagtgcctcgacatccggacggggcaagtttactacatcaactgggaggacggcacccggacgaccatcgatccgcgctcgtcgtcggcgtactcgccgtcgccggcgtcgcggtccgcgtcgtcctcctcccgccgctgctcgcgcgcgcggggccgcggcggcggaggcggcgccgccgccgcggcgtcgaccaccacgtcgtcggggtacacctccgtgtcgtccgtgggcgcggtcaccgcggcggcggcggcgtggcgctcgcacgacagcagcgggcacggctacggctacggctacggctacggcagctatggctacggctacggctacgacggccgcgacggcgacgacgaggagagcagcagcagcagtagcagcagcagcagcagcagcagcagcgccagcagcagccggggctccgccgtgtcgtccacgctctcgtcgttctcccccaccgacgagtcggcctccggcgccggcagcggctacgccgtcggcgacaacggcgcccacgtcctcgtcgccgccggctgccgggcttgcttcatgtacttcatggtgccgaagaccgccgacgtgtgccccaagtgcggcagctccggcctcctccacctcagccgcaacggctacgtctga

SEQ ID NO: 98533 - protein, 333 aa, Oryza sativa subsp
MAPLRQQQQKQIPFSSSFSSSSSSSSFFFFFFFFLAVRLVLVGEGEGWGGGVVVVVVDLMTAPNIEMIASSLRNCSLNGGGGGGGGRRRGRRAAAAEGSDDSEGVTVELNSEVALPYHWEQCLDIRTGQVYYINWEDGTRTTIDPRSSSAYSPSPASRSASSSSRRCSRARGRGGGGGAAAAASTTTSSGYTSVSSVGAVTAAAAAWRSHDSSGHGYGYGYGYGSYGYGYGYDGRDGDDEESSSSSSSSSSSSSSASSSRGSAVSSTLSSFSPTDESASGAGSGYAVGDNGAHVLVAAGCRACFMYFMVPKTADVCPKCGSSGLLHLSRNGYV

SEQ ID NO: 98534 - DNA, 468 bp, Humulus japonicus
  CDS (1)..(468)
atgaagaacttgcagcatcacaacaaaatcatcaccttcaaaacccctgacgacagcaccactttagagcttaactcccatatctctctcccttaccattgggaacaatgtcttgatttaaagacgggtgagatttactacataaactggaggaacggtatgaaagcaaaagaagatccgaggacaacaataacagagtataatagcaacggtagtaatggagattattattattcggaagaagatagctcgtacgacagtgaagaatcgtcgtctgagtcgtcccctccacctgcgacaacctcgagagagtctcagtatcgaggagcagagaaggaccatgttttggtagtgggagggtgcaagagctgtttcatgtatttcatggtacctaaacaggtccaagagtgccccaaatgttgtggtcaacctcttcattttgatcgatctcaaagtggctctcaatga

SEQ ID NO: 98535 - protein, 155 aa, Humulus japonicus
MKNLQHHNKIITFKTPDDSTTLELNSHISLPYHWEQCLDLKTGEIYYINWRNGMKAKEDPRTTITEYNSNGSNGDYYYSEEDSSYDSEESSSESSPPPATTSRESQYRGAEKDHVLVVGGCKSCFMYFMVPKQVQECPKCCGQPLHFDRSQSGSQ

SEQ ID NO: 98536 - DNA, 825 bp, Oryza sativa
  CDS (1)..(825)
atgactgccccgaacatcgagatgatcgcctcgtcgctgcgcaactgctccctcaacggcgggggaggaggaggaggagggcggcgcagggggaggcgcgcggcggcggcggaggggagcgacgacagcgagggggtcaccgtcgagctcaactccgaggtcgccctgccctaccactgggagcagtgcctcgacatccggacggggcaagtttactacatcaactgggaggacggcacccggacgaccatcgatccgcgctcgtcgtcggcgtactcgccgtcgccggcgtcgcggtccgcgtcgtcctcctcccgccgctgctcgcgcgcgcggggccgcggcggcggaggcggcgccgccgccgcggcgtcgaccaccacgtcgtcggggtacacctccgtgtcgtccgtgggcgcggtcaccgcggcggcggcggcgtggcgctcgcacgacagcagcgggcacggctacggctacggctacggctacggcagctatggctacggctacggctacgacggccgcgacggcgacgacgaggagagcagcagcagcagtagcagcagcagcagcagcagcagcagcgccagcagcagccggggctccgccgtgtcgtccacgctctcgtcgttctcccccaccgacgagtcggcctccggcgccggcagcggctacgccgtcggcgacaacggcgcccacgtcctcgtcgccgccggctgccgggcttgcttcatgtacttcatggtgccgaagaccgccgacgtgtgccccaagtgcggcagctccggcctcctccacctcagccgcaacggctacgtctga

SEQ ID NO: 98537 - protein, 274 aa, Oryza sativa
MTAPNIEMIASSLRNCSLNGGGGGGGGRRRGRRAAAAEGSDDSEGVTVELNSEVALPYHWEQCLDIRTGQVYYINWEDGTRTTIDPRSSSAYSPSPASRSASSSSRRCSRARGRGGGGGAAAAASTTTSSGYTSVSSVGAVTAAAAAWRSHDSSGHGYGYGYGYGSYGYGYGYDGRDGDDEESSSSSSSSSSSSSSASSSRGSAVSSTLSSFSPTDESASGAGSGYAVGDNGAHVLVAAGCRACFMYFMVPKTADVCPKCGSSGLLHLSRNGYV

SEQ ID NO: 98538 - DNA, 594 bp, Brassica napus
  CDS (1)..(594)
atgaaggcaccgaacatggagacgataacaaaatctcttgagaaatcaatgcaaaatttttctctgagtgatcggagaagaagagtcggagacaggttcggaagatcgtcaacgacgaccgaagagagcagcaacgaacatgttcctccgatctcagacagaacactggagcttaactctcacatatctcttccttgtcactgggaacagtgtcttgatctcaagacaggagagatttactacataaactggaaaaatggaatgagagtgaaagaggatccaagaaaggtgatgatgaatgcagataatgacagtggagaatcatgtggaacattttgctcagaagaagatagctcatattatgacagtgaggagtcttcatccgagtcttctccatcatcaagagagaatcagaaagaggaagaggaggaggatgaagaagaagaagaagaagaggaagaggaagctgtgcttgttgttgctggatgcaaagcttgtttcatgtacttcatggttcctaagcttgtcgaggactgccccaaatgtgctgcacagcttgttcactttgatcgacctcattctgcctctccttga

SEQ ID NO: 98539 - protein, 197 aa, Brassica napus
MKAPNMETITKSLEKSMQNFSLSDRRRRVGDRFGRSSTTTEESSNEHVPPISDRTLELNSHISLPCHWEQCLDLKTGEIYYINWKNGMRVKEDPRKVMMNADNDSGESCGTFCSEEDSSYYDSEESSSESSPSSRENQKEEEEEDEEEEEEEEEEAVLVVAGCKACFMYFMVPKLVEDCPKCAAQLVHFDRPHSASP

SEQ ID NO: 98540 - DNA, 591 bp, Brassica napus
  CDS (1)..(591)
atgaaggcacctaacatggagacgataacgaaatctctggagaatatttcttttaatgatcggagaagaagagccggagatgggtttggaagatcgtcgtcgaggacagaagagagcagcaatgaacatattcctccgatctcagatagaacactggagctcaattctcacttatctctcccttctcactgggaacagtgtcttgatctcaagacaggagagatttactacatcaactggaaaaatggaatgagagtgaaagaggatccaaggaaagtgatgataaatgcagatagtgacagtggagaatcatatggaacattgtgctcagaagaagatagctcatattacgacagtgaggagtcttcatcagcgtcatctccatcatcaaatgagaatcaaaaagaggatgaggatgaagatgatgaagacaaagacgaggaagatgaaggtgaagaagaagatgtgattgttgttgctggatgcaaagcttgtttcatgtacttcatggttcctaagcttgtagaggactgtcccaaatgtgctgcacagcttgttcactttgatcgacctcattctgcttcttcttga

SEQ ID NO: 98541 - protein, 196 aa, Brassica napus
MKAPNMETITKSLENISFNDRRRRAGDGFGRSSSRTEESSNEHIPPISDRTLELNSHLSLPSHWEQCLDLKTGEIYYINWKNGMRVKEDPRKVMINADSDSGESYGTLCSEEDSSYYDSEESSSASSPSSNENQKEDEDEDDEDKDEEDEGEEEDVIVVAGCKACFMYFMVPKLVEDCPKCAAQLVHFDRPHSASS

SEQ ID NO: 98542 - DNA, 537 bp, Brassica napus
  CDS (1)..(537)
atggatatggcgacggtaacgaaatatctggagagatcggtgcagaattcttcactgagtaatcggagaaggagtttcgaagatgggcttagtatgacggacgagagcgagggtgatcatgtcccgatctcagatagatccttggagctcaattctcgtatctctattccttcacatttggaacagtgtcttgatcttaagacaggagattttttctacataaaccggaacagcagaatgagagtgatggaagatccaaggaactcggttagctacaacaatgcaggtgaatttagtggagagtctgatgtaactgtgttttcagaagatgacagcttgtcctattatgagagcgaagagtcttcatcagagtcatcaagggagagtcacatagaagaggaagaagaacaagttcttgtggttgctggttgcaaagcttgtttaatgtatttcatggtacctaaactcttaaatgattgccccaaatgttcagctcatcttctccgctttgatcgacctcactctgcttctccttaa

SEQ ID NO: 98543 - protein, 178 aa, Brassica napus
MDMATVTKYLERSVQNSSLSNRRRSFEDGLSMTDESEGDHVPISDRSLELNSRISIPSHLEQCLDLKTGDFFYINRNSRMRVMEDPRNSVSYNNAGEFSGESDVTVFSEDDSLSYYESEESSSESSRESHIEEEEEQVLVVAGCKACLMYFMVPKLLNDCPKCSAHLLRFDRPHSASP

SEQ ID NO: 98544 - DNA, 591 bp, Brassica napus
  CDS (1)..(591)
atgaaggcacctaacatggagacgataacgaaatctcttgagaatatttcttttaatgatcggagaagaagagccgaagatgggtttggaagatcgtcgtcgaggacagaagagagcagcaatgaacatattcctccgatctcagatagaacactagagctcaattctcacttatctctcccttctcactgggaacagtgtcttgatctcaagacaggagagatttactacatcaactggaaaaatggaatgagagtgaaagaggatccaaggaaagtgatgataaatgcagatagtgacagtggagaatcatatggaacattgtgctcagaagaagatagctcatattacgacagtgaggagtcttcatcagcgtcatctccatcatcaagtgagaatcaaaaagaggatgaggatgaagatgatgaagacaaagaagaggaagatgaaggcgaagaagaagatgtgcttgtggttgctggatgcaaagcttgtttcatgtactacatggttcctaagcttgtagaggactgtcccaaatgtgctgcacagcttattcactttgatcgacctcattctgcttcttcttga

SEQ ID NO: 98545 - protein, 196 aa, Brassica napus
MKAPNMETITKSLENISFNDRRRRAEDGFGRSSSRTEESSNEHIPPISDRTLELNSHLSLPSHWEQCLDLKTGEIYYINWKNGMRVKEDPRKVMINADSDSGESYGTLCSEEDSSYYDSEESSSASSPSSSENQKEDEDEDDEDKEEEDEGEEEDVLVVAGCKACFMYYMVPKLVEDCPKCAAQLIHFDRPHSASS

SEQ ID NO: 98546 - DNA, 21 bp, Artificial sequence
  primer
atgaaagcacccaacatggag

SEQ ID NO: 98547 - DNA, 20 bp, Artificial sequence
  primer
tcaagaagatgcagaatgag

SEQ ID NO: 98548 - protein, 272 aa, Artificial sequence
  consensus sequence
  Variant (2)..(7): Xaa in position 2 to 7 is any amino acid
  Variant (8)..(19): Xaa in position 8 to 19 is any or no amino acid
  Variant (21)..(21): Xaa in position 21 is any amino acid
  Variant (22)..(27): Xaa in position 22 to 27 is any or no amino acid
  Variant (29)..(29): Xaa in position 29 is any amino acid
  Variant (30)..(48): Xaa in position 30 to 48 is any or no amino acid
  Variant (50)..(50): Xaa in position 50 is any amino acid
  Variant (55)..(57): Xaa in position 55 to 57 is any amino acid
  Variant (60)..(60): Xaa in position 60 is any amino acid
  Variant (68)..(69): Xaa in position 68 to 69 is any amino acid
  Variant (72)..(73): Xaa in position 72 to 73 is any amino acid
  Variant (79)..(80): Xaa in position 79 to 80 is any amino acid
  Variant (82)..(82): Xaa in position 82 is any amino acid
  Variant (84)..(86): Xaa in position 84 to 86 is any amino acid
  Variant (90)..(96): Xaa in position 90 to 96 is any amino acid
  Variant (97)..(135): Xaa in position 97 to 135 is any or no amino acid
  Variant (137)..(138): Xaa in position 137 to 138 is any amino acid
  Variant (140)..(140): Xaa in position 140 is any amino acid
  Variant (142)..(152): Xaa in position 142 to 152 is any amino acid
  Variant (153)..(153): Xaa in position 153 is any or no amino acid
  Variant (156)..(178): Xaa in position 156 to 178 is any amino acid
  Variant (179)..(182): Xaa in position 179 to 182 is any or no amino acid
  Variant (188)..(188): Xaa in position 188 is any amino acid
  Variant (191)..(191): Xaa in position 191 is any amino acid
  Variant (194)..(204): Xaa in position 194 to 204 is any amino acid
  Variant (205)..(236): Xaa in position 205 to 236 is any or no amino acid
  Variant (240)..(240): Xaa in position 240 is any amino acid
  Variant (244)..(244): Xaa in position 244 is any amino acid
  Variant (247)..(247): Xaa in position 247 is any amino acid
  Variant (255)..(258): Xaa in position 255 to 258 is any amino acid
  Variant (263)..(265): Xaa in position 263 to 265 is any amino acid
  Variant (266)..(266): Xaa in position 266 is any or no amino acid
  Variant (268)..(268): Xaa in position 268 is any amino acid
  Variant (270)..(271): Xaa in position 270 to 271 is any amino acid
SXXXXXXXXXXXXXXXXXXGXXXXXXXGXXXXXXXXXXXXXXXXXXXXTXELNSXXXLPXHWEQCLDXXTGXXYYINWXXGXRXXXDPRXXXXXXXXXXXXXXXXXXXXXXXXXXXXXXXXXXXXXXXXXXXXXXSXXSXGXXXXXXXXXXXXDSXXXXXXXXXXXXXXXXXXXXXXXXXXXEESSSXSSXSSXXXXXXXXXXXXXXXXXXXXXXXXXXXXXXXXXXXXXXXXXXXVLVXAGCXACXMYFMVPKXXXXCPKCXXXXLXHXXR

SEQ ID NO: 98549 - protein, 52 aa, Artificial sequence
  protein pattern
  Variant (2)..(2): Xaa in position 2 is any amino acid
  Variant (3)..(4): Xaa in position 3 to 4 is any or no amino acid
  Variant (6)..(6): Xaa in position 6 is Leu or Val
  Variant (11)..(11): Xaa in position 11 is Glu or His
  Variant (12)..(12): Xaa in position 12 is Ile, Leu or Val
  Variant (13)..(13): Xaa in position 13 is Ala or Ser
  Variant (16)..(16): Xaa in position 16 is any amino acid
  Variant (24)..(24): Xaa in position 24 is Ile or Leu
  Variant (25)..(25): Xaa in position 25 is Lys or Arg
  Variant (28)..(28): Xaa in position 28 is Glu or Gln
  Variant (29)..(29): Xaa in position 29 is Ile or Val
  Variant (35)..(35): Xaa in position 35 is Glu, Lys or Arg
  Variant (36)..(36): Xaa in position 36 is Asp or Asn
  Variant (38)..(38): Xaa in position 38 is any amino acid
  Variant (39)..(39): Xaa in position 39 is Lys or Arg
  Variant (40)..(40): Xaa in position 40 is Ala, Thr or Val
  Variant (41)..(42): Xaa in position 41 to 42 is any amino acid
  Variant (46)..(51): Xaa in position 46 to 51 is any amino acid
  Variant (52)..(52): Xaa in position 52 is Asp, Asn, Pro or Ser
SXXXTXELNSXXXLPXHWEQCLDXXTGXXYYINWXXGXXXXXDPRXXXXXXX

SEQ ID NO: 98550 - protein, 28 aa, Artificial sequence
  protein pattern
  Variant (4)..(4): Xaa in position 4 is Ala or Val
  Variant (8)..(8): Xaa in position 8 is Lys or Arg
  Variant (9)..(9): Xaa in position 9 is Ala or Gly
  Variant (11)..(11): Xaa in position 11 is Phe or Leu
  Variant (14)..(14): Xaa in position 14 is Phe or Tyr
  Variant (19)..(21): Xaa in position 19 to 21 is any amino acid
  Variant (22)..(22): Xaa in position 22 is Asp or Val
  Variant (27)..(28): Xaa in position 27 to 28 is Ala, Gly, Ser or Thr
VLVXAGCXXCXMYXMVPKXXXXCPKCXX

SEQ ID NO: 98551 - protein, 14 aa, Artificial sequence
  protein pattern
  Variant (2)..(2): Xaa in position 2 is Phe or Tyr
  Variant (3)..(3): Xaa in position 3 is any amino acid
  Variant (4)..(4): Xaa in position 4 is Asp, Glu or Pro
  Variant (5)..(5): Xaa in position 5 is Ser or Thr
  Variant (6)..(6): Xaa in position 6 is Asp or Glu
  Variant (9)..(9): Xaa in position 9 is any or no amino acid
  Variant (11)..(13): Xaa in position 11 to 13 is any or no amino acid
SXXXXXESXSXXXS

SEQ ID NO: 98552 - protein, 30 aa, Artificial sequence
  protein pattern
  Variant (2)..(4): Xaa in position 2 to 4 is any amino acid
  Variant (5)..(5): Xaa in position 5 is Glu or Ser
  Variant (6)..(6): Xaa in position 6 is any amino acid
  Variant (7)..(7): Xaa in position 7 is Glu, Gly or Ser
  Variant (8)..(9): Xaa in position 8 to 9 is any amino acid
  Variant (10)..(10): Xaa in position 10 is Asn, Ser or Thr
  Variant (11)..(11): Xaa in position 11 is any amino acid
  Variant (12)..(12): Xaa in position 12 is Ala, Asn or Ser
  Variant (13)..(16): Xaa in position 13 to 16 is any amino acid
  Variant (18)..(19): Xaa in position 18 to 19 is any amino acid
  Variant (20)..(22): Xaa in position 20 to 22 is any or no amino acid
  Variant (24)..(25): Xaa in position 24 to 25 is any amino acid
  Variant (26)..(26): Xaa in position 26 is Gly or Ser
  Variant (27)..(27): Xaa in position 27 is any amino acid
  Variant (28)..(28): Xaa in position 28 is Gly, Ser or Thr
  Variant (29)..(29): Xaa in position 29 is any amino acid
  Variant (30)..(30): Xaa in position 30 is Glu, Gly, Ser or Thr
TXXXXXXXXXXXXXXXRXXXXXDXXXXXXX

SEQ ID NO: 98553 - DNA, 954 bp, Escherichia coli
  CDS (1)..(954): transl_table=11
atgacggacaaattgacctcccttcgtcagtacaccaccgtagtggccgacactggggacatcgcggcaatgaagctgtatcaaccgcaggatgccacaaccaacccttctctcattcttaacgcagcgcagattccggaataccgtaagttgattgatgatgctgtcgcctgggcgaaacagcagagcaacgatcgcgcgcagcagatcgtggacgcgaccgacaaactggcagtaaatattggtctggaaatcctgaaactggttccgggccgtatctcaactgaagttgatgcgcgtctttcctatgacaccgaagcgtcaattgcgaaagcaaaacgcctgatcaaactctacaacgatgctggtattagcaacgatcgtattctgatcaaactggcttctacctggcagggtatccgtgctgcagaacagctggaaaaagaaggcatcaactgtaacctgaccctgctgttctccttcgctcaggctcgtgcttgtgcggaagcgggcgtgttcctgatctcgccgtttgttggccgtattcttgactggtacaaagcgaataccgataagaaagagtacgctccggcagaagatccgggcgtggtttctgtatctgaaatctaccagtactacaaagagcacggttatgaaaccgtggttatgggcgcaagcttccgtaacatcggcgaaattctggaactggcaggctgcgaccgtctgaccatcgcaccggcactgctgaaagagctggcggagagcgaaggggctatcgaacgtaaactgtcttacaccggcgaagtgaaagcgcgtccggcgcgtatcactgagtccgagttcctgtggcagcacaaccaggatccaatggcagtagataaactggcggaaggtatccgtaagtttgctattgaccaggaaaaactggaaaaaatgatcggcgatctgctgtaa

SEQ ID NO: 98554 - protein, 317 aa, Escherichia coli
MTDKLTSLRQYTTVVADTGDIAAMKLYQPQDATTNPSLILNAAQIPEYRKLIDDAVAWAKQQSNDRAQQIVDATDKLAVNIGLEILKLVPGRISTEVDARLSYDTEASIAKAKRLIKLYNDAGISNDRILIKLASTWQGIRAAEQLEKEGINCNLTLLFSFAQARACAEAGVFLISPFVGRILDWYKANTDKKEYAPAEDPGVVSVSEIYQYYKEHGYETVVMGASFRNIGEILELAGCDRLTIAPALLKELAESEGAIERKLSYTGEVKARPARITESEFLWQHNQDPMAVDKLAEGIRKFAIDQEKLEKMIGDLL

SEQ ID NO: 98555 - DNA, 1810 bp, Glycine max
  CDS (65)..(1261)
ctcgagccgaatcggctcgaggtgtgattgagtttggctgtcataatctctctctcatccgaaaatgtcactcaccttgcaaactccgccttctacaactctctcttctgcatctcccattcacagaacaataacaagatacaccacattctccttctcgcttcgtcctccaacaactcttcacttcaatccccacaggtccctccctctaattcgcgcttccaattcttctatcaatgccgcttcgaccactgaactggacgctgtgtccgccttcagcgagatcgttcccgacaccgtcgttttcgatgatttcgaaaagtttcctccaactgctgctactgttagttcatcgcttctcttgggaatatgtggccttccagacaccatttttaggaatgctgtggaaatggctttagctgattctgagtgttatggacttgaaaatcctaacgcgcgattgtcttgttttgtcaacaaggctttcgcgaatatcggtagtgacatggcaaagcttgtccctggccgtgtttcgacagaagtggatgcgcggcttgcttatgacacacatgccattatcaggaaggtgcatgacctgttgaagttgtacaatgatagcaatgtacctccgcaacgtctgttgtttaaaattccttccacttggcaaggaatagaggctgcaaggttgctggaatccgaaggcatacagacacatttgacctttgtctacagttttgctcaagctgcagctgcagctcaagctggtgcttctgtcattcaaatttttgttggtcgcataagggattgggcacgtaatcattctggtgacacagagatagaatctgctcagctaagaggagaggatccagggttggcattggtgacaaaagcttacaattatattcacaaatatggacataagtcaaagttgatggcagcagcagttcgcaacaaacaggacctatttagtcttctgggggttgactatatcatagctcctttaaaggtattgcagtctctcaaagaatctgttgcttctcctgatgagaagtactcttttgttaggaggttatcccctcagtctgctgccaagtacacatttagtgatgaagagcttgttagatgggacgaagatagcctctcaaaggccatggggcctgcagctgtgcagcttctggctgctggactggatggccatgctgatcaagcaaagcgggtggaagagttatttgggaaaatttggccaccaccaaatgtatgattcgacgacttctttatgtcgcacgagagtcttttgcctgatggatcaataaacataatacacgactgatgaagggaatatttcgttggttttctttccctcttaaccatgaagtcttgaacaatttccttaatgtgaagcacgcggttcctaaatgcacattttgttatttttctctttcgtttgttgcagttgcatttgtcttattgactgtctatctatggttattctctaagtaaggtcggatactcgtacaaactaaggccgtaggtagggtcggtcaaaacccggcctttccagtgttacctattgaccaggcctggacagcagttaattgggtcacacttgggctggctttgtcgaagcacataaaatgattggcaattgcttcctgcacctccattttgcttcctgtgcctaatctctggaaatgtaaaatcaaacataaaaataattctaggtagtaaaataaaaagggagaagtttaggtaggaaaatcaaaatagacattattacatgtatgaaaaatatatttcaattttttttttt

SEQ ID NO: 98556 - protein, 398 aa, Glycine max
MSLTLQTPPSTTLSSASPIHRTITRYTTFSFSLRPPTTLHFNPHRSLPLIRASNSSINAASTTELDAVSAFSEIVPDTVVFDDFEKFPPTAATVSSSLLLGICGLPDTIFRNAVEMALADSECYGLENPNARLSCFVNKAFANIGSDMAKLVPGRVSTEVDARLAYDTHAIIRKVHDLLKLYNDSNVPPQRLLFKIPSTWQGIEAARLLESEGIQTHLTFVYSFAQAAAAAQAGASVIQIFVGRIRDWARNHSGDTEIESAQLRGEDPGLALVTKAYNYIHKYGHKSKLMAAAVRNKQDLFSLLGVDYIIAPLKVLQSLKESVASPDEKYSFVRRLSPQSAAKYTFSDEELVRWDEDSLSKAMGPAAVQLLAAGLDGHADQAKRVEELFGKIWPPPNV

SEQ ID NO: 98557 - DNA, 954 bp, Haemophilus influenzae
  CDS (1)..(954): transl_table=11
atgacaacacagttagattcacttcgtaatatgaccgtcgtcgtagctgatactggcgatattgatgcaatcaaaaaataccaaccacaagatgcaacaacaaacccatctttaattttaagtgcttcagcattaccacaatacgccccattaattgatgaagcggtagcttatgcaaaagcacaaagtgcagacaaagcacaacaattaattgatgctgaagataaattagcggtaaacatcggcttagaaattttaaaaattgttccaggacgcatttcaacagaagtagatgctcgcctttcttacgatacccaagcaacggttgaaaaagcgcgtaaattaattgcactttataatgcagcaggcatctcaaatgatcgtattttgattaaaatcgcttccacatggcaaggtatccgagctgcagaaatccttgaaaaagaaggcattaactgtaacttaaccttattattctctgaagcgcaagctcgtgcttgtgcagaagcgggcgtttacttaatttctccatttgtaggtcgtattttagactggtacaaagcaaattcagacaaaaaagaatatgcgccagcagaagatccaggcgttatttctgtcaccaaaatctataattactacaaagaatatggctacaacacagttgtgatgggcgcaagtttccgtaatgtaggtgaaattactgaacttgcaggttgcgatcgtttaaccattgcaccagcattactgaaagaattacaagaaaattcaaccgcacttgtacgcaaattagaatacaaaggcgaagtaaaagcgaaaccacaaccattaacagaagctgagttctactggcaacataacagcgatgctatggctgttgaaaaattagcagagggtattcgtaaatttgctattgaccaagaaaaattggaaaccatgctttcagcaaaactttaa

SEQ ID NO: 98558 - protein, 317 aa, Haemophilus influenzae
MTTQLDSLRNMTVVVADTGDIDAIKKYQPQDATTNPSLILSASALPQYAPLIDEAVAYAKAQSADKAQQLIDAEDKLAVNIGLEILKIVPGRISTEVDARLSYDTQATVEKARKLIALYNAAGISNDRILIKIASTWQGIRAAEILEKEGINCNLTLLFSEAQARACAEAGVYLISPFVGRILDWYKANSDKKEYAPAEDPGVISVTKIYNYYKEYGYNTVVMGASFRNVGEITELAGCDRLTIAPALLKELQENSTALVRKLEYKGEVKAKPQPLTEAEFYWQHNSDAMAVEKLAEGIRKFAIDQEKLETMLSAKL

SEQ ID NO: 98559 - DNA, 951 bp, Salmomella typhi
  CDS (1)..(951)
atgaaccagctagacggcatcaaacaattcactaccgtcgtcgccgacagcggcgacatcgagtccatccgccactaccagccgcaggatgccacgacaaatccctctttactgttaaaagccgccgggcttgagcagtatggtcatttgattgaggatgcgattgcctggggaaaaaaacacggcggtacgcaggaacagcaggttgcggcagccagcgataaactggcggttaattttggcgcggaaatactgaaaagtattcccggtcgcgtctccactgaagtcgacgcgcggttatcgttcgataaagaaaaaagtatcgagaaagcacgccatctggtggatctctaccagcagcaggatgttgataaatcacgcattctgatcaagctcgccgcgacctgggaaggtattcgcgccgccgaacagctcgaaaaagaaggcattaattgcaacctgacgttgttgttctcttttgcccaggcgcgcgcctgcgccgaagcgggcgtctatttaatctctccgttcgtgggccgaatttacgactggtatcaggcgcgtagtccgctggagccgtatgtcgtggaggaagatcccggcgtgaaatcggtacgcaatatctacgattactttaaacagcatcgctatgaaaccatcgtgatgggtgcaagtttccgccgtactgagcaaatcctcgcgctaaccggctgcgatcgactgactatctcccctaacctgcttaaagagctgaaagaaaaagaagaaccggtgatccgtaaactggtgccttcctcgcagatgttccaccgtcctacgccaatgacggaagcggagttccgctgggaacataatcaggacgcgatggccgtagagaagctgtcggaaggtatccgccttttcgccgttgaccagcgcaaactggaagacctgcttgccgccaaactataa

SEQ ID NO: 98560 - protein, 316 aa, Salmomella typhi
MNQLDGIKQFTTVVADSGDIESIRHYQPQDATTNPSLLLKAAGLEQYGHLIEDAIAWGKKHGGTQEQQVAAASDKLAVNFGAEILKSIPGRVSTEVDARLSFDKEKSIEKARHLVDLYQQQDVDKSRILIKLAATWEGIRAAEQLEKEGINCNLTLLFSFAQARACAEAGVYLISPFVGRIYDWYQARSPLEPYVVEEDPGVKSVRNIYDYFKQHRYETIVMGASFRRTEQILALTGCDRLTISPNLLKELKEKEEPVIRKLVPSSQMFHRPTPMTEAEFRWEHNQDAMAVEKLSEGIRLFAVDQRKLEDLLAAKL

SEQ ID NO: 98561 - DNA, 954 bp, Methylophilus methylotrophus
  CDS (1)..(954): transl_table=11
atggcaaacttattagatcagttgaaagcaatgacaaccatcgtggctgacactggtgatgttgaagcaatcaaaagtgttaaacctgtggatgcaaccacaaacccatctctggtgttgaaagccagccaaatcccagaatacgcaccgttgattgacactgccattgcttatgcaaaagcacaaggtggttccaaagagcaacaaattgaaaatgctgctgacaaactggcagtattgattggcgctgaaatcactaaagtggttccaggccgtatttctacagaagtagatgcacgtttgtctttcaacatcgatgcgatgattgctaaaggccgtaaattgatcaagttgtacgaagagtctggcatcagcaaagaccgcgtactgatcaaacttgcttctacctgggaaggtatcaaggctggtgagcagctggaaaaagaaggtatccagtgtaacctgacattgttattcggtttcggccaggcgcgcgcatgtgctgaagctggcgtgttcctgatctccccattcgttggccgtatcctggactggtacaaagcgaaaaatccagggactgagtacactcaagaaactgacccaggtgtagtttctgttcgtgcaatctaccagtactacaaagagcacggctacaaaaccgttgtgatgggtgcttctttccgtaacactggtgaactgattgcgctggctggttgtgaccgtttgaccgtgtccccaaacctgctgcaagaattggcagcgacagaaggtacattggctcaagtgttgaaagacggtggcaagactaaagacgtgccagctaaaatgactgaagaagaattccgcttccagttgaatcaggacgccatggcgactgaaaaactggcagaaggtattcgcggtttcgtggctgaccagaaaaaactggaagacgctttagccgcaaaactgtaa

SEQ ID NO: 98562 - protein, 317 aa, Methylophilus methylotrophus
MANLLDQLKAMTTIVADTGDVEAIKSVKPVDATTNPSLVLKASQIPEYAPLIDTAIAYAKAQGGSKEQQIENAADKLAVLIGAEITKVVPGRISTEVDARLSFNIDAMIAKGRKLIKLYEESGISKDRVLIKLASTWEGIKAGEQLEKEGIQCNLTLLFGFGQARACAEAGVFLISPFVGRILDWYKAKNPGTEYTQETDPGVVSVRAIYQYYKEHGYKTVVMGASFRNTGELIALAGCDRLTVSPNLLQELAATEGTLAQVLKDGGKTKDVPAKMTEEEFRFQLNQDAMATEKLAEGIRGFVADQKKLEDALAAKL

SEQ ID NO: 98563 - DNA, 999 bp, Bombyx mori
  CDS (1)..(999)
atgagcggtgaacctgatacgaaacggacgaaaatgagtgccttagatcaacttaaacaacattccactgttgtggcagatactggagattttgaggccatgaaagaatataagcctacagatgctactacaaatccaagcttaatactctctgctgctggtatggaacagtatcagcacattcttgataaagctattaaatatggaaaggataatggaagctccattgaagaacaagtggctgaaacttgggatatgctgagtgtgcttttggggtgtgaaatattaaaaattattcctggtcgagtatcagtggaagttgatgcaaggttatcatttgataaggatgcaagcatagcaaaagcaattaaatttatcaatttatttgctgaacatggtattaaaaaagaaagaattttaattaaattggcctccacttgggaaggaattcaagcagccaaagagttggagaagaagcatggaatccattgtaatcttacactgttgttctctttgtaccaagctattgcctgtgctgaagcaaatgttacactaatatcaccatttgttggtcgtatattggattggtatgttgaacatacaaagaagacttatgagggcaaggaagaccccggagtagtttccgtgacaaaaatttacaactattacaagaagtttggttacaagacccaagtaatgggtgcatctttccgtaataccggggaaatacgtgaattagccggctgtgatttgctgacaatcagtcctaaattactgcaagaattagctagcagtgacaagccactgaaaaaggttcttgatccaaagttggctgctttgaacgacattgagaagatatcactgactgaatctgaatttcgttggcatctcaatgaagatcacatggctactgacaaactctcagatggtataagacgatttgctgctgatactaggaagctggaatctctcatcaaaacgcttcttgctaataagtag

SEQ ID NO: 98564 - protein, 332 aa, Bombyx mori
MSGEPDTKRTKMSALDQLKQHSTVVADTGDFEAMKEYKPTDATTNPSLILSAAGMEQYQHILDKAIKYGKDNGSSIEEQVAETWDMLSVLLGCEILKIIPGRVSVEVDARLSFDKDASIAKAIKFINLFAEHGIKKERILIKLASTWEGIQAAKELEKKHGIHCNLTLLFSLYQAIACAEANVTLISPFVGRILDWYVEHTKKTYEGKEDPGVVSVTKIYNYYKKFGYKTQVMGASFRNTGEIRELAGCDLLTISPKLLQELASSDKPLKKVLDPKLAALNDIEKISLTESEFRWHLNEDHMATDKLSDGIRRFAADTRKLESLIKTLLANK

SEQ ID NO: 98565 - DNA, 1200 bp, Oryza sativa (japonica cultivar-group)
  CDS (1)..(1200)
atggcgctctccatctccacgccgccgacctcctcctccctcctgccggcctccctccaggtcggcaggtggagctcgtcggcggcgatgtcggccaggcctgtggcctttagcctccggaggccggttcttgcggcccgtgtagccgccggcggcaacgcaccgtcttcctccgtggacgaggtggtcactgagctcgatgccgtggccagcttcagcgagatcgtgccggataccgtcgtgttcgatgacttcgagaagtttgcgccgaccgccgccacggtgagctcgtcgctgctgctcggtatcgctggcctcccggatacaaagttcaagagtgctatagatacagcgttggcagacggtgaatgtaacacaatggagaagcccgaggaccggatgtcctgtttcctaaccaaggccctggcaaatgttggagctgaaatggctcatctagtccctggtcgggtgtcgactgaaatagatgctcggttggcttatgatacccaaggaattatccagagggtgcatgagcttttgaagctatacagtgatcatgatgtcttatctgaacgcctgctgttcaaaattccggctacatggcaaggtatagaggcctcgaggttgcttgaatctgaagggattcaaacacatttaacatttgtgtacagttttgcccaagcagcagctgcagcacaagccggtgcatctgttgtacagatctttgtgggacgtgttcgggattgggcaaggactcactctggcgacccagagattgatgaagctttgaagaaaggagaagatgctgggcttgctttggcgaagaaagtgtatgcctacattcacaaaaatgggtataaaacaaagttgatggctgctgccatacgcaacaagcaagatgtgtttagcctcctggggattgactacatcattgcacctctgaagatattgcagtctttggaagaatctgtcactgatactgacgtgaagtatggttatgtcccaaggctgactcctgctcttggcaaaacgtacaacttcactgaagaggagcttgtgaagtgggaccaattgagtctagcagctgcaatggggccagctgcggaagaactacttgcttctgggttggaaggatatgtgaaccaagcacgccgagtggaggaactcttcgggaagatctggcctcctccgaatgtttga

SEQ ID NO: 98566 - protein, 399 aa, Oryza sativa (japonica cultivar-group)
MALSISTPPTSSSLLPASLQVGRWSSSAAMSARPVAFSLRRPVLAARVAAGGNAPSSSVDEVVTELDAVASFSEIVPDTVVFDDFEKFAPTAATVSSSLLLGIAGLPDTKFKSAIDTALADGECNTMEKPEDRMSCFLTKALANVGAEMAHLVPGRVSTEIDARLAYDTQGIIQRVHELLKLYSDHDVLSERLLFKIPATWQGIEASRLLESEGIQTHLTFVYSFAQAAAAAQAGASVVQIFVGRVRDWARTHSGDPEIDEALKKGEDAGLALAKKVYAYIHKNGYKTKLMAAAIRNKQDVFSLLGIDYIIAPLKILQSLEESVTDTDVKYGYVPRLTPALGKTYNFTEEELVKWDQLSLAAAMGPAAEELLASGLEGYVNQARRVEELFGKIWPPPNV

SEQ ID NO: 98567 - DNA, 1218 bp, Arabidopsis thaliana
  CDS (1)..(1218)
atgccactctcgttgcaatctccgccttgtgcaactctctctgcttcaatccgaaagggacgatggaagacgctcgccgccggattctccgttactcctcttcccgccgttaacttcagtcttcggcgatcgattcctcggattcttgcttccgctagttcctcctcctctcctgcgtcttcgtctctcgaagctggtgagaacaatgagctaaatgctgtttcagcttttagtgagattgttcctgatactgtcgttttcgatgactttgagaggtttccgccgactgcagctactgttagctctgctcttcttctgggtatctgtggtctacctgataccattttccgcaatgctgtggacatggctttggcggattcttcttgtgcagggcttgaaaccacagaatctcgactctcttgctttttcaataaggctattgtcaacgtaggtggcgatcttgtcaaactcgttccaggtcgagtttctactgaagtggatgcacgtcttgcttatgacacaaatggcattatccgcaaggttcatgatctgctgagactatacaatgaaatcgatgtaccacacgaccggctcctattcaaaatccctgcaacttggcaaggtattgaagctgcaagattgttggaatcagagggaatccaaacgcatatgacctttgtttacagctttgcacaagctgcagcagcttctcaagccggtgcttctgtcattcagattttcgtcggtcgcctcagggattgggcgcgtaatcattcgggagataccgagattgaatctgctattaaatcgggagaagatcctggtttggccttggtcaaaagatcatataactacattcacaagtatggttacaagtccaagctgatggctgctgctgtccggaacaaacaagacttgttcagtcttctcggggtcgattatgtcattgcaccattaaaggtactgcaatctcttaaagattcacccgccattcccgatgatgaaaaatactcatttgttcggaaacttactcctgaaactgcaacacattaccacttcaccaacaaagagctggtcaaatgggaccagctaagcttggcttcatctatgggtcctgcatcagtggagcttttatcagccggtgttgaaggttatgcgaaccaagcgaaacgtgttgaagagcttttcgggaagatttggccacctcctaatgtctaa

SEQ ID NO: 98568 - protein, 405 aa, Arabidopsis thaliana
MPLSLQSPPCATLSASIRKGRWKTLAAGFSVTPLPAVNFSLRRSIPRILASASSSSSPASSSLEAGENNELNAVSAFSEIVPDTVVFDDFERFPPTAATVSSALLLGICGLPDTIFRNAVDMALADSSCAGLETTESRLSCFFNKAIVNVGGDLVKLVPGRVSTEVDARLAYDTNGIIRKVHDLLRLYNEIDVPHDRLLFKIPATWQGIEAARLLESEGIQTHMTFVYSFAQAAAASQAGASVIQIFVGRLRDWARNHSGDTEIESAIKSGEDPGLALVKRSYNYIHKYGYKSKLMAAAVRNKQDLFSLLGVDYVIAPLKVLQSLKDSPAIPDDEKYSFVRKLTPETATHYHFTNKELVKWDQLSLASSMGPASVELLSAGVEGYANQAKRVEELFGKIWPPPNV

SEQ ID NO: 98569 - DNA, 993 bp, Yersinia pestis KIM
  CDS (1)..(993): transl_table=11
atgccaaaagttcatgcacaaacgatgagaaacgacaacatgaccgataaacttacttccctacgtcaaatcaccactgtagtcgccgatactggggatattgcggcgatgaaattgtatcagccgcaagatgcaacgactaacccatcgattattctgaatgctgcccaaatccctgaataccgtaaattgatcgatgaagctattgcctgggcgcgcgaacaaagcagcgatcatgctcagcagatcgttgatgcgacggataaactggcagtgaatattggtttggaaattctgaaactgatccctggtcgtatttctaccgaagttgatgctcgcttgtcctatgataccgtcgccagcgtggcaaaagccaaacgtctgatcaaactgtataacgaagccggtatcagcaatgatcgtattctgatcaaattggcttcaacctggcagggcatccgcgctgcggagcaactggaaaaagaaggtatcaactgtaacctgacactgttgttctccttcgctcaggcacgtgcttgtgctgaagcgggtgtgttccttatttctccttttgttggtcgtattcttgattggtacaaagccaatggcgatcaaaaagagttcgcaccaagcgaagatccaggtgttgtttccgtcaccgagatttaccagtactacaaaaaacacggttataagaccgtggtgatgggtgcaagcttccgtaatttgggtgaaatcattgagttagccggttgtgaccgtttgactatcgccccttcactgctgaaagagttagcagagagcgaaggcccggtagaacgtaaactggcttacaccggtgaaattcaggcgaagcctgctccattgactgaagcggaattctactggcagcataatcaggatccaatggcggttgataaactggcagacggcatccgcaagtttgctatcgaccaaggcaaacttgagaaaatgatctccgacttgttgtaa

SEQ ID NO: 98570 - protein, 330 aa, Yersinia pestis KIM
MPKVHAQTMRNDNMTDKLTSLRQITTVVADTGDIAAMKLYQPQDATTNPSIILNAAQIPEYRKLIDEAIAWAREQSSDHAQQIVDATDKLAVNIGLEILKLIPGRISTEVDARLSYDTVASVAKAKRLIKLYNEAGISNDRILIKLASTWQGIRAAEQLEKEGINCNLTLLFSFAQARACAEAGVFLISPFVGRILDWYKANGDQKEFAPSEDPGVVSVTEIYQYYKKHGYKTVVMGASFRNLGEIIELAGCDRLTIAPSLLKELAESEGPVERKLAYTGEIQAKPAPLTEAEFYWQHNQDPMAVDKLADGIRKFAIDQGKLEKMISDLL

SEQ ID NO: 98571 - DNA, 1017 bp, Escherichia coli CFT073
  CDS (1)..(1017): transl_table=11
gtgatatcatcagggcagaccggttacatccccctaacaagctgtttaaagagaaatactatcatgacggacaaattgacctcccttcgtcagtacaccaccgtagtggccgacactggggacatcgcggcaatgaagctgtatcaaccgcaggatgccacaaccaacccttctctcattcttaacgcagcgcagattccggaataccgtaagttgattgatgatgctgtcgcctgggcgaaacagcagagcaacgatcgcgcgcagcagatcgtggacgcgaccgacaaactggccgtaaatattggtctggaaatcctgaaactggttccgggccgtatctcaactgaagttgatgcgcgtctttcctatgacaccgaagcgtcaattgcgaaagcaaaacgcctgatcaaactctacaacgatgcaggtattagcaacgatcgtattctgatcaaactggcttctacctggcagggtatccgtgctgcggaacagctggaaaaagaaggcatcaactgtaacctgaccctgctgttctccttcgctcaggctcgtgcttgtgcggaagcgggcgtgttcctgatctcgccgtttgttggccgtattcttgactggtacaaagcgaataccgataagaaagagtacgctccggcagaagatccgggcgtggtttctgtatctgaaatctaccagtactacaaagagcatggttatgaaaccgtggttatgggcgcaagcttccgtaacatcggcgaaattctggaactggcaggctgcgaccgtctgaccatcgcaccggcactgctgaaagagctggcggagagcgaaggggctatcgaacgtaaactgtcttacactggtgaagtgaaagcgcgtccggcgcgtatcactgagtccgagttcctgtggcagcacaaccaggatccaatggcagtagataaactggcggaaggtatccgtaagtttgctgttgaccaggaaaaactggaaaaaatgatcggcgatctgctgtaa

SEQ ID NO: 98572 - protein, 338 aa, Escherichia coli CFT073
MISSGQTGYIPLTSCLKRNTIMTDKLTSLRQYTTVVADTGDIAAMKLYQPQDATTNPSLILNAAQIPEYRKLIDDAVAWAKQQSNDRAQQIVDATDKLAVNIGLEILKLVPGRISTEVDARLSYDTEASIAKAKRLIKLYNDAGISNDRILIKLASTWQGIRAAEQLEKEGINCNLTLLFSFAQARACAEAGVFLISPFVGRILDWYKANTDKKEYAPAEDPGVVSVSEIYQYYKEHGYETVVMGASFRNIGEILELAGCDRLTIAPALLKELAESEGAIERKLSYTGEVKARPARITESEFLWQHNQDPMAVDKLAEGIRKFAVDQEKLEKMIGDLL

SEQ ID NO: 98573 - DNA, 951 bp, Salmonella enterica subsp. enterica serovar Typhi Ty2
  CDS (1)..(951): transl_table=11
atgaaccagctagacggcatcaaacaattcactaccgtcgtcgccgacagcggcgacatcgagtccatccgccactaccagccgcaggatgccacgacaaatccctctttactgttaaaagccgccgggcttgagcagtatggtcatttgattgaggatgcgattgcctggggaaaaaaacacggcggtacgcaggaacagcaggttgcggcagccagcgataaactggcggttaattttggcgcggaaatactgaaaagtattcccggtcgcgtctccactgaagtcgacgtgcggttatcgttcgataaagaaaaaagtatcgagaaagcacgccatctggtggatctctaccagcagcaggatgttgataaatcacgcattctgatcaagctcgccgcgacctgggaaggtattcgcgccgccgaacagctcgaaaaagaaggcattaattgcaacctgacgttgttgttctcttttgcccaggcgcgcgcctgcgccgaagcgggcgtctatttaatctctccgttcgtgggccgaatttacgactggtatcaggcgcgtagtccgctggagccgtatgtcgtggaggaagatcccggcgtgaaatcggtacgcaatatctacgattactttaaacagcatcgctatgaaaccatcgtgatgggtgcaagtttccgccgtactgagcaaatcctcgcgctaaccggctgcgatcgactgactatctcccctaacctgcttaaagagctgaaagaaaaagaagaaccggtgatccgtaaactggtgccttcctcgcagatgttccaccgtcctacgccaatgacggaagcggagttccgctgggaacataatcaggacgcgatggccgtagagaagctgtcggaaggtatccgccttttcgccgttgaccagcgcaaactggaagacctgcttgccgccaaactataa

SEQ ID NO: 98574 - protein, 316 aa, Salmonella enterica subsp. enterica serovar Typhi Ty2
MNQLDGIKQFTTVVADSGDIESIRHYQPQDATTNPSLLLKAAGLEQYGHLIEDAIAWGKKHGGTQEQQVAAASDKLAVNFGAEILKSIPGRVSTEVDVRLSFDKEKSIEKARHLVDLYQQQDVDKSRILIKLAATWEGIRAAEQLEKEGINCNLTLLFSFAQARACAEAGVYLISPFVGRIYDWYQARSPLEPYVVEEDPGVKSVRNIYDYFKQHRYETIVMGASFRRTEQILALTGCDRLTISPNLLKELKEKEEPVIRKLVPSSQMFHRPTPMTEAEFRWEHNQDAMAVEKLSEGIRLFAVDQRKLEDLLAAKL

SEQ ID NO: 98575 - DNA, 951 bp, Shigella flexneri 2a str. 2457T
  CDS (1)..(951): transl_table=11
atgaacgagttagacggcatcaaacagttcaccactgtcgtggcagacagctgcgatattgagtccattcgccattatcatccccaggatgccaccactaatccttcgctgttactcaaggctgccggattatcacaatatgagcatttaatagacgatgctatcgcctggggtaaaaaaaatggcaagacccaggaacaacaggtggtcgcagcgtgtgacaaactggcggtcaatttcggtgctgaaattctcaaaatcgtacccggttgcgtgtcaacagaagttgatgcacgcctctcttttgataaagaaaagagtattgagaaggcgcgccatctggtggacttgtatcagcaacaaggcgttgagaaatcacgcattttgatcaaactggcttcgacctgggaaggaattcgcgcggccgaagagctggaaaaagaaggtattaactgcaacctgacgctgctgttttcttttacccaggcgcgggcctgtgcggaagcaggcgtttttctgatttcgccgtttgtagggcgtatttatgactggtatcaggcacgcaagccgatggacccgtatgtggtggaagaagatccgggcgttaaatcggtgcgcaatatctacgactactataagcaacaccactatgaaaccattgtgatgggcgcgagcttccgtcgcaccgaacaaatcctcgccttaaccggctgcgatcgactgactatcgcaccgaatttgctgaaggagctgcaggaaaaagtttctccagtggtacgtaaattaatcccgccttctcagacgttcccacgcccagcacccatgagcgaagcggagttccgttgggagcacaatcaggatgcgatggcggtagaaaaactgtctgaaggcattcgtctgttcgctgttgatcaacgcaaactggaagatcttcttgccgccaaactataa

SEQ ID NO: 98576 - protein, 316 aa, Shigella flexneri 2a str. 2457T
MNELDGIKQFTTVVADSCDIESIRHYHPQDATTNPSLLLKAAGLSQYEHLIDDAIAWGKKNGKTQEQQVVAACDKLAVNFGAEILKIVPGCVSTEVDARLSFDKEKSIEKARHLVDLYQQQGVEKSRILIKLASTWEGIRAAEELEKEGINCNLTLLFSFTQARACAEAGVFLISPFVGRIYDWYQARKPMDPYVVEEDPGVKSVRNIYDYYKQHHYETIVMGASFRRTEQILALTGCDRLTIAPNLLKELQEKVSPVVRKLIPPSQTFPRPAPMSEAEFRWEHNQDAMAVEKLSEGIRLFAVDQRKLEDLLAAKL

SEQ ID NO: 98577 - DNA, 984 bp, Bordetella bronchiseptica RB50
  CDS (1)..(984): transl_table=11
ttgtccgctcagattcgccttatgcccagccaactcgaagcgttgcgccgccataccgttgtcgttgccgataccggcgatttcgaagcgatgcgtgcgctgcgccccaccgacgccaccaccaacccctcgctgatcctcaaggccgtgcagcaggaggcgtaccggccgctgctggtccagacggcgcgcgcgcaccagggcgcctcgccggccgagatcaccgaccgcctgctggtcgcgttcggccgccagatcctcgatatcgtgccgggccgggtctccaccgaggtggatgcgcgcctgtccttcgacacgcgcgccacggtcgagcgcgcccgcggcctgatcgccctgtaccaggcggccggcgtgccgcgcgagcgggtgctgatcaagatcgcctccacctgggagggcatccaggccgcgcgcgtgctgcaggccgagggcatccgctgcaacctgacgctgctgttctgcctgccgcaggcggcggcctgcgccgacgccggcgtgcagctgatctcgccgttcgtcggccgcatctacgactggcacaagaagaacgccggcgccgagtgggtcgaggatgcgcgccgcggcgccaacgatccgggcgtgcaatcggtcagccgcatctatcgctattacaagcgcttcggcatcgagaccgagatcatgggcgccagcttccgcaacgtggaccagatcctggcgctggccggctgcgacctgctgacgatcagcccggaactgctgacccggctgtcgcagaccgagggcgaggtgcccgccgcgctgtcgccgcaggccggccatgacgacgccgacgcggtccgcctggatggcggcgaggtggcgttccgtacgcagctcaacgaagacgcgatggccagcgagaaactgtccgagggcatccgcctgttcgtggccgatgcgcgcaagctggacgcgctgatcgaatcgcacggcgcggcctag

SEQ ID NO: 98578 - protein, 327 aa, Bordetella bronchiseptica RB50
MSAQIRLMPSQLEALRRHTVVVADTGDFEAMRALRPTDATTNPSLILKAVQQEAYRPLLVQTARAHQGASPAEITDRLLVAFGRQILDIVPGRVSTEVDARLSFDTRATVERARGLIALYQAAGVPRERVLIKIASTWEGIQAARVLQAEGIRCNLTLLFCLPQAAACADAGVQLISPFVGRIYDWHKKNAGAEWVEDARRGANDPGVQSVSRIYRYYKRFGIETEIMGASFRNVDQILALAGCDLLTISPELLTRLSQTEGEVPAALSPQAGHDDADAVRLDGGEVAFRTQLNEDAMASEKLSEGIRLFVADARKLDALIESHGAA

SEQ ID NO: 98579 - DNA, 999 bp, Nasonia vitripennis
  CDS (1)..(999)
atgagcgagcctcagtgtaagagaaccaagatgacgagcacgttggaccaactgaaggcgatgacgaccgtagtcgccgataccggcgacttcgaggctatggagcagttcaagccaacggacgccacgaccaatccctccctgatcttggccgcggcgaatcaaaagaagtacgctcacctcatcgacaaggcggtgcacttcggcaaaaagaccggatcgaccctcaaagaacaagtcgagacggcgctggactacacctgcgtccttttcggccaggagatcctcaagatcgttccaggtcgcgtctcgacggaagtcgatgcccgtctttctttcgacaaagaggctagtattcaaaaggccaggaaacttatcgccatctacgaggaagccggtatcagcaaagaacgcgttctcatcaagctcgcttccacttgggaaggcattcaggctgccaaagaactcgaggagaagtacggaatccactgtaacttgacgcttctcttctcgttcgcccaggctgtcgcttgcgccgaagctggagttactcttatttctccgtttgttggcagaattctcgactggtatgtcgctaataccgacaaaaagacttacgaaggaaaggaggatccaggtgtcatttcggttactaaaatatacaactactacaagaagtttggttacaacaccgtcgtcatgggagcttccttcaggaatgttgatgaaatcaaggccctcgccggttgcgacttcctgaccatcagcccgaagctcctggaagagctgggaaagagcaccgaaccacttgccaaagtcctcacgttcgaatcagcgcagaagtctgacctgcagaagatcagtctcgatgaggctgccttcagatggcaccttaacgaaaatcaaatggccacggacaaactcagcgacggcattcgcaaatttgccgtcgatatgcgcaagcttgagaaactcttgcaagaaaagattcaagcttaa

SEQ ID NO: 98580 - protein, 332 aa, Nasonia vitripennis
MSEPQCKRTKMTSTLDQLKAMTTVVADTGDFEAMEQFKPTDATTNPSLILAAANQKKYAHLIDKAVHFGKKTGSTLKEQVETALDYTCVLFGQEILKIVPGRVSTEVDARLSFDKEASIQKARKLIAIYEEAGISKERVLIKLASTWEGIQAAKELEEKYGIHCNLTLLFSFAQAVACAEAGVTLISPFVGRILDWYVANTDKKTYEGKEDPGVISVTKIYNYYKKFGYNTVVMGASFRNVDEIKALAGCDFLTISPKLLEELGKSTEPLAKVLTFESAQKSDLQKISLDEAAFRWHLNENQMATDKLSDGIRKFAVDMRKLEKLLQEKIQA

SEQ ID NO: 98581 - DNA, 1002 bp, Anopheles gambiae str. PEST
  CDS (1)..(1002)
atgagcagcgctgaaccgcagacgaagaaaacgaaaatggcttcgagtttggaacaactgaaacagctcaccacgatcgtggccgacaccggcgacttcgaggcgatgaaaacgtacaagccgaccgacgctacgacgaatccgtcgctgattctgtccgcggccggcatggagcagtaccagcatctgatcgataaggccatcaagcacggacagaaggcgggaaccacgctggacgagcaggtgtccgaggcggccgacatgctgttcgtgctgttcgggtgcgaaattctgaagctggtgccgggccgcgtgtcgaccgaaatcgatgcccggctgtccttcaacaaggaagcgtcggtggcgaaagccctcaagctgatcgcactgtacgaggagcgcggcatcaagcgggaccgggtgctgatcaagctcgcctccacctgggagggcatccaggcggccagtgtgctggagaaggagcacaacatccactgcaacctgacgctgctgttctcgttcgcgcaggcagtggcctgtgccgaggcgggcgtcaccctcatctcaccgttcgtgggccgcattctcgactggtacgtggccaacacggagcagaaagcgttcgagccggagcaggatccgggcgtcgtgtcggtgaccaagatctacaactactacaagaagttcggctacaagacggtcgtgatgggcgcgtcgttccgcaacgtgggcgagatcatggcgctggccgggtgcgatctgctcacgatcagcccgaagctgctcggcgagctggagaagagtgcggaaccggtcaagcgctatctggatgcggagaaggcgaaggaggtgccactggagaagatgcagatggatgaggccacgttccgctggatgctgaacgaggaccagatgtcgacggacaagctgtcggacggtattcgcaagtttgcggccgacggtcgcaagctggaaacgatgctgcgtggtttgctgcagtaa

SEQ ID NO: 98582 - protein, 333 aa, Anopheles gambiae str. PEST
MSSAEPQTKKTKMASSLEQLKQLTTIVADTGDFEAMKTYKPTDATTNPSLILSAAGMEQYQHLIDKAIKHGQKAGTTLDEQVSEAADMLFVLFGCEILKLVPGRVSTEIDARLSFNKEASVAKALKLIALYEERGIKRDRVLIKLASTWEGIQAASVLEKEHNIHCNLTLLFSFAQAVACAEAGVTLISPFVGRILDWYVANTEQKAFEPEQDPGVVSVTKIYNYYKKFGYKTVVMGASFRNVGEIMALAGCDLLTISPKLLGELEKSAEPVKRYLDAEKAKEVPLEKMQMDEATFRWMLNEDQMSTDKLSDGIRKFAADGRKLETMLRGLLQ

SEQ ID NO: 98583 - DNA, 975 bp, Magnaporthe grisea 70-15
  CDS (1)..(975)
atgtctaactcactcgaccagctcaagtcctcagggaccactgttgtgtgtgactctggtgactttgctaccattggcaagtacaagcctcaagatgctaccaccaacccgtccctgatcctggctgcctccaagaaggccgagtacgccaagctcatcgacgacgccattgcctacgccaagaagcagggcggctcggtcgacgatcaggtcgatgcttcgctggaccgtctcctggtcgagttcggcaaggagatcctcaagatcatccccggcaaggtctcgaccgaggttgacgcccgcttctccttcgacaccaaggcctcggtcgacaaggccctgcacatcatcaagctctacgaggctgaagggatctccaaggaccgcgtcctcatcaagatcgcctccacctgggagggcatcaaggccgctgagatcctgcagcgcgaccacggcatcaactgcaacctgacccttatgttcagcttggtccaggccatcgccgccgccgaggcggacgccttcctcatcagcccctttgtcggccgtatcctggactggtacaaggccgcccacaagaaggagtacaagaaggaggaggaccccggtgtcgagtcggtcaagaacatcttcaactactacaagaagtttggctacaagaccatcgtcatgggtgcctctttccgcaacactggtgagatcacggagcttgctggctgcgactacttgaccatctcgcccaacctccttgaggagctcctcaactcgtccgaggccgtcccgaagaagctggacgctcagggtgccgccgctctcgacatccagaagaagacttacatcagcgacgagccccttttccgctttgacttcaacgaggaccagatggctgtcgagaagctgcgtgagggtattagcaagttcgccgccgatgccgacacactcaagggcattctcaaggaaaagatccaggcatag

SEQ ID NO: 98584 - protein, 324 aa, Magnaporthe grisea 70-15
MSNSLDQLKSSGTTVVCDSGDFATIGKYKPQDATTNPSLILAASKKAEYAKLIDDAIAYAKKQGGSVDDQVDASLDRLLVEFGKEILKIIPGKVSTEVDARFSFDTKASVDKALHIIKLYEAEGISKDRVLIKIASTWEGIKAAEILQRDHGINCNLTLMFSLVQAIAAAEADAFLISPFVGRILDWYKAAHKKEYKKEEDPGVESVKNIFNYYKKFGYKTIVMGASFRNTGEITELAGCDYLTISPNLLEELLNSSEAVPKKLDAQGAAALDIQKKTYISDEPLFRFDFNEDQMAVEKLREGISKFAADADTLKGILKEKIQA

SEQ ID NO: 98585 - DNA, 972 bp, Gibberella zeae PH-1
  CDS (1)..(972)
atgtcttctgctctcgaccagctcaaggccaccggcactactgttgtgtctgactctggtgactttgcctccattggcaagtacaagcctcaggatgctaccaccaacccttctctcatcctcgctgcctccaagaaggaggagtacgccaagctgatcgatgtcgccatcgactacgctaagcagaagggtggctctgtcgaccagcaggttgacgatgccctcgaccgcctcctcgttgagttcggcaaggagattctcaagatcatccccggcaaggtctccaccgaggtcgacgctcgttactctttcgacaccgaagcttccgtcaacaaggctctccaccttatcgagctctacggcgagcaaggtatctccaaggaccgcatcctgatcaagattgctgctacctgggagggtatcaaggctgccgagatcctccagcgtgaccacggcatcaacaccaaccttactcttatgttctctctcgtccaggccattggtgctgctgaggctggtgcttacctcatttctcccttcgtcggccgtatccttgactggttcaaggcctctaccaagaaggagtacaccaaagaggaggaccctggtgtcctgtctgttaagcagatcttcaactactacaagaagttcggatacaacaccattgtcatgggcgcctcgttccgcaacactggcgagatcaccgagctcgctggctgtgactacttgactatctctcctaacctgctcgaggacctcctcaactcctctgactctgttcccaagaagctcgatgcttcccaggcctcttctctagacatcgagaagaagtcttacatcaaggacgaggctctcttccgcttcgacttcaacgaggaccagatggctgttgagaagctccgagagggtattagcaagttcgctgccgatgctgtcaccctcaagggcatcctcaaggagaagctctcctaa

SEQ ID NO: 98586 - protein, 323 aa, Gibberella zeae PH-1
MSSALDQLKATGTTVVSDSGDFASIGKYKPQDATTNPSLILAASKKEEYAKLIDVAIDYAKQKGGSVDQQVDDALDRLLVEFGKEILKIIPGKVSTEVDARYSFDTEASVNKALHLIELYGEQGISKDRILIKIAATWEGIKAAEILQRDHGINTNLTLMFSLVQAIGAAEAGAYLISPFVGRILDWFKASTKKEYTKEEDPGVLSVKQIFNYYKKFGYNTIVMGASFRNTGEITELAGCDYLTISPNLLEDLLNSSDSVPKKLDASQASSLDIEKKSYIKDEALFRFDFNEDQMAVEKLREGISKFAADAVTLKGILKEKLS

SEQ ID NO: 98587 - DNA, 969 bp, Apis mellifera
  CDS (1)..(969)
atgacgagttcattaacacgattaaaggaaattacaacaattgtcgctgataccggtgacttccaagctatggaacaatttaagccaatagatgcaactacaaatccttctttgatccttgctgcagctaatcaaaaaaaatatattcacttaatagataaagctgtacaatatgggaaaaaatctggatctactttgacagaacaaattgaagcagctctagacatcacatgtgtcctttttggtaaagaaattttaaatattatacctggtagagtttcaacagaagtagatgctagattgtctttcaataaagatgctagcattgagaaagcaaagaaattaattgctttgtatgaagaacttggtgtaaataaagatcgtgtgctaatcaagcttgcttctacttgggaaggtattcaagcagcaaaagaattggaagaaaagtatggaattcattgtaatttaacacttctattttctttccctcaagcagttgcatgtgcagaagcaggtgtaactcttatatcaccatttgttggtagaattcttgattggtatgtggcaaatacagataaaaaatcttatgaatctaaagaagatccaggtgttttatctgtaacaaaaatttataattactataaaaagtttggatataaaacagttgttatgggtgcttcgtttagaaatattggtgaaattaaagaactagctggttgtgactttttaactataagtcccaaattattggaagaattagaaaaaagcaatgatgtagtacgcaaagtacttacaatagaagcagcaaagaaatctgatcttcaaaagatcagtttaaatgaagccgaatttagatggcttatgaatgaagatcaaatggcaacagataagctaagcgaaggtattcgcaaatttgcggtagatgttcgtaaattagaaaaattattgcaagaaaaaatacaatcctaa

SEQ ID NO: 98588 - protein, 322 aa, Apis mellifera
MTSSLTRLKEITTIVADTGDFQAMEQFKPIDATTNPSLILAAANQKKYIHLIDKAVQYGKKSGSTLTEQIEAALDITCVLFGKEILNIIPGRVSTEVDARLSFNKDASIEKAKKLIALYEELGVNKDRVLIKLASTWEGIQAAKELEEKYGIHCNLTLLFSFPQAVACAEAGVTLISPFVGRILDWYVANTDKKSYESKEDPGVLSVTKIYNYYKKFGYKTVVMGASFRNIGEIKELAGCDFLTISPKLLEELEKSNDVVRKVLTIEAAKKSDLQKISLNEAEFRWLMNEDQMATDKLSEGIRKFAVDVRKLEKLLQEKIQS

SEQ ID NO: 98589 - DNA, 1005 bp, Candida glabrata CBS 138
  CDS (1)..(1005)
atgtctgaaccagttcaaaagaagcaaaagactaactcttctctagaccaattgaaggcctctggtactgttgttgttgctgacaccggtgacttcgagtccattgctaagttccaacctcaggactccaccaccaacccatctctaatcttggccgctgctaagcaaccagcttacgccaagttgatcgacgttgctgttgagtacggtaagaagcacggtaagaccgtcgaggaacaaaccgaagccgctgtcgacagactgcttgtggaattcggtaaggaaatcttaaagatcgttccaggcagagtctccaccgaggttgacgcccgtctatccttcgacaaggaggccaccatcgccaaggctctacaaattatcaagctatacgaagaacaaggtatctccaagtcccgtgtcttgattaagattgcctccacctgggaaggtatccaagccgctagagaactagagagcaagcacggtatccactgtaacttgactctgctgttcaacttcgcccaagctgtcgcctgtgccgaggccaacatcaccttgatttccccattcgtcggtagaatcatggactactacaaggccaagaccggtgaaacttacactggtgaaaccgacccaggtgtcaagtctgtcagagccatctacaactactacaagaagtacggttacaagaccatcgtcatgggtgcttctttcagaaacatagatgaaatcaaggccctagccggtgttgactacttgaccatctctccaaacttgctagaccaactattgaactctaacgacccagttccaaagatcctagacccagccaccgccaaggacgaagctggtgagaaggtcactttcgtcgacaacgaatctgctttcagattcgctctaaacgacgacgccatggccaccgacaagttgtctgacggtatcagaaagttctctgctgatatcatcactttgttcgacatgattgaaaagaaggttaaggcttaa

SEQ ID NO: 98590 - protein, 334 aa, Candida glabrata CBS 138
MSEPVQKKQKTNSSLDQLKASGTVVVADTGDFESIAKFQPQDSTTNPSLILAAAKQPAYAKLIDVAVEYGKKHGKTVEEQTEAAVDRLLVEFGKEILKIVPGRVSTEVDARLSFDKEATIAKALQIIKLYEEQGISKSRVLIKIASTWEGIQAARELESKHGIHCNLTLLFNFAQAVACAEANITLISPFVGRIMDYYKAKTGETYTGETDPGVKSVRAIYNYYKKYGYKTIVMGASFRNIDEIKALAGVDYLTISPNLLDQLLNSNDPVPKILDPATAKDEAGEKVTFVDNESAFRFALNDDAMATDKLSDGIRKFSADIITLFDMIEKKVKA

SEQ ID NO: 98591 - DNA, 999 bp, Candida glabrata CBS 138
  CDS (1)..(999)
atgagtactgagaacggaggcaatagtactttagagaacttgagaaatgcaggcaccaatgtggtcactgacactggtgaatttgaattgatttcaaaatttaaaccaagggattctactacaaatccatccttgatccttgctgccaccaaaaatccaaactatgcctctttaattgacgttgctattgactacgccaaagctaaaggcggcacaattgaacaacaaaccaataatgctgctgatagactgcttgttgaatttggtaagcgtatcacagacttgattcccggtgttgtgtcaacagaagtagatgcgaggttatctttcgataagaagggtacagtggataaagctttgcagatcattaaattatatgaagaaaatggtgtctccaaggacagagttctcatcaaaattgcttccacttgggaggggatccaagcagccagagagttagaagctcaacacggtatccattgtaacctgacactgttattcaatttcacacaggctgtggcttgcgcagaggccaatgttactttaatttcacccttcatagctagggttttagattggtacaaggctaacacaaagaatgattataacatcgagaatcatcccggtgttctctttgtcaagaaaacatataactactacaaaaaacatggctataagacaattattatgggtgcatctttcagaactttagatgaaatcagagctttggctggtttagacaacgcaacgctaggcattcctttgttagagaacctgcaaaattcaactgaaaaaattgatagagtgttgacacctgaaggtgctcaaaaggatggggtggatatgatcactttgatcgatgacgaagctaagtacagatatgaatttaattcggacgcaatggcggtagaaaagttggctgacggtatcagaacttttgcaaaggacacaaacactctttatagcttactgagaactaaactcgaaaaggcaaactag

SEQ ID NO: 98592 - protein, 332 aa, Candida glabrata CBS 138
MSTENGGNSTLENLRNAGTNVVTDTGEFELISKFKPRDSTTNPSLILAATKNPNYASLIDVAIDYAKAKGGTIEQQTNNAADRLLVEFGKRITDLIPGVVSTEVDARLSFDKKGTVDKALQIIKLYEENGVSKDRVLIKIASTWEGIQAARELEAQHGIHCNLTLLFNFTQAVACAEANVTLISPFIARVLDWYKANTKNDYNIENHPGVLFVKKTYNYYKKHGYKTIIMGASFRTLDEIRALAGLDNATLGIPLLENLQNSTEKIDRVLTPEGAQKDGVDMITLIDDEAKYRYEFNSDAMAVEKLADGIRTFAKDTNTLYSLLRTKLEKAN

SEQ ID NO: 98593 - DNA, 972 bp, Debaryomyces hansenii CBS767
  CDS (1)..(972)
atggctaacgcattagaacaattaaagtctaccggtactgttattgtcaccgatactggtgaatttgaatcaattgccaaatacaccccacaagatgctaccaccaatccatcgttgattttggcggcttctaagaaggctgaatacgccaagttgattgacattgccattgactacgctcaagataagggatccaatcctaaggaaaaagcttcaattgctttagatcgtttgttggttgaattcggtaaggaaatcttgaagattgtccctggtagagtttctaccgaagttgacgccagattgtctttcaacaaggacgctaccatcaagaaggccattgaaatcatcaagttatacgaatccgttggtatttctaaggacagaatcttgatcaagattgcttccacgtgggaaggtatccaagctgctagagaattagaatccaagcacggaattcactgtaacttgactttattattctctttcgtgcaagctgttgcttgtgctgaagccaaggttaccttgatctctccattcgtcggtagaatcttagactggttcaaggcttccactggtaaggaatacgatggtgaaaccgacccaggtgtgatctctgtcagaaagattttcaactactacaagaaatacggttacgacaccattgtcatgggtgcttctttcagaaacactggtgaaattaaggctttagcgggttgtgatttcttgacaatcgctccaaagttattagaagaattgtacaactctaatgaagatgttccaaagaaattggactcttcttctgctaatgccactgatgaagaaaaagtctcttacatcgataacgaagcagaattcagatacttatttaatgaagatgctatggctaccgaaaaattatcagaaggtatcagaaacttcgctaaggattgtgtcaccttattggatcaattggaagcaagattcaaataa

SEQ ID NO: 98594 - protein, 323 aa, Debaryomyces hansenii CBS767
MANALEQLKSTGTVIVTDTGEFESIAKYTPQDATTNPSLILAASKKAEYAKLIDIAIDYAQDKGSNPKEKASIALDRLLVEFGKEILKIVPGRVSTEVDARLSFNKDATIKKAIEIIKLYESVGISKDRILIKIASTWEGIQAARELESKHGIHCNLTLLFSFVQAVACAEAKVTLISPFVGRILDWFKASTGKEYDGETDPGVISVRKIFNYYKKYGYDTIVMGASFRNTGEIKALAGCDFLTIAPKLLEELYNSNEDVPKKLDSSSANATDEEKVSYIDNEAEFRYLFNEDAMATEKLSEGIRNFAKDCVTLLDQLEARFK

SEQ ID NO: 98595 - DNA, 978 bp, Yarrowia lipolytica CLIB122
  CDS (1)..(978)
atgtcttccaactctcttgaacagcttaaggccgccggcaccaccgttgtcaccgacactggtgaattcgagtccatcgccaagtacaagccccaggacgccaccaccaacccctctctgatcctggccgcttccaagaagcccgagtacgccaagctcattgacgaggccgtttctttcgccaagaccaagtcctccgaccccaaggagcaggtcaacattgctctggaccagctgctcatcgagttcggctccgagattctcaagattgtccccggtcgagtctccaccgaggtcgacgcccgactctctttcgacaaggacgccaccatcaagaaggctctgcagctcattgacctctacaaggccaagggcatttcttctgaccgaatcctcatcaagatcgcctccacctatgagggtatccaggctgccaaggagctcgagtccaagcacggtatccactgtaacctgactcttctcttctccttcgtccaggccgttgcctgtgctgaggccaaggtcaccctcatctctccctttgttggccgaatcctcgactggcacaaggccgccaccggcaagacctacgacgctgccgaggaccccggtgtcatctccgtcaagaacattttcgactactacaagaagttcgactacaagaccattgtcatgggtgcttctttccgaaacaccggtgagatcaaggagcttgctggctgtgacttcctgaccatctcccccggtctgcttgaggagctgctcaactccaccgaccccgtcccccagaagctgttcgccgacaaggccaagtctctggacattgagaagaaggcctacctcgacgaggagcccatcttccgacgagactttaacgaggaccagatggccaccgagaagctctccgacggtatccgaaagttcgctgctgacgccgtcaccctttccaagctcattgagaccaagctctccgcttag

SEQ ID NO: 98596 - protein, 325 aa, Yarrowia lipolytica CLIB122
MSSNSLEQLKAAGTTVVTDTGEFESIAKYKPQDATTNPSLILAASKKPEYAKLIDEAVSFAKTKSSDPKEQVNIALDQLLIEFGSEILKIVPGRVSTEVDARLSFDKDATIKKALQLIDLYKAKGISSDRILIKIASTYEGIQAAKELESKHGIHCNLTLLFSFVQAVACAEAKVTLISPFVGRILDWHKAATGKTYDAAEDPGVISVKNIFDYYKKFDYKTIVMGASFRNTGEIKELAGCDFLTISPGLLEELLNSTDPVPQKLFADKAKSLDIEKKAYLDEEPIFRRDFNEDQMATEKLSDGIRKFAADAVTLSKLIETKLSA

SEQ ID NO: 98597 - DNA, 975 bp, Aspergillus nidulans FGSC A4
  CDS (1)..(975)
atgtcttcttctcttgaacagctcaaggcaactggcaccgttgtcgtttgcgactccggtgacttcgccaccatcgacaagtacaagccccaggatgccaccaccaacccttctctcatcctggctgcctccaagaagcccgagtacgccagcctgatcgacgccgccgttgagaagggtaagaagcagggcggttctgtggacgaccaggttgacgccaccctcgactacctcctggtcgagtttggcaagaagatcctcgacattattcccggaaaggtctcgactgaggtcgacgcccgcttctcctttgacacaaaggcctcggttgacaaggctcttcacatcatcaagctctacgaggaggccggtatctccaaggaccgcattctcattaagatcgcctcaacctgggagggtatccaggccgctcacatcctgcagtcccagcacggcatcaactgcaacctgactcttatgttctctcttgttcaggctattgctgctgctgaggctggtgccttcctcatctctcctttcgtcggccgtatcctcgattggtacaaggccgctcacaagcgcgacttctcgaaggaggaggatcccggtgtcaagtctgtccagagcatcttcaactactacaagaagttcggctacaagaccatcgttatgggtgcctctttccgtaatgtcggtgagatcaccgagctcgccggttgcgactacttgaccatctcccccggtctccttgaggagctctacaactccaaggacgccgttcccaagaagctcgacgctgcctccgccaccaccctcgacatcaccaagcgcagctacctcaacgacgaggccctgttccgcttcgacttcaacgaggaggctatggccgtcgagaaactccgtgagggtatctccaagttcgccgccgacgctgtcacccttaaggacatcctgaagcagaaggtccaggcgtag

SEQ ID NO: 98598 - protein, 324 aa, Aspergillus nidulans FGSC A4
MSSSLEQLKATGTVVVCDSGDFATIDKYKPQDATTNPSLILAASKKPEYASLIDAAVEKGKKQGGSVDDQVDATLDYLLVEFGKKILDIIPGKVSTEVDARFSFDTKASVDKALHIIKLYEEAGISKDRILIKIASTWEGIQAAHILQSQHGINCNLTLMFSLVQAIAAAEAGAFLISPFVGRILDWYKAAHKRDFSKEEDPGVKSVQSIFNYYKKFGYKTIVMGASFRNVGEITELAGCDYLTISPGLLEELYNSKDAVPKKLDAASATTLDITKRSYLNDEALFRFDFNEEAMAVEKLREGISKFAADAVTLKDILKQKVQA

SEQ ID NO: 98599 - DNA, 972 bp, Candida albicans SC5314
  CDS (1)..(972): transl_table=12
atgtcctcaaattcattagaacaattaaaagctaccggtaccactatcgtcactgatacaggtgaattcgaacaaattgccaaatataaaccacaagatgccaccaccaatccatctttgattttggctgctactaagaacccagaatacgctagtgtcattgacgttgccattgaatacgccaaggacaaaggttcttcaccaaaggaaaaggctgaaattgcccttgatagattattgattgaattcggtaaaaacatcttggacattgttccaggtagagtttctactgaagttgatgccagattatcttttgataaagaagctactgtcaagaaagctttggaattgatcgacttgtacaagcaacaaggtattgaaaaagatagaattttgatcaaaattgcctccacttgggaaggtattcaagccgctagagaattggaatccaaacacggtatccactgtaacttgaccttgttgttctcttttgctcaagctgttgcttgtgctgaagctggtgtcaccttgatctccccattcgttggtagaattttggactggtacaaggcctccactggtgaagaatacactgctgaaaccgacccaggtgtccaatctgtcaaagccatctacaactactacaagaagtatggttataagaccattgttatgggtgcttcattcagaaacaccggtgaaatcaaggctttagctggttgtgatttcttgaccatttctccaaaattgttggaacaattatacaactccactgaagaagttccaaaacaactagatgctgctaccgctaaggatgaagacgttgaaaaagtcacctatgttgatgatgaatcagctttcagatttgccttgaacgaagatgctatggctactgaaaaattatctcaaggtatcagacaattcggtaaagatgctgttactttgttgactgaattagaatcaagattttaa

SEQ ID NO: 98600 - protein, 323 aa, Candida albicans SC5314
MSSNSLEQLKATGTTIVTDTGEFEQIAKYKPQDATTNPSLILAATKNPEYASVIDVAIEYAKDKGSSPKEKAEIALDRLLIEFGKNILDIVPGRVSTEVDARLSFDKEATVKKALELIDLYKQQGIEKDRILIKIASTWEGIQAARELESKHGIHCNLTLLFSFAQAVACAEAGVTLISPFVGRILDWYKASTGEEYTAETDPGVQSVKAIYNYYKKYGYKTIVMGASFRNTGEIKALAGCDFLTISPKLLEQLYNSTEEVPKQLDAATAKDEDVEKVTYVDDESAFRFALNEDAMATEKLSQGIRQFGKDAVTLLTELESRF

SEQ ID NO: 98601 - DNA, 969 bp, Ustilago maydis 521
  CDS (1)..(969)
atgtcttccgctctcgactctctcaagcaatacaccgccgtcgtctcggactcgggtgactttgaatccatcgacgcttacaagccccaagatgctaccaccaacccttcgctcatccttgctgctgtcaagcaggagaagtacgcgcgcctaatcgacgtcgccgtcaagtacgccaaggagcagacctcggacaagtcgaagcagctcgacctcgccactgaccgcctgctcgtcgctttcggtgtcgagatcctcaagatcatccccggccgtgtctcaaccgaggtcgacgcccgtctctcgtacaacaaggaggcgacgattgagaaggccaagcacctgattgccctttacgagtcgctcggtgtcaagcgtgagcgtgtcctcatcaagattgcctcgacctgggagggtatccaggctgctcgtgagctcgagtcgcagcacaatatccactgcaacttgactttgctcttcggtttcaaccaggctgtcgcctgtgccgaggccaatgttacgctcatctcgccctttgttggccgtatcctcgactactacaagaaggccgagggtaaagagtacgcctcgcacgaggaccccggtgttctctcggttcagcgcatctacacctactaccgccagcacggctacaagacgattgttatgggtgcttcgttccgtaacattggcgagatcctcgagcttgccggttgtgacttcctcaccatctcgcccaagctgctcgaggagctcaagaacaaggaaggccccgttgagcagaagctctcggtcgagaaggccaagagcgccgagcccatcgccaaggtctcgtacatcaacgaccaggccgccttcttgctcgacttggccaaggaccccatggccaacaccaagctcgccgagggtatcgccggtttcgccaaggatggtgctaccatggagcagatgatcgccgacaagctctaa

SEQ ID NO: 98602 - protein, 322 aa, Ustilago maydis 521
MSSALDSLKQYTAVVSDSGDFESIDAYKPQDATTNPSLILAAVKQEKYARLIDVAVKYAKEQTSDKSKQLDLATDRLLVAFGVEILKIIPGRVSTEVDARLSYNKEATIEKAKHLIALYESLGVKRERVLIKIASTWEGIQAARELESQHNIHCNLTLLFGFNQAVACAEANVTLISPFVGRILDYYKKAEGKEYASHEDPGVLSVQRIYTYYRQHGYKTIVMGASFRNIGEILELAGCDFLTISPKLLEELKNKEGPVEQKLSVEKAKSAEPIAKVSYINDQAAFLLDLAKDPMANTKLAEGIAGFAKDGATMEQMIADKL

SEQ ID NO: 98603 - DNA, 972 bp, Cryptococcus neoformans var. neoformans B-3501A
  CDS (1)..(972)
atgcccacttctcttgaagctctcaaggcctctggcaccaccgttgtcgccgacactggtgacttttcttccatcgacgagttcaagccccaggatgccaccaccaacccttccctcatccttgccgccgtcaagatgcccgcttacgctaagctcctcgagcctgctatcaagtacgccaagtctaagggcggtgacattgaggtccagtccgagaacgccatggaccgactcctcgtcgagttcggtactgagatcttgaagatcatccccggtcgagtttccaccgaggttgacgccaagttctctttcgacacccaggccactatcaacaaggcccatcagattattgctctttacaaggagcagggtattgacaagaaccgagtcttgatcaagatcgcctccacttacgagggtatccttgctgccaagcagctcgaatctgagggtatccactgtaacctcaccctcctcttcggtttcggccaggccgttgcttgtgccgaggctggtgtcacccttatctctcccttcgtcggccgaatccttgactggtacaagaaggccaaccccgacaccacttacactgccgagactgaccccggagttcagtccgtccagaagatctacaactactacaagcaacacggctacaagaccatcgtcatgggtgcttctttccgaaacactggcgaaattgccgctcttgccggttgcgacttcctcaccatctcccccaagctcctcgatgagctcaacaagtctcaggacgacctccccaagaagctcgacgcttcttccactggcgaggccatccccaagacttcctacctcgacgacgaggccaagttccgatgggcccttttcgaagatgttatggcgtttgacaagctccacgagggtatccgaggtttcgccaaggacggcgctagtttgaagcagatgttgatcgagaagctcaaggcttaa

SEQ ID NO: 98604 - protein, 323 aa, Cryptococcus neoformans var. neoformans B-3501A
MPTSLEALKASGTTVVADTGDFSSIDEFKPQDATTNPSLILAAVKMPAYAKLLEPAIKYAKSKGGDIEVQSENAMDRLLVEFGTEILKIIPGRVSTEVDAKFSFDTQATINKAHQIIALYKEQGIDKNRVLIKIASTYEGILAAKQLESEGIHCNLTLLFGFGQAVACAEAGVTLISPFVGRILDWYKKANPDTTYTAETDPGVQSVQKIYNYYKQHGYKTIVMGASFRNTGEIAALAGCDFLTISPKLLDELNKSQDDLPKKLDASSTGEAIPKTSYLDDEAKFRWALFEDVMAFDKLHEGIRGFAKDGASLKQMLIEKLKA

SEQ ID NO: 98605 - DNA, 1011 bp, Tribolium castaneum
  CDS (1)..(1011)
atgtcagagcctcagtgcaaaagaagcaagatgaccagctcgctggaacagctgaaggctttgaccacggtggtggccgacaccggggatttcgaagcaatgaaaaactacaaaccgaccgacgccaccaccaacccctccctaatcctggccgcctccgccctcccccagtacaaacacctggtgcagaaggccgtgcaatacggcaacaaggtgggccaaaccaccgaggaaaagctggaaaatgcgatggacctactgtgtgtccttttcggcgtggaaattctgaaaatcgtccctggacgcgtctcgactgaagtcgacgctcgattatccttcgacaaggaagcgagtatcgcgaaagcgaaaaagctgatccagctttacgccgaccacgggatcgccaaagagcgcgttttgatcaaactggcctccacctgggagggcatccaggctgcgcgcgagctggagcagaagcacggaatccactgcaatctcacccttttgttcaactttgcccaagcagtggcgtgtgccgaggccggggtgaccctaatttcgccctttgtggggcgcatcctcgactggaacatcgccaacactgataagaaatcctacacgggggacgaggacccgggggtggtgtccgtcaccaagatttacaattattacaagaagtttgggtacaagacggtggttatgggggcgtcgttcaggaacattgaggagattaaggcattggccgggtgtgacttgttgacgatcagtcccaagcttttgggggagttggaggcgtcgggcgaccccgtccccaggaagttgtcgccggaaaacgccgccaaacagccgctggagaagatcgcgctgactgaatcgaccttcaggtggatgctcaatgaggataaaatggccacggataagctgtcggaagggatcaggaatttcgcagccgatagtgtcaagttggagaatacgatcaaaacgcaactgaaagcgtctccgaaaaaataa

SEQ ID NO: 98606 - protein, 336 aa, Tribolium castaneum
MSEPQCKRSKMTSSLEQLKALTTVVADTGDFEAMKNYKPTDATTNPSLILAASALPQYKHLVQKAVQYGNKVGQTTEEKLENAMDLLCVLFGVEILKIVPGRVSTEVDARLSFDKEASIAKAKKLIQLYADHGIAKERVLIKLASTWEGIQAARELEQKHGIHCNLTLLFNFAQAVACAEAGVTLISPFVGRILDWNIANTDKKSYTGDEDPGVVSVTKIYNYYKKFGYKTVVMGASFRNIEEIKALAGCDLLTISPKLLGELEASGDPVPRKLSPENAAKQPLEKIALTESTFRWMLNEDKMATDKLSEGIRNFAADSVKLENTIKTQLKASPKK

SEQ ID NO: 98607 - DNA, 936 bp, Herminiimonas arsenicoxydans
  CDS (1)..(936): transl_table=11
atgaaccaactcgaacaactgaagcaatacacgaccatcgttgccgacactggcgactttcaatcgatcaaggccttcacaccgcaagatgccaccaccaatccttcattgatcctgaaagccgtgcaaaaggatgaataccgcccgatcatggaaaaaatcgcgcgcgaacacgccggcaaaagtacagcgcaaatcgtcgaccacctgctggtcgccttcggcactgaaattctcaagatcattccgggccgcgtctcgacagaaaccgacgcgcgcctgtccttcgataccgcaggctcgatcgccaagggccgcgaattgatccgtctgtatgaagcagcaggcatttcgcgcgaacgcgtattgatcaagatcgcttcgacatgggaaggcatacgtgcggctgaagtgctggagaaggaaggcatacactgcaacctgacactgctgttctcgctgccgcaagcgatcgcctgcgccgacgccaaagtgcaactgatctcgccgttcgtgggccgcatctacgactggtacaaaaaatccaccggcaccgattacaccggcgccgacgatccgggcgtgcaatcggtcaagcgcatctacacttactatcgcaagttcggctaccagaccgaagtgatgggtgccagtttccgcaacacctcgcaaatcatcgaactggccggctgcgatctgctgaccatcagtccggagttattgcagaaactggccgagtcggatgcgacattgacacgcaagctcagccccgaggcagcaaaaaattctgatctggaaaaactgacgctggatgaaaagactttccgcagcatgctgaatgacgatgcaatggcgacggaaaaactggcagaaggaatacgcgcattttgcgtggatgcggtgaaactggataaattgatagaagccttgcgctag

SEQ ID NO: 98608 - protein, 311 aa, Herminiimonas arsenicoxydans
MNQLEQLKQYTTIVADTGDFQSIKAFTPQDATTNPSLILKAVQKDEYRPIMEKIAREHAGKSTAQIVDHLLVAFGTEILKIIPGRVSTETDARLSFDTAGSIAKGRELIRLYEAAGISRERVLIKIASTWEGIRAAEVLEKEGIHCNLTLLFSLPQAIACADAKVQLISPFVGRIYDWYKKSTGTDYTGADDPGVQSVKRIYTYYRKFGYQTEVMGASFRNTSQIIELAGCDLLTISPELLQKLAESDATLTRKLSPEAAKNSDLEKLTLDEKTFRSMLNDDAMATEKLAEGIRAFCVDAVKLDKLIEALR

SEQ ID NO: 98609 - DNA, 990 bp, Acinetobacter sp. ADP1
  CDS (1)..(990): transl_table=11
atgactcaatctgcgcttgatcaactaaaaaaattgacgactgtagttgctgacagtagtgatattgaagctattcgtaaatttctcccattagatgcaaccacaaatccttcattaattacggcagctgccagcattcctgaaaataaagcgctcattgaagatgcttttaatcaggcacatcaggaaggttatgaaaatgacctactgatcgaacgcacaattgatattttaaccgtcaaatttggggttgaaattttaaagcttattcagggacgggtttcaacagaagttgatgcttctttatcttacaatacagaggcaacaattgaaaaagcacgcgaactatcgaaactatacaaagaatatggtattgatcaatctcgaattttgattaaaattgcgtcaacatggcaagggattcaggctgcaaaagtacttgaagctgaaggtattccatgtaacttgactttgctgttcggcttacatcaagctcaggcgtgtgcagatgccaaagttaccctgatctcaccatttgtagggcgtatcctcgactggtacaaaaaagcagaaaatgttgatcattatcctatcgagaaagacccaggtgtggtatcggtcaagaaaatctttacttactacaaacaacaaggtaccccaacacaagtcatgggtgcaagtttccgtagtatcgatcaggttcttggtttggcaggaagcgatttattgaccatctcacctgcactgctgtctgagcttgaacaagatcaccgcactgttgaagcaaccttgaccatcgaagaagccaaacaagccgagattattcatagagctgctcaaactgagcaaagctttaaagacgagctggaacatgacctcatggcttttcagctattacagagtggcatcgacggttttattaaagctcgcgaacagttgagtacattgcttaggcaatcttacggaattgatgcagaaatccaaccgtaa

SEQ ID NO: 98610 - protein, 329 aa, Acinetobacter sp. ADP1
MTQSALDQLKKLTTVVADSSDIEAIRKFLPLDATTNPSLITAAASIPENKALIEDAFNQAHQEGYENDLLIERTIDILTVKFGVEILKLIQGRVSTEVDASLSYNTEATIEKARELSKLYKEYGIDQSRILIKIASTWQGIQAAKVLEAEGIPCNLTLLFGLHQAQACADAKVTLISPFVGRILDWYKKAENVDHYPIEKDPGVVSVKKIFTYYKQQGTPTQVMGASFRSIDQVLGLAGSDLLTISPALLSELEQDHRTVEATLTIEEAKQAEIIHRAAQTEQSFKDELEHDLMAFQLLQSGIDGFIKAREQLSTLLRQSYGIDAEIQP

SEQ ID NO: 98611 - DNA, 942 bp, Psychrobacter arcticus 273-4
  CDS (1)..(942): transl_table=11
atgagcgcattacaacagcttcgcactatgactaccattgtcgctgacacaggcgatcttgccgccattgagcgtctaaaacctatcgatgcgaccaccaatccaagcctaattaccaaagcactgattcatcctgacaatgaagcggtattatcagaaaccatgagtcgccatagaaatgatatcgacgccgtgattgacgagctgaccattcaaatcggctgcaatattctatctttaatcgaggggcgcgtctcaactgaggtcgatgctcgtttgtcctatgacacacaagcgaccattgataaggcattggcgtttatggaagcctatcaaaaatccggtatcgactcagagcgcgtgttgattaagatggcagcaacctggcaaggtattgaagctgcccgctacctcgaaactcaaggcattcactgcaatctcaccttgctatttggacagcatcaagccatcgcttgtgccgatgctggtgtgaccttaatttcaccttttgttggacgtattttggattggcaaaaacgccagcaaaaccgtcaaaacataccagtctctgatgacatgggcgtacaatcggtcaagctcatttaccaatactacaagcagcatggctacaaaacgcaggtgatgggcgcaagttttcgctcaactgagcagatattggcgctggcaggctgtgatttattaaccattgcacccaacctaattgatgagctggcagcaatggatatcgaggttacacgtcaattatcagaaagtatgtcgatggacatgacagatatgacgcgagttagcttgagcgctgaagaattcagtcacgcctatcagcaggataccatcactcaagatctattacccaaaggcattgacggctttatcagtgcgcgtgatgagcttgcccatatgctagcaagtatgcgcagctaa

SEQ ID NO: 98612 - protein, 313 aa, Psychrobacter arcticus 273-4
MSALQQLRTMTTIVADTGDLAAIERLKPIDATTNPSLITKALIHPDNEAVLSETMSRHRNDIDAVIDELTIQIGCNILSLIEGRVSTEVDARLSYDTQATIDKALAFMEAYQKSGIDSERVLIKMAATWQGIEAARYLETQGIHCNLTLLFGQHQAIACADAGVTLISPFVGRILDWQKRQQNRQNIPVSDDMGVQSVKLIYQYYKQHGYKTQVMGASFRSTEQILALAGCDLLTIAPNLIDELAAMDIEVTRQLSESMSMDMTDMTRVSLSAEEFSHAYQQDTITQDLLPKGIDGFISARDELAHMLASMRS

SEQ ID NO: 98613 - DNA, 1026 bp, Ralstonia eutropha JMP134
  CDS (1)..(1026): transl_table=11
atgcctcaacggcgccgcgagtcggccgccttcccgcctccccatgacgactgcaacgacttaccgatcatgaaccagctcgaacaactcaagcagttcaccacggtcgtggccgataccggcgacttccagttgatgaagcagtacacgccgcaggacgccaccaccaacccgtcgctgatcctcaaggcggtgcagaagcccgaataccgcggacttctggaacaggccgtgcgcgactaccacaacgaaggcggtgtcgacgccgtgatggacggcgtgctgatcgcgttcggctgcgagatcctcgccatcgtgcccggacgtgtgtcgacggaggtcgatgcgcggctgtcgttcgataccgaagcgacggtcgaaaaggcccgccacctgatccgcctgtacgaacagcgcggcgtggcgcgcgagcgcgtgctgatcaagattgcatcgacgtgggaaggcatccgcgccgccgagatcctgcagcgcgaaggcatccgctgcaacatgacgctgctgttctcgctggtgcaggcagtcgcgtgcgccgaggccggcgcgcaactgatctcgccgttcgtcggtcgcatcctcgactggtacaagaagcaggccggcgaccagtgggacgctgccgccaatgcgggcgacaacgatccgggcgtgcgctccgtgcgccagatctacgactactacaagaaattcggctacaacaccgaagtgatgggggccagcttccgcagcactgcacagatcgtcgcgctggccggcagcgacctgctcacgatcagcccggacctgctcgagcaactggcacgcaccgaaggcacggtggagcgcaagctgtcggtcgatctcgcacaggcaggcaatattgcccgcatcccggccgatgagccagccttccgctggcagctcaacgaagacgccatggccaccgagaaactcgctgaaggcatccgtctgtttgctgcggacgcaatcaagctggaaaagctggttgcggaaatcgccggctaa

SEQ ID NO: 98614 - protein, 341 aa, Ralstonia eutropha JMP134
MPQRRRESAAFPPPHDDCNDLPIMNQLEQLKQFTTVVADTGDFQLMKQYTPQDATTNPSLILKAVQKPEYRGLLEQAVRDYHNEGGVDAVMDGVLIAFGCEILAIVPGRVSTEVDARLSFDTEATVEKARHLIRLYEQRGVARERVLIKIASTWEGIRAAEILQREGIRCNMTLLFSLVQAVACAEAGAQLISPFVGRILDWYKKQAGDQWDAAANAGDNDPGVRSVRQIYDYYKKFGYNTEVMGASFRSTAQIVALAGSDLLTISPDLLEQLARTEGTVERKLSVDLAQAGNIARIPADEPAFRWQLNEDAMATEKLAEGIRLFAADAIKLEKLVAEIAG

SEQ ID NO: 98615 - DNA, 1173 bp, Synechococcus sp. CC9605
  CDS (1)..(1173): transl_table=11
atggccagcctgctcgatcagctttcacaaatgaccgtggtcgttgccgacacgggtgatctggaggcgatccgtaagttcacccctcgcgatgccaccaccaacccgtcattgatcctggctgccgcacagattccggcttatcagaacctgattgatgaggctttgcgctcgtcgcgcaagttgatgggcagcgatgcagcggtggaagacgtggtgcgggaagctctggatgagatcagtgtgatcttcggcaaggagattctcaagattgttccccgccgtgtgtcaacggaggtggatgcccgcctgagttttgacaccgacgccacgattgaaaaagggcgcaagctgattcgtctgtacaacgatgccggcatcagcaacgatcgcgttctgatcaaaattgcctccacctgggaaggcatcaaagccgccgaggtgctggagcaagaggggattcactgcaacctcacccttctgtttggtttcggtcaggccattgcctgtgccgaagccggcgtcactctgatctcccccttcgtggggcgcatcctggactggtacaaggctgaaaccggacgcgattcttaccccgggcctgaggatccgggtgtgatttcggtgaccaagatctttaactactacaaaacccacggctacgacacggaggtgatgggggcgagcttccgcaacattgatgagatcacggagttggccggttgtgatctgctcacgatttcaccgaagttgctggatcagctccgtgagactgatgctgtgctgacccagaaattggatgccacccatcccaccgatggcgaagccaagatccacgtcgatcgcgccacctttgatgcactgatgcaggacgatcggatggccagcgacaaactcaccgagggcattaaaggctttagcaaggccattgaaaccctggagcatcaactggcccatcgtctggctgaactggagggtggatctgccttccgccatgccgtttccgagatcttcatgctcaacgatatgaacggcgatggctcgatcacccgcgatgaatggctcggcagcgatgccatttttgatgccctggatcaggaccacgacggtctgatctctcaggaggacgtgcgtcaaggctttggcgcagcgctgactctgacctcggtctga

SEQ ID NO: 98616 - protein, 390 aa, Synechococcus sp. CC9605
MASLLDQLSQMTVVVADTGDLEAIRKFTPRDATTNPSLILAAAQIPAYQNLIDEALRSSRKLMGSDAAVEDVVREALDEISVIFGKEILKIVPRRVSTEVDARLSFDTDATIEKGRKLIRLYNDAGISNDRVLIKIASTWEGIKAAEVLEQEGIHCNLTLLFGFGQAIACAEAGVTLISPFVGRILDWYKAETGRDSYPGPEDPGVISVTKIFNYYKTHGYDTEVMGASFRNIDEITELAGCDLLTISPKLLDQLRETDAVLTQKLDATHPTDGEAKIHVDRATFDALMQDDRMASDKLTEGIKGFSKAIETLEHQLAHRLAELEGGSAFRHAVSEIFMLNDMNGDGSITRDEWLGSDAIFDALDQDHDGLISQEDVRQGFGAALTLTSV

SEQ ID NO: 98617 - DNA, 1020 bp, Francisella tularensis subsp. holarctica
  CDS (1)..(1020): transl_table=11
atgtatctgaagttgtatactttatataaagagtatacaaattataaaacaatcatgcaaaaatcagtattagaacagcttaagcaagtaacaatggtagtggcagatactggagattttgagttaatcaaaaaatacaaaccagttgatgctacaacaaacccgaatttaatacttaaggttgttaaagaacagaaatattctaatttagttgcaaaaactatcagcaaagtaaaagctaataatccagatcttaatagtgatgaccttgtcaaagaaatagctatagagattttagttagctttggtattaaaatacttgatgttattgagggtaaggtatcaagcgaggtagatgctagagtatctttcaatagtgcagcaactatcgattatgctaaaaggattattgcaagatatgagtctaacggtatctcaaaagatagagttttgataaaaattgccgcaacatgggaaggtatcaaagctgctaagttactacaaaaagaaggtattaattgtaatcttacgcttatttttgataaagcccaagctaaagcatgtgctgaggcaggtgtatatctagtttcaccatttgtaggtagaattacagattggcaaatacagcaaaataatttaaaaacttttccagcgattgctgatgatgatggtgttaactctgtaaaagcaatatacaaattatataaaagtcatggttttaagacaatagtaatgggtgctagctttagaaatgttgagcaagttattgctttagctggctgtgatgctttgactatatctccagttttgcttgaggagcttaaaaatcgtgatgaacacttagaagttaaattaacaaaaaatgatgacgttgttactcaatcaccacaaattagcgaagcagattttcgttggttaatgaatgaaaatgctatggccactcataaattagcagaagggattagattatttacaaaagatacaattgagttagaaaacataattaaacagaatttataa

SEQ ID NO: 98618 - protein, 339 aa, Francisella tularensis subsp. holarctica
MYLKLYTLYKEYTNYKTIMQKSVLEQLKQVTMVVADTGDFELIKKYKPVDATTNPNLILKVVKEQKYSNLVAKTISKVKANNPDLNSDDLVKEIAIEILVSFGIKILDVIEGKVSSEVDARVSFNSAATIDYAKRIIARYESNGISKDRVLIKIAATWEGIKAAKLLQKEGINCNLTLIFDKAQAKACAEAGVYLVSPFVGRITDWQIQQNNLKTFPAIADDDGVNSVKAIYKLYKSHGFKTIVMGASFRNVEQVIALAGCDALTISPVLLEELKNRDEHLEVKLTKNDDVVTQSPQISEADFRWLMNENAMATHKLAEGIRLFTKDTIELENIIKQNL

SEQ ID NO: 98619 - DNA, 933 bp, Saccharophagus degradans 2-40
  CDS (1)..(933): transl_table=11
atgaccaacaagttagaacaacttaagcagttttccagcgtagtagccgacacgggcgatatcgaagccattaagcgctaccagcctttagatgcaaccaccaacccatcgttgctatttaaagccgcgcaattgccacagtacgcccctcttctagaaaaggcattggcagaatctagctctattgatgacgcctgtgaccgtctagctgtagcgattggctgcgaaattctaaaaatcgttcctggccgcgtttcaaccgaagtagatgcgcgtttgtctttcgataaaaacgcgtctattgataaagcccaccgcttaattgatatgtacgaagcaaacggcataggcaaagagcgcgtacttattaagctggcttcaacctgggaaggcattcgtgcggccgagcaacttcaaaaagaaggcatcgactgtaacctaacgttgttatttagcttcagccaagccgccgcttgtgccgacgccggtgttttcttaatttcgccatttgtgggccgtattttggattggtacaaagccaataccgataaaaaagaatacttaccacacgaagacccaggcgtaatttcggtaagccgcatttacaactactacaagcagcacgactacaaaaccgttgttatgggcgcaagcttccgcaacaccggtgagcttgaagagctagcaggctgtgaccgcttaacaattagcccagacctactagaagcacttgcgcaagatacaggtaaactagagcgtaaattgtcgccagaaaacagcggcgagcctattgctaagcttatcgaaaacgagtcgcaataccgcttctcgaataacgaagatgctatggctacccacaagttggccgaaggtattcgcaactttgctaaagatcagatcaaccttattaatcttctaaaaagcaaagcctag

SEQ ID NO: 98620 - protein, 310 aa, Saccharophagus degradans 2-40
MTNKLEQLKQFSSVVADTGDIEAIKRYQPLDATTNPSLLFKAAQLPQYAPLLEKALAESSSIDDACDRLAVAIGCEILKIVPGRVSTEVDARLSFDKNASIDKAHRLIDMYEANGIGKERVLIKLASTWEGIRAAEQLQKEGIDCNLTLLFSFSQAAACADAGVFLISPFVGRILDWYKANTDKKEYLPHEDPGVISVSRIYNYYKQHDYKTVVMGASFRNTGELEELAGCDRLTISPDLLEALAQDTGKLERKLSPENSGEPIAKLIENESQYRFSNNEDAMATHKLAEGIRNFAKDQINLINLLKSKA

SEQ ID NO: 98621 - DNA, 951 bp, Methylobacillus flagellatus KT
  CDS (1)..(951): transl_table=11
atggctaatttattcgatcaacttaaggaattcacgacgatcgtcgctgacactggcgatgtagaagcgatcaagagcgtgaagccttatgatgccaccaccaacccatccctgttgctcaaagcaagcaccattccccagtatgccccgctgatcgatgaggcaattgcctacgccaagtcccagagcggcgacaaggcgcaacaaatcgaagatgctgccgacaagctggctgtattgatcggcctggaaatcctcaaacatatcccaggcaagatttccactgaagtggatgcgcgcctgtcctttgataccgaggccatggtgcaaaagggacgcaagctgatcaagctttacgaggatgcaggtattgccaaggatcgcgtgctgatcaagctggcttccacttgggaaggcatcaaggctggtgaaatcctcgagaaggaaggcatcaactgcaacctgacattgctgttcagctttgcccaggcacgtgcctgtgctgaagccggtgtgttcctgatttccccgttcgttggccgtattcttgactggtacaaggccaagaccggcgaaacctacaccgctgaaaccgatcctggcgttcaatccgtgcgcaagatctacgcatattataaggaacacggctacaagaccgtggtgatgggggcatccttccgcaacaccggcgaaatcattgcgctggcaggttgcgatcgcctgactgtatctcctaatctgctggaagagctgaaggctaccgaaggcaagctggagcgcgtgctggtcgacaatggtgttaccaagcagcgtcctcccttgctgacagagaaggaattccgcttcgatctgaatgaagacgcaatggcaacggagaagctggcggaaggtatccgtggtttcgtagttgatcagaacaagctggaaaaggctctggccgaaaagctttaa

SEQ ID NO: 98622 - protein, 316 aa, Methylobacillus flagellatus KT
MANLFDQLKEFTTIVADTGDVEAIKSVKPYDATTNPSLLLKASTIPQYAPLIDEAIAYAKSQSGDKAQQIEDAADKLAVLIGLEILKHIPGKISTEVDARLSFDTEAMVQKGRKLIKLYEDAGIAKDRVLIKLASTWEGIKAGEILEKEGINCNLTLLFSFAQARACAEAGVFLISPFVGRILDWYKAKTGETYTAETDPGVQSVRKIYAYYKEHGYKTVVMGASFRNTGEIIALAGCDRLTVSPNLLEELKATEGKLERVLVDNGVTKQRPPLLTEKEFRFDLNEDAMATEKLAEGIRGFVVDQNKLEKALAEKL

SEQ ID NO: 98623 - DNA, 954 bp, Burkholderia xenovorans LB400
  CDS (1)..(954): transl_table=11
atgacaaccgcactcgatcaactcaagcaatacaccactgtcgtggccgataccggcgacttccagcaactggcccagtacaagccgcaagacgccaccaccaatccgtcgctgatcctgaaagcggtgcagaaagacgactacaagccgttgctggaaaagaccgtcaaggcgcacgcgtcgaaaccggtcggcgcgatcatcgaccagttgctgatcgcattcggcaccgaaattctcaagatcattccgggccgtgtctcgaccgaagtcgatgcgcgcctgtcgttcgacacggaaggctcgatcgccaagggccgcgaactgatcgcgctgtacaaagagcacggcatcggccgggagcgcgtgctaatcaaactcgcttccacgtgggaaggcattcgcgcggcggaagtgctgcaaaaggaaggcattcactgcaacatgacgctgctgttctcgctcgcccaggccgccgcctgcgccgaagcgggtgcgcagttgatctcgccgttcgtcggccggatttacgactggtacaaaaagaacgccggcagcgcgtgggacgaagcgaaagacggcggcgccaacgatccgggcgtcaaatccgtgcgccgcatctacgcgtactacaagaagttcggctacaagaccgaggtgatgggcgcgagcttccgcacgccgggccagattctggaactggccggctgcgatctgctgaccatcagcccggatctgctgcaaaagctgcatgagagcaccgagaaggtggagcgcaagctgtcgccggatatcgccaaagaatcggacatcgaacgtgtgccggtcgacgagtcgtcgttccgtttcctcgtcaacgacgaagcgatggccaccgaaaaactcgccgaaggtatccgcgccttcgccgccgacgcaatcaagctggaaaagctgatcgacgcgctgcgctaa

SEQ ID NO: 98624 - protein, 317 aa, Burkholderia xenovorans LB400
MTTALDQLKQYTTVVADTGDFQQLAQYKPQDATTNPSLILKAVQKDDYKPLLEKTVKAHASKPVGAIIDQLLIAFGTEILKIIPGRVSTEVDARLSFDTEGSIAKGRELIALYKEHGIGRERVLIKLASTWEGIRAAEVLQKEGIHCNMTLLFSLAQAAACAEAGAQLISPFVGRIYDWYKKNAGSAWDEAKDGGANDPGVKSVRRIYAYYKKFGYKTEVMGASFRTPGQILELAGCDLLTISPDLLQKLHESTEKVERKLSPDIAKESDIERVPVDESSFRFLVNDEAMATEKLAEGIRAFAADAIKLEKLIDALR

SEQ ID NO: 98625 - DNA, 954 bp, Haemophilus somnus 129PT
  CDS (1)..(954): transl_table=11
atgacaacacaattagacgctttgcgtaatatgaccgtggtagttgccgatacgggagatattgatgcgattaaaaaatatcaaccgcaagatgcaaccacaaatccctctttaattttaagtgcatcatcattaccgcaatatgctccattaattgatgaagcgattgcttatgcgaaagcaaaaagtgcggataaaacacagcaactaattgatgcagaagacaaactggcagtaaatatcggtttagaaattttaaaaattgttccgggacgtatttctactgaagtagatgcccgtctttcttatgatacacaagcaacggtagaaaaagcacgtaaacttatcgcactttataacgaagcaggtattagcaacgatcgtattttgatcaaaattgcttctacatggcaaggtattcgtgctgcagaaattcttgaaaaagaagggattaattgtaacttaacgctattgttctctgaagcacaggctcgagcttgtgctgaagcaggtgtttatttaatttcaccttttgtaggacgtattcttgactggtataaagcaaacagtgataagaaagaatatgcaccggcggaagatccaggcgtcatttctgttacaaaaatttacaattattataaacaatacggttataacactgttgttatgggagcaagtttccgtaatgtaggtgaaattactgaattggcaggttgcgatcgtttgactattgcaccggcattattaaaagaattacaagaaaatagcaccgcacttgtgcgtaaattggaatttaaaggtgaagttcaagcgaaacctcaaccgttaaccgaaagtcaattttattggcagcacaatagcgatccaatggcagttgaaaaattagctgacggtatccgtaaatttgctattgaccaagaaaaattggaaaaaatgttactagagaaattctaa

SEQ ID NO: 98626 - protein, 317 aa, Haemophilus somnus 129PT
MTTQLDALRNMTVVVADTGDIDAIKKYQPQDATTNPSLILSASSLPQYAPLIDEAIAYAKAKSADKTQQLIDAEDKLAVNIGLEILKIVPGRISTEVDARLSYDTQATVEKARKLIALYNEAGISNDRILIKIASTWQGIRAAEILEKEGINCNLTLLFSEAQARACAEAGVYLISPFVGRILDWYKANSDKKEYAPAEDPGVISVTKIYNYYKQYGYNTVVMGASFRNVGEITELAGCDRLTIAPALLKELQENSTALVRKLEFKGEVQAKPQPLTESQFYWQHNSDPMAVEKLADGIRKFAIDQEKLEKMLLEKF

SEQ ID NO: 98627 - DNA, 1170 bp, Trichodesmium erythraeum IMS101
  CDS (1)..(1170): transl_table=11
atggctaaaaatttgctagaacaactacgaaaagtaaccattgtagttgctgatacaggcgatattcaagcaattgaaaaatttcagccacgggatgcaactactaatccctcattaattactgctgctgctcagatgccacaatatcaagaaattgtggatgaaactttgaaaacagcaaggcaagaattgggaacagatgcaaccgcttctgatgtggcaaatttagcatttaagagattggcagttgcttttggactcaagattttacaaattgttcctgggcgggtatccacagaggttgatgcaagactatcctatgatacagaggcaacaatagctcaaggaagagatttaattgctcaatatgaagaggctggggtttcacgtgatcgtatcttgattaagattgcttctacttgggaagggatcaaagcagcagaagtgctggaaaaagaaggtattcactgcaacttaactctactgtttggtttgcatcaggctatcgcttgtgctgaagctggtgcgactttaatttctccttttgtgggaagaattttagactggtacaaaaaagaaactggacgagattcttatcccccagcagaagaccctggtgtcttatctgtaactaaggtctacaactactacaaaaagtttggttacaagaccgaagttatgggagctagcttccgtaatacaggagaaattacggaattagcgggttgtgatttattgactatttcaccagggctattgggtgagttagagtcaacaataggtgagttacctactaaactttctgatgagaaagctgctcagtctgatgcagaaaaaattctcatggataaagaaacttttgatcagatgcacgctgaagatcggatggcatctcaaaagttagatgaaggtattaaaggtttttccaaagcattagaatcattggaaaaactattagcagagcggttgactcgcctagaaggagtcacccatgcagcagaagatattttctatatctatgacctagatggtgatggttttattactcgcgaagagtgggcaggaagtgatgctgtatttgatgctctcgatatcaataaagatggaaaaatttctccagcagaaatggcatctggtttgggagcagtgtttgaattagctaaggtttag

SEQ ID NO: 98628 - protein, 389 aa, Trichodesmium erythraeum IMS101
MAKNLLEQLRKVTIVVADTGDIQAIEKFQPRDATTNPSLITAAAQMPQYQEIVDETLKTARQELGTDATASDVANLAFKRLAVAFGLKILQIVPGRVSTEVDARLSYDTEATIAQGRDLIAQYEEAGVSRDRILIKIASTWEGIKAAEVLEKEGIHCNLTLLFGLHQAIACAEAGATLISPFVGRILDWYKKETGRDSYPPAEDPGVLSVTKVYNYYKKFGYKTEVMGASFRNTGEITELAGCDLLTISPGLLGELESTIGELPTKLSDEKAAQSDAEKILMDKETFDQMHAEDRMASQKLDEGIKGFSKALESLEKLLAERLTRLEGVTHAAEDIFYIYDLDGDGFITREEWAGSDAVFDALDINKDGKISPAEMASGLGAVFELAKV

SEQ ID NO: 98629 - DNA, 957 bp, Shewanella sp. MR-4
  CDS (1)..(957): transl_table=11
atggcaaatacattagagcaactcaagtcatacactacgattgtggccgatactggcgatattgaagcgatcaaacgctatcagccagaagacgcaacgaccaacccatcactcattttaaaagcggctcaaattcccgagtacagtgctttaatcgacaatgctatcgcatgggctaaattacaaagtgctgatattgagcaacagattgatgatgccagcgataaacttgcagtgaacattggtgtcgagattttaaaactggtccctggccgtatttcgaccgaagtggatgcccgcttatccttcgataaagaaaaatccattgcgaaagcgcataagctagtacgtctgtaccaagaagcgggtgtagataaatctcgcattctgatcaaattagcctcaacttgggaaggcatttgtgccgccaaagagttagagcaagaaggcatcaactgtaacttaaccctactatttagctttgctcaagcacgtgcctgtgcagaagctggcgtgtacttaatttctccattcgttggccgtattctcgactggtacaaaaaagacacaggtaaagactatgacgcagtaaatgacccaggtgttgtttctgtgactgaaatttacaactactacaaacagcatggctataacacagtagtcatgggtgcaagtttccgtaatatcggtgaaatcatcgaattagcgggctgtgatcgcctgactattggcccttcattactcgaagagctggcaaactctcaagttactattcaacctaaactcattcctgccagcaccacagttgctgccggtgagcctttaaccgaagcgcaattccgctgggacttcaaccaagatcctatggctgtcgacaagttagcagaaggtatccgtaacttcgccatcgaccaaggcaaactcgaagtcatgctcaaggcaaaactggcaaactaa

SEQ ID NO: 98630 - protein, 318 aa, Shewanella sp. MR-4
MANTLEQLKSYTTIVADTGDIEAIKRYQPEDATTNPSLILKAAQIPEYSALIDNAIAWAKLQSADIEQQIDDASDKLAVNIGVEILKLVPGRISTEVDARLSFDKEKSIAKAHKLVRLYQEAGVDKSRILIKLASTWEGICAAKELEQEGINCNLTLLFSFAQARACAEAGVYLISPFVGRILDWYKKDTGKDYDAVNDPGVVSVTEIYNYYKQHGYNTVVMGASFRNIGEIIELAGCDRLTIGPSLLEELANSQVTIQPKLIPASTTVAAGEPLTEAQFRWDFNQDPMAVDKLAEGIRNFAIDQGKLEVMLKAKLAN

SEQ ID NO: 98631 - DNA, 957 bp, Shewanella sp. MR-7
  CDS (1)..(957): transl_table=11
atggcaaatacattagagcaactcaagtcatacactacgattgtggccgatactggcgatattgaagcgatcaaacgctatcagccagaagacgcaacgaccaacccatcactcattttaaaagcggctcaaattcccgagtatagcgctctaatcgacaatgctatcgcatgggctaaattacaaagtgctgatattgagcaacagattgatgatgccagcgataaacttgcagtgaacattggtgtcgagatcctaaaactggtcccaggccgtatttcgaccgaagtggatgcccgcttatccttcgataaagaaaaatccattgccaaagcgcataagctagtacgtctgtaccaagaagcgggcgtggataaatctcgcattctgattaaattagcctcaacttgggaaggcatttgtgccgccaaagagttagagcaagaaggtatcaactgtaacttaactctactatttagcttcgctcaagcacgtgcctgtgcagaagcgggcgtgtacttaatttctccattcgttggtcgcatactcgactggtacaaaaaagacacaggtaaagactatgacgcagtaaatgacccgggtgttgtttctgtgactgaaatttacaattactacaaacagcatggctataacacagtagtcatgggtgcaagtttccgtaatatcggtgaaatcatcgaattagcaggctgtgatcgcctgactattggcccttcattactcgaagagctggcaaactctcaagttgctattcaacctaaactcattcctgccagcaccacagttgctgccggtgagccgttaaccgaagcgcaattccgctgggacttcaaccaagatcctatggctgtcgacaagttagcagaaggtatccgtaacttcgccatcgaccaaggcaaactcgaagtcatgctcaaggcaaaactggcaaactaa

SEQ ID NO: 98632 - protein, 318 aa, Shewanella sp. MR-7
MANTLEQLKSYTTIVADTGDIEAIKRYQPEDATTNPSLILKAAQIPEYSALIDNAIAWAKLQSADIEQQIDDASDKLAVNIGVEILKLVPGRISTEVDARLSFDKEKSIAKAHKLVRLYQEAGVDKSRILIKLASTWEGICAAKELEQEGINCNLTLLFSFAQARACAEAGVYLISPFVGRILDWYKKDTGKDYDAVNDPGVVSVTEIYNYYKQHGYNTVVMGASFRNIGEIIELAGCDRLTIGPSLLEELANSQVAIQPKLIPASTTVAAGEPLTEAQFRWDFNQDPMAVDKLAEGIRNFAIDQGKLEVMLKAKLAN

SEQ ID NO: 98633 - DNA, 972 bp, Rhizobium leguminosarum bv. viciae 3841
  CDS (1)..(972): transl_table=11
ttgaccatgacatccaagcttgaccaacttcgcgagattaccaccgtggtcgccgataccggcgacatcgaagccgtcgcccgcctgaagccggtcgattgcacgacgaacccgagcatcgtgctcaaggctctcggcacgccgatgtttgccgacgccatcaaggaagccgtcgcctggggcaagaagcagggcggcaatccggaagccgtttcttctgccgtcgccgatcgtctcgccatctccgtcggtgcagccctggtgaagctcgtcccaggccgcgtctcgaccgaagtcgacgccgatctttccttcgataccgaggcttcgcttgccaaggcgcgcgcaatcatcgccgcctacaaggatcgcggcatcggccaggaccgcatcctcatcaagcttgcttcgacctgggaaggcattcgcgccgcagaagtgctgcagaaggaaggcatcgactgcaacctgacgcttctcttcagcaaggcccaggcgatcgcctgcgccgacgccaaagtgttcctgatctcgcccttcgtcggccgcatcctcgactggtacaagaagtcgaccggcaaggactacaccgccgaggaagatccgggcgtcgtctccgttcgtgaaatctacaactactacaaggcgaacgacatcaagacgatcgtcatgggcgcctccttccgcagtgccggcgaaatcgaagcccttgccggctgcgaccgcctgaccatcagcccgaacctgctcgacgagctggccaaggatgaaggcaagctggagcgcaagctctcgccggagagccgcaagccggacccgaaggtctcggtcgacgagaagaccttccgctggatgatgaacgaagacgcgatggcgacggaaaaacttgccgaaggcatccgcgccttcgccaaggatctgggaacgttgcgcaccatggtgcagaaggaactgcagctcgccgccgcctga

SEQ ID NO: 98634 - protein, 323 aa, Rhizobium leguminosarum bv. viciae 3841
MTMTSKLDQLREITTVVADTGDIEAVARLKPVDCTTNPSIVLKALGTPMFADAIKEAVAWGKKQGGNPEAVSSAVADRLAISVGAALVKLVPGRVSTEVDADLSFDTEASLAKARAIIAAYKDRGIGQDRILIKLASTWEGIRAAEVLQKEGIDCNLTLLFSKAQAIACADAKVFLISPFVGRILDWYKKSTGKDYTAEEDPGVVSVREIYNYYKANDIKTIVMGASFRSAGEIEALAGCDRLTISPNLLDELAKDEGKLERKLSPESRKPDPKVSVDEKTFRWMMNEDAMATEKLAEGIRAFAKDLGTLRTMVQKELQLAAA

SEQ ID NO: 98635 - DNA, 957 bp, Shewanella sp. ANA-3
  CDS (1)..(957): transl_table=11
atggcaaatacattagagcaactcaagtcatacactacgattgtggccgatactggcgatattgaagcgatcaaacgctatcagccagaagacgcaacgaccaacccatcactcatcttaaaagcggctcaaatccccgagtatagagctctaatcgacaatgccattgcatgggctaaattacaaagtgctgatattgagcaacagattgatgatgccagcgataagcttgccgtgaacattggcgtggaaattctgaaactggttccaggccgtatttcaactgaagtcgatgcccgcttatccttcgataaagaaaaatccattgcgaaagcgcacaaactagtgcgtctgtaccaagaagctggcgtggataaatctcgcattctgatcaaattagcctcaacttgggaaggcatttgtgccgccaaagagttagagcaagaaggcatcaactgtaacttaaccctactatttagcttcgctcaagcgcgtgcctgtgctgaagctggcgtgtacttaatttctccattcgttggccgcatcctcgactggtacaaaaatgatacaggtaaagactatgacgccgtaaatgatcctggtgtcgtttctgtgactgaaatttacaactactacaaacagcatggctataacacggtagttatgggtgcaagtttccgtaatatcggtgaaatcatcgaattagcgggttgtgaccgcctgactattggcccttcattactcgaagagctggcaaactctcaagttgctattcaacctaaactgcttcctgccagcaccacggttgctgcgggtgaacctttaaccgaagcgcaattccgctgggacttcaaccaagatcctatggctgtcgacaagttagcagaaggcatccgtaacttcgccatcgaccaaggtaaactcgaagtcatgctcaaggcaaaactggcaaactaa

SEQ ID NO: 98636 - protein, 318 aa, Shewanella sp. ANA-3
MANTLEQLKSYTTIVADTGDIEAIKRYQPEDATTNPSLILKAAQIPEYRALIDNAIAWAKLQSADIEQQIDDASDKLAVNIGVEILKLVPGRISTEVDARLSFDKEKSIAKAHKLVRLYQEAGVDKSRILIKLASTWEGICAAKELEQEGINCNLTLLFSFAQARACAEAGVYLISPFVGRILDWYKNDTGKDYDAVNDPGVVSVTEIYNYYKQHGYNTVVMGASFRNIGEIIELAGCDRLTIGPSLLEELANSQVAIQPKLLPASTTVAAGEPLTEAQFRWDFNQDPMAVDKLAEGIRNFAIDQGKLEVMLKAKLAN

SEQ ID NO: 98637 - DNA, 951 bp, Acidovorax sp. JS42
  CDS (1)..(951): transl_table=11
atgaaccaactcgacgcgctcaagcagtacaccaccgtggtggccgacaccggcgatttcaagcagctggcccagttccagccgcaagacgccaccaccaacccttcgctgatcctcaaggccgtgcaaaagcccgagtacgcgccgctgctcaaggactgcgtgacgcgctggcatggccgcgccatcgacgagctgatggaccgcctgatcgtgcgtttcggctgcgagatcctgtcgatcatccctgggcgcgtgtccaccgaggtggatgcacgcctgtcgttcgataccgcagcgaccgtggcgcgtgcggagcgcatcgtggagctgtaccaggccgaagggctgcacatcgaccgcgtgctcatcaagatcgccgccacgtgggagggcatccaggccgcgcgccaactggagcagcgcggcatccacaccaaccttacgctgctgttttcgtttgcacaggcggtggcctgtggtcaggcgaaggtgcagctcatttcgcccttcgtcgggcgcatttacgactggtacaagaagcaggccggcgcaaactgggacgaggccgccatggccggcgccaatgacccgggcgtgcagtccgtgcgcgccatctacaaccattacaaacacttcggcatcggcaccgaggtcatgggtgcgagttttcgcaacaccgggcagatcgtcgcgctggcgggctgcgacctgctgaccattgcccccgaactgctggcccagctggccgccagcaatgctccggtggcacgcgtgctcgaccccgaggcggcacgccgcgtcgcgctgcagccggtgcagtacgacgaggcgggctttcgctatgcgctcaacgccgacgccatggccaccgagaagctggctgaaggcatccgcgcatttgcggcggacgcggccaagctggaacaactgatgcaagccgctgcatga

SEQ ID NO: 98638 - protein, 316 aa, Acidovorax sp. JS42
MNQLDALKQYTTVVADTGDFKQLAQFQPQDATTNPSLILKAVQKPEYAPLLKDCVTRWHGRAIDELMDRLIVRFGCEILSIIPGRVSTEVDARLSFDTAATVARAERIVELYQAEGLHIDRVLIKIAATWEGIQAARQLEQRGIHTNLTLLFSFAQAVACGQAKVQLISPFVGRIYDWYKKQAGANWDEAAMAGANDPGVQSVRAIYNHYKHFGIGTEVMGASFRNTGQIVALAGCDLLTIAPELLAQLAASNAPVARVLDPEAARRVALQPVQYDEAGFRYALNADAMATEKLAEGIRAFAADAAKLEQLMQAAA

SEQ ID NO: 98639 - DNA, 1005 bp, Nostoc punctiforme PCC 73102
  CDS (1)..(1005): transl_table=11
atgtctaagaatttactagaacaattgcgagaagtgactgttgtggtcgcggatacgggggatatccaggcaattgaaaagttcaaaccccaagatgccaccaccaatccttctctgattactgctgcggcgcaaatgccagaatatcagggaattgtcgatcaaactttactgcaagcgaagaaagatgctggagacggagccacccaagcacagatagtttctctagcttttgaccgtttagcagttgcttttggattaaagattttacaaattattcccggtcgtgtgtctacagaagtagatgctcgcttgtcctacgataccgaagctactctgactaaagcacgggatttaattgcccagtataaagctgctggaattggccgcgatcgcgttttaattaaaatcgccagcacttgggaaggtattcgcgctgcggaaattcttgaaaaagaaggtattcactgtaaccttaccttgttgtttggtcttcaccaagcgatcgcctgtgcagaagccggcgttaccctaatttctcctttcgtcggtcggattcttgactggtacaaaaaagataccggacgcgatagctacccagcaaccgaagatcccggagttttgtcagtcaccaaaatctacaactactacaagaaattcggctataaaaccgaagttatgggagctagcttccgcaaccttggtgaaataactgaacttgcaggtagcgatttgttgacaatttctccatcacttttggctgaattgcagtcaactgttgcagaactgccacgtaaacttgaccccgccaaggcagcaagtttgtcaatcgaaaagatatccattgacaaagctagctatgacaaaatgcacgctgctgaccgcatggcaactgacaaactagacgagggcatcaaaggtttcaccaaggcattagaagaccttgaaaaacttttggcagaccgactagttcgccttgaaggagaggtagtagcaagccattaa

SEQ ID NO: 98640 - protein, 334 aa, Nostoc punctiforme PCC 73102
MSKNLLEQLREVTVVVADTGDIQAIEKFKPQDATTNPSLITAAAQMPEYQGIVDQTLLQAKKDAGDGATQAQIVSLAFDRLAVAFGLKILQIIPGRVSTEVDARLSYDTEATLTKARDLIAQYKAAGIGRDRVLIKIASTWEGIRAAEILEKEGIHCNLTLLFGLHQAIACAEAGVTLISPFVGRILDWYKKDTGRDSYPATEDPGVLSVTKIYNYYKKFGYKTEVMGASFRNLGEITELAGSDLLTISPSLLAELQSTVAELPRKLDPAKAASLSIEKISIDKASYDKMHAADRMATDKLDEGIKGFTKALEDLEKLLADRLVRLEGEVVASH

SEQ ID NO: 98641 - DNA, 954 bp, Haemophilus somnus 2336
  CDS (1)..(954): transl_table=11
atgacaacacaattagacgctttgcgtaatatgaccgtggtagttgccgatacgggagatattgatgcgattaaaaaatatcagccgcaagatgcaaccacaaatccctctttaattttaagtgcatcatcattaccacaatatgctccattaattgatgaagcgattgcttatgcgaaagcaaaaagtgcggataaaacacagcaactaattgatgcagaagacaaactggcagtaaatatcggtttagaaattttaaaaattgttccgggacgtatttctactgaagtagatgcccgtctttcttatgatacacaagcaacggtagaaaaagcacgtaaacttatcgcactttataacgaagcaggtattagcaacgatcgtattttgatcaaaattgcttctacatggcaaggtattcgtgctgcagaaattcttgaaaaagaagggattaattgtaacttaacgctattgttctctaaagcacaggctcgagcttgtgctgaagcaggtgtttatttaatttcaccttttgtaggacgtattcttgactggtataaagcaaacagtgataagaaagaatatgcaccggcggaagatccaggcgtcatttctgttacaaaaatttacaattactataaacaatacggttataacactgttgttatgggagcaagtttccgtaatgtaggtgaaattactgaattggcaggttgcgatcgtttgactattgcaccggcattattaaaagaattacaagaaaatagcaccgcacttgtgcgtaaattagcgtttaaaggtgaagttaaagcaaaacctcaaccgttaaccgaaagccaattttattggcaacacaatagcgatccaatggcagttgagaaattagctgacggtatccgtaaatttgctattgaccaagaaaaattggaaaaaatgttactagagaaattctaa

SEQ ID NO: 98642 - protein, 317 aa, Haemophilus somnus 2336
MTTQLDALRNMTVVVADTGDIDAIKKYQPQDATTNPSLILSASSLPQYAPLIDEAIAYAKAKSADKTQQLIDAEDKLAVNIGLEILKIVPGRISTEVDARLSYDTQATVEKARKLIALYNEAGISNDRILIKIASTWQGIRAAEILEKEGINCNLTLLFSKAQARACAEAGVYLISPFVGRILDWYKANSDKKEYAPAEDPGVISVTKIYNYYKQYGYNTVVMGASFRNVGEITELAGCDRLTIAPALLKELQENSTALVRKLAFKGEVKAKPQPLTESQFYWQHNSDPMAVEKLADGIRKFAIDQEKLEKMLLEKF

SEQ ID NO: 98643 - DNA, 948 bp, Actinobacillus pleuropneumoniae serovar 1 str. 4074
  CDS (1)..(948): transl_table=11
atgagccaattagatgctttacgtgaaatgaccgttgttgttgcagacactggtgacattgaagcgatcaaacaatatcaaccgcaagatgcaactactaacccgtctttaattttaagtgcgtctgcattaccgcaatacgcttcattaattgatgatgcagtagcttatgctaaagcaagaagtgatgataaagcccagcaacttattgatgcggaagataagttagccgtgaatattggtttagaaattcttaaaatcgtaccgggacgtatttctacggaagttgatgctcgcctttcttacgatacgaaagcaacaattgagaaagctcgccaaattatgaaactttataatgacgctggcattagtaatgatcgtattcttattaaaatcgcttcaacttggcaaggtatccgtgcggcggaagtgctagagaaagaaggtatcaactgtaacttaaccttattattctctcaagcgcaagctcgtgcgtgtgcggaagcaggcgtttacttaatctctccgtttgttggtcgtatcttagactggtataaagcagcagagaaaaaagaatatgcaccggcagaagatccgggggtaatttctgttacaaatatctataactactacaaacagtacggctatcaaactgtggttatgggcgcaagtttccgtaacgtaggtgaaattaccgaaatcgcaggctgtgaccgtttaaccattgctccgccattattaaaagaacttgctgaaagcaatgcccctcttgttcgtaaattagaatataaaggtgaagtgaaaactcgtccggcaccattaacagaagcggaattctactggcaacataaccaagacccaatggctgttgaaaaattagcggaaggtatccgtaaatttgcagtagatattgagaaattagaagcaatgcttgccgctaaactttaa

SEQ ID NO: 98644 - protein, 315 aa, Actinobacillus pleuropneumoniae serovar 1 str. 4074
MSQLDALREMTVVVADTGDIEAIKQYQPQDATTNPSLILSASALPQYASLIDDAVAYAKARSDDKAQQLIDAEDKLAVNIGLEILKIVPGRISTEVDARLSYDTKATIEKARQIMKLYNDAGISNDRILIKIASTWQGIRAAEVLEKEGINCNLTLLFSQAQARACAEAGVYLISPFVGRILDWYKAAEKKEYAPAEDPGVISVTNIYNYYKQYGYQTVVMGASFRNVGEITEIAGCDRLTIAPPLLKELAESNAPLVRKLEYKGEVKTRPAPLTEAEFYWQHNQDPMAVEKLAEGIRKFAVDIEKLEAMLAAKL

SEQ ID NO: 98645 - DNA, 954 bp, Haemophilus influenzae R2866
  CDS (1)..(954): transl_table=11
atgacaacacagttagattcacttcgtaatatgaccgtcgtcgtagctgatactggcgatattgatgcaatcaaaaaataccaaccacaagatgcaacaacaaacccatcattaattctaagcgcatctgcacttccacaatatgcgccattaattgatgaagcggtagcttatgcaaaagctcaaagcaatgataaagcacagcaacttattgatgcagaagataaattagcggtaaacatcggtttagaaattttaaaaatcgttccgggacgtatttcaacagaagtagatgctcgcctttcttacgatacccaagcaacggttgaaaaagcgcgtaaattaattgcactttataatgcagcaggcatctcaaatgatcgtattttgattaaaatcgcttccacatggcaaggtatccgagctgcagaaatccttgaaaaagaaggcattaactgtaacttaaccttattattctctgaagcacaagctcgtgcttgtgcagaagctggcgtttacttaatttcgccatttgtaggtcgtattttagactggtacaaagcaaactccgacaaaaaagaatatgcgccagcagaagatccaggcgttatttctgtcaccaaaatctataattactacaaagaatatggctacaacaccgttgtgatgggcgcgagcttccgtaatgtaggcgaaattactgaacttgcaggttgcgatcgcttaaccattgcaccagcattactgaaagaattacaagaaaattcaaccgcacttgtacgcaaactagaatataaaggcgaagtaaaagcgaaaccacagccattaacagaagctgagttctactggcaacataacggcgatgctatggctgttgaaaaattagcagagggtattcgtaaatttgctattgaccaagaaaaattggaaaccatgctttcagcaaaactttaa

SEQ ID NO: 98646 - protein, 317 aa, Haemophilus influenzae R2866
MTTQLDSLRNMTVVVADTGDIDAIKKYQPQDATTNPSLILSASALPQYAPLIDEAVAYAKAQSNDKAQQLIDAEDKLAVNIGLEILKIVPGRISTEVDARLSYDTQATVEKARKLIALYNAAGISNDRILIKIASTWQGIRAAEILEKEGINCNLTLLFSEAQARACAEAGVYLISPFVGRILDWYKANSDKKEYAPAEDPGVISVTKIYNYYKEYGYNTVVMGASFRNVGEITELAGCDRLTIAPALLKELQENSTALVRKLEYKGEVKAKPQPLTEAEFYWQHNGDAMAVEKLAEGIRKFAIDQEKLETMLSAKL

SEQ ID NO: 98647 - DNA, 1173 bp, Crocosphaera watsonii WH 8501
  CDS (1)..(1173): transl_table=11
atggcaacattattagaacaattgagagaatttaccgttgttgttgctgatacaggggatattcaagccattgaaacctttaccccccgtgatgccacaactaacccttctttaattaccgcagcagcccaaatgccacaatatcagtccattgtggatgatactttaaagactgctagaaaagagttagggaaagatgccgatgagtcagcagttgttaccctggcttttgaccgtttagcggttgcttttgggttaaaaattctcgaaattatcccaggccgtgtttcaacagaagtagatgcccgtttatcttatgatactgaggcaactctggaaaaagctcgttatctaatttctgaatacgaaaaagcaggggtttcccgcgatcgcattttaattaaaattgcctctacttgggaaggtattaaagcagcggaagttttagaaaaggaagggattcactgcaatctaactttactatttggaatgcaccaagccgtagcttgtgcagaagctaatgttactctaatttctccctttgttggtcgtattttagactggtacaaaaaagaaacaggaaaagagtacgctccgacggaagatcctggagtaatgtctgttaccaccatctacaattattacaaaaaatttggccacaaaaccgaagttatgggggcaagtttccgtaatataggcgaaatttgtgagttggctggttgcgatttattaactatttctcctaagttattagatcagttaaattccaccgaagaaactttacctcgtaagttagatcctgaagcggctgctaagatggatatcgcaaaaattgctatggataaagcaatttttgataagatgcaccaagaagataaaatggcttatgaaaagctagatgaaggcatcaaagggtttactaaagccttagaaactttagaagaaatgctcaaagagcgactaactcgcatcgaaggagaaacacgggttaataacgctgctgctgatattttccgagtttatgatttagatggcgatggtttcattactcgtgaagaatgggcaggaaccgatgtcgtttttgatgctattgatattaaccacgatggtaaaattacccccgaagaaatggccgcaggtttaggggctgctatttgtttagttgaagcttaa

SEQ ID NO: 98648 - protein, 390 aa, Crocosphaera watsonii WH 8501
MATLLEQLREFTVVVADTGDIQAIETFTPRDATTNPSLITAAAQMPQYQSIVDDTLKTARKELGKDADESAVVTLAFDRLAVAFGLKILEIIPGRVSTEVDARLSYDTEATLEKARYLISEYEKAGVSRDRILIKIASTWEGIKAAEVLEKEGIHCNLTLLFGMHQAVACAEANVTLISPFVGRILDWYKKETGKEYAPTEDPGVMSVTTIYNYYKKFGHKTEVMGASFRNIGEICELAGCDLLTISPKLLDQLNSTEETLPRKLDPEAAAKMDIAKIAMDKAIFDKMHQEDKMAYEKLDEGIKGFTKALETLEEMLKERLTRIEGETRVNNAAADIFRVYDLDGDGFITREEWAGTDVVFDAIDINHDGKITPEEMAAGLGAAICLVEA

SEQ ID NO: 98649 - DNA, 951 bp, Pseudoalteromonas tunicata D2
  CDS (1)..(951): transl_table=11
atgagcgcagtattagcggctttaaaagcccaatcaaccatcgttgccgacacgggcgatattgaacaaattaaaaagcacaaaccacaagatgcaaccactaatccatctttattattaaatgcgagtaaaatcgaagcttaccaacctttattacagcgtgcttgggcctatgccaaagaacatcaatctgatgtagccaaacaagttgagttagcgtgtgattattttgcggtattaatcggaaaagaaattgccgatgtcgtgcctggttatatatcaacagaagtggatgcgcgtttatcttttgatagccaagcgatgatagcaaaggcaaaagagctgttagctttatatcagttagaaggtgtaagccaagataaagtgcttattaaaatagcctctacttgggaaggcataaaagcggctgaagtgcttgaacaagaaggcattaaatgtaatttaacgctattatttagccaagcccaagcccgtgcctgtgccgatgcaaacgtattcttaatctctccttttgttggtcgtattttagattggcacgttgctaacggcatggaaaaaccaaccgatccactacaagatcctggtgtgcaatctgttcgtaatatttatgaattttataaaacgcacggttataataccgttgtgatgggtgcaagctttcgcaatacaggcgaaatattggcattaagcggttgtgataaattgacgattagccccgctctgctttctgaactagaaaatatgacagatgcacccaactatcaacttgagaaatttaccgttcaatttgataaaccagacgcattaactgaaagccaatttcgctggttacataaccaagaccctatggcgacagaaaaattagcagaaggtattcgcgcatttgccgctgcacaagtcgaccttgaaaattgctttaaaaaactttaa

SEQ ID NO: 98650 - protein, 316 aa, Pseudoalteromonas tunicata D2
MSAVLAALKAQSTIVADTGDIEQIKKHKPQDATTNPSLLLNASKIEAYQPLLQRAWAYAKEHQSDVAKQVELACDYFAVLIGKEIADVVPGYISTEVDARLSFDSQAMIAKAKELLALYQLEGVSQDKVLIKIASTWEGIKAAEVLEQEGIKCNLTLLFSQAQARACADANVFLISPFVGRILDWHVANGMEKPTDPLQDPGVQSVRNIYEFYKTHGYNTVVMGASFRNTGEILALSGCDKLTISPALLSELENMTDAPNYQLEKFTVQFDKPDALTESQFRWLHNQDPMATEKLAEGIRAFAAAQVDLENCFKKL

SEQ ID NO: 98651 - DNA, 951 bp, Photobacterium sp. SKA34
  CDS (1)..(951): transl_table=11
atgagcacaaaattagaacaactacgcgcactaactactgttgtagcagatactggcgatattaaagacattaaaaaataccaaccagaagacgcgacaactaacccatctttgatcttaaaagctgcacaaatcgctgagtacgcaccacttatcgatgcttctatcgcttacgcaaaagcacaaggcgatgataaagcacaacaagtacaagatacttgcgatatgcttgcagtaagcattggtaaagaaattcttaacgttgtacctggtcgtatttcaactgaagttgatgctcgcctttcttacgatacagaaggcagtgttacaaaagcacgtcaacttatcaaaatgtacaacgatgcaggtattagcaacgatcgtatcctcatcaaacttgcttctacttgggaaggtatccgtgcagcggaaatcctagaaaaagaaggtatcaactgtaacctaactcttctattctcttttgcgcaggctcgtgcttgtgctgaagctggcgtcttccttatttcgccattcgttggtcgtattatggactggtacaaagcgaaagaaggtcgtgattttgcaccacaagaagatccaggtgtgatttctgtaacgaatatctataactactacaaagaacacggttacaatactgtagttatgggcgcaagcttccgtaatactggtgaaattcttgaactggcaggttgtgaccgtttaacgattagcccacaactccttcaagaactagaagaagcacaaggtgacgttgttgagaaactaaaagcaacaacagatctgaaagatcgtccagcagcaatgacacatgctgagttcttatgggaacataatcaagatccaatggcagttgagaaactagcggaaggcatccgtaacttcgcaattgaccaaggtaaacttgaagcaatgattgcagagcgtctttaa

SEQ ID NO: 98652 - protein, 316 aa, Photobacterium sp. SKA34
MSTKLEQLRALTTVVADTGDIKDIKKYQPEDATTNPSLILKAAQIAEYAPLIDASIAYAKAQGDDKAQQVQDTCDMLAVSIGKEILNVVPGRISTEVDARLSYDTEGSVTKARQLIKMYNDAGISNDRILIKLASTWEGIRAAEILEKEGINCNLTLLFSFAQARACAEAGVFLISPFVGRIMDWYKAKEGRDFAPQEDPGVISVTNIYNYYKEHGYNTVVMGASFRNTGEILELAGCDRLTISPQLLQELEEAQGDVVEKLKATTDLKDRPAAMTHAEFLWEHNQDPMAVEKLAEGIRNFAIDQGKLEAMIAERL

SEQ ID NO: 98653 - DNA, 948 bp, Oceanospirillum sp. MED92
  CDS (1)..(948): transl_table=11
atgaatcagttagaaaagttaaaacagattacgaccgttgtggctgataccggtgatattgaagcgattgcacgttttaaacccgttgacgcgacaaccaacccatccctgctactgaaggcagcgcagctgcctcaatatgctgaattgctgactaaagctaaaaactgggcagatgagcagggtggaagccagcaggaagtgctggacaacatgaccgacaaactcgcggttgagatcggtaaagagatcctgaaaatcattccgggacgtatatctactgaagttgatgcacgcctgtcttttgatactcaagcgactcttcagcgcgcgcgcaagcttatcgcattgtacgaagattctaatgttagccgtgaccgtatcctgatcaagatcgcttcaacctgggaaggtattcaggccgcacgcgagcttgaacaggaagggatcaactgtaatctgacgttgctgttcagctttgctcaggcagccgcttgcgcggatgctggtgtttacctgatctcaccttttgttggccgtattttggattggttcaaagccaatgaagaaggcgacttcacaggggcaaatgatccgggtgttcaatcggtttccggaatctacaactattacaaagctaatgattacaacaccatcgtcatgggtgccagcttccgtaatatcagtgagatccaggaactggcaggctgtgatcgcctaacgattgcgccagcattgatgcaggaactggaagattcggcagatgaactgccaaccaagctatctgctgattcagcggcttccgatcagggccgcctggtactgaatgaagcggagttccgctggatgatgaatgaagacgcaatggcgacagagaaactggcggaaggtatccgtaattttgccgctgaccagattaaacttgagaaactcctttctgaagtttaa

SEQ ID NO: 98654 - protein, 315 aa, Oceanospirillum sp. MED92
MNQLEKLKQITTVVADTGDIEAIARFKPVDATTNPSLLLKAAQLPQYAELLTKAKNWADEQGGSQQEVLDNMTDKLAVEIGKEILKIIPGRISTEVDARLSFDTQATLQRARKLIALYEDSNVSRDRILIKIASTWEGIQAARELEQEGINCNLTLLFSFAQAAACADAGVYLISPFVGRILDWFKANEEGDFTGANDPGVQSVSGIYNYYKANDYNTIVMGASFRNISEIQELAGCDRLTIAPALMQELEDSADELPTKLSADSAASDQGRLVLNEAEFRWMMNEDAMATEKLAEGIRNFAADQIKLEKLLSEV

SEQ ID NO: 98655 - DNA, 966 bp, marine gamma proteobacterium HTCC2207
  CDS (1)..(966): transl_table=11
atgagcaacactaagagtaaactcactcaactcaaagagatgaccaccgtggttgccgacactggcgattttgatgccattgctcagtattctcctgaagatgccacaactaacccatcactgctcttaaaagctgcccagatgcctgcctaccgaggtctggttgactcaattgtctctacaacaatgaatggccgtcagtcgagcaatgagcagctggcagattgcatggacagactggcagtgggttttggtgaaaaaattctcgaacagattcccggtcgtgtttccaccgaagtggatgcgcgcctttcctttgatgccaatgcgtctatcgccaaagcgcgtcatctgatcaacctctatgaacaggccggcattggtcgcgagcgcgtgttgattaaaatggcgtcgacctgggaaggtattcgcgctgcagaacagctggaaaaagaagggattaactgcaacctgacactattgtttaactttactcaggcagtggctgctgcagatgctggcgcctttttgatctcgccgtttgtcggccgtattctcgactggtataaaaactcaactggcctcactgagtatgagccggctgatgatccgggcgtacagtcggtgacgcgaatctataattactacaagcagaccggctacaacacggtggttatgggtgcgagctttagaaataccgaagagatcaccgagctggccggctgtgaccgcctgactattagcccgcagttactgcaggcactggatgatgattacggtactctggagcgcagattggatccggccgacaccggctcgacgattcactacagccttggtggtgagagcggattccgctttgagctgaatcaggatgcaatggctactgaaaagatggccgagggtattcgtggatttgttgcggatcagatgaaacttgaaacctggttaaaagacttagactaa

SEQ ID NO: 98656 - protein, 321 aa, marine gamma proteobacterium HTCC2207
MSNTKSKLTQLKEMTTVVADTGDFDAIAQYSPEDATTNPSLLLKAAQMPAYRGLVDSIVSTTMNGRQSSNEQLADCMDRLAVGFGEKILEQIPGRVSTEVDARLSFDANASIAKARHLINLYEQAGIGRERVLIKMASTWEGIRAAEQLEKEGINCNLTLLFNFTQAVAAADAGAFLISPFVGRILDWYKNSTGLTEYEPADDPGVQSVTRIYNYYKQTGYNTVVMGASFRNTEEITELAGCDRLTISPQLLQALDDDYGTLERRLDPADTGSTIHYSLGGESGFRFELNQDAMATEKMAEGIRGFVADQMKLETWLKDLD

SEQ ID NO: 98657 - DNA, 963 bp, Oceanobacter sp. RED65
  CDS (1)..(963): transl_table=11
atgacgaccacattagaacaattaaaacgcgtaacctccgtagttgctgatacaggcgatatcgaagccatcaaacagtacgtgcccgaagacgctactaccaatccttcattagtatataaagcagcgcaactgccacagtatcaatcattgattgccgatgctgttgactgggcaaagcaacagagcggtgatgtgctcgaaaatacgctagatatggtatccgttaaaatcggtaaagagatactcggcgttgttccgggtttcgtgtctacggaagtggatgcgcgcttatcctttgatacagtagccaccgtagaaaaagcccgtcgccttattgccctatatgaagagctaggggtgtcgcgtgatcgaatcctgattaaaattgcctccacatgggaaggcatacaagcagccaaagtacttgaggaagaaggtattcgctgcaatctaactttgctattcagctttgtccaagcgatagcctgtgctcaggccaatgtgactttgatcagtccttttgttggccgcattcttgattggtataaaaaagcagaaggcgttgatggctatccagaccttgaagatccgggcgtaaaatcggttactcgcatctatcgttattacaagcagcacaattacagcacgattgttatgggcgccagcttccgcaatacaggtgagatcaaagccttggcaggttgcgacaagttgaccatttcccctgcgcttttagaagaactaaacggcagcactgaaaccctagacgttcgcttatcaaatgatcaagcaagtgacgatgccaagtgggatgagcttagcgagcaagcattccgttgggaaatgaacgaagacccaatggccactgaaaaattggctgaaggcatccgaaactttgctgctgatttacgtaaactagaagatctactaaacgaccaatttttagcgaaagcgagttaa

SEQ ID NO: 98658 - protein, 320 aa, Oceanobacter sp. RED65
MTTTLEQLKRVTSVVADTGDIEAIKQYVPEDATTNPSLVYKAAQLPQYQSLIADAVDWAKQQSGDVLENTLDMVSVKIGKEILGVVPGFVSTEVDARLSFDTVATVEKARRLIALYEELGVSRDRILIKIASTWEGIQAAKVLEEEGIRCNLTLLFSFVQAIACAQANVTLISPFVGRILDWYKKAEGVDGYPDLEDPGVKSVTRIYRYYKQHNYSTIVMGASFRNTGEIKALAGCDKLTISPALLEELNGSTETLDVRLSNDQASDDAKWDELSEQAFRWEMNEDPMATEKLAEGIRNFAADLRKLEDLLNDQFLAKAS

SEQ ID NO: 98659 - DNA, 951 bp, Vibrio sp. Ex25
  CDS (1)..(951): transl_table=11
atgagcaacaagttagagcaacttcgtaaactaacgactgtagtagcagacactggcgaaattgatgcaatcaaaaagtatcaaccagaagacgcaacaactaacccttctcttatcctgaaagccgctcaaatcgcagagtacgcacctctaatcgatgcttcaatcgaatatgctaaagcacagagcaacgataaagctcaacaagttcaagacacttgtgacatgcttgcagtaaacatcggtaaagaaatcctaaaaactatcccaggtcgtatctctacagaagttgacgcacgcctatcttacgatatggaaggaagcgtagcgaaagcacgtcaactagtaaaaatgtacaacgatgcaggcatcactaacgaccgcatccttatcaaactagcgtctacttgggaaggtatccgcgcagcagaaatcctagagaaagaaggcatcaactgtaacctaacgcttctattctcattcgctcaagcgcgtgcttgtgcagaagctggcgtattcctaatctctccattcgttggccgtattatggactggtacaaagcgaaagaaggccgtgacttcgaagcttcagaagatccaggcgtactgtctgtaactaagatctacaactactacaaagagtacggctacaaaactgtcgtaatgggcgcaagcttccgtaacatcggtgagatcctagaactagctggctgtgaccgtctaactatcgctcctgctctacttgctgagctagaagctgcagaaggtgaagtggttgagaagctagttgattctaaaggcgcagctgagcgtcctgcaccaatgactcattctgagttcctatgggaacacaaccaagacccaatggcggttgagaaactggctgaaggcatccgcaacttcgccgttgaccaaggtaaactagaagcgatgatcgaagctaagctttaa

SEQ ID NO: 98660 - protein, 316 aa, Vibrio sp. Ex25
MSNKLEQLRKLTTVVADTGEIDAIKKYQPEDATTNPSLILKAAQIAEYAPLIDASIEYAKAQSNDKAQQVQDTCDMLAVNIGKEILKTIPGRISTEVDARLSYDMEGSVAKARQLVKMYNDAGITNDRILIKLASTWEGIRAAEILEKEGINCNLTLLFSFAQARACAEAGVFLISPFVGRIMDWYKAKEGRDFEASEDPGVLSVTKIYNYYKEYGYKTVVMGASFRNIGEILELAGCDRLTIAPALLAELEAAEGEVVEKLVDSKGAAERPAPMTHSEFLWEHNQDPMAVEKLAEGIRNFAVDQGKLEAMIEAKL

SEQ ID NO: 98661 - DNA, 951 bp, Alteromonadales bacterium TW-7
  CDS (1)..(951): transl_table=11
atgacttcagctctacaaaggctaaaacaacattcatctatcgtagccgacactggtgatattgaagcgatcaaaaagcatcaaccagaagatgcaaccacaaacccgtcgcttttattaaaagcgagcgagattgaagcttataagccttacctagataaagcttggagctatgcaaaagaaaccgagcaagatccagctaaacaactagaacttgcatgtgactactttgctgttttacttggtaaagaaattagtgagattgtaccgggttatatttctaccgaagtagatgcacgtttatcgtttgatactcaagcaactattgataaagcacacactttacttagcctttacgaaaaagaaggcgtaagcaaagacaaaattttaattaaagttgcgtctacgtgggaaggtattaaagccgctgagcagttagaaaaagaagggactaaatgtaaccttactttattatttagcgacgcccaagcccgtgcatgtgctgatgcaaatgtatttctaatctcgccatttgtgggccgtattttagattggcacgttgctaacggcatggaaaaaccaacggatccactacaagatccaggtgttcaatcagtacgcagcatttttgaattttacaaacgtcatgactacaaaacagtagtgatgggcgcaagtttccgtaatacgggcgaaattattgcactaacaggttgtgacaagctaactattagccctaaccttttagaagacttaggtaaccttgaaggcgcacaagaatatttactagaaagtgatattcctaaagagccgaaacctgagccgcttacagaagctcagttccgttggttacataaccaagatgcaatggcaactgaaaagctagcagaaggtattcgctcttttgctgatgcacaagaacagctagaagcacgttttaaagcaatgtaa

SEQ ID NO: 98662 - protein, 316 aa, Alteromonadales bacterium TW-7
MTSALQRLKQHSSIVADTGDIEAIKKHQPEDATTNPSLLLKASEIEAYKPYLDKAWSYAKETEQDPAKQLELACDYFAVLLGKEISEIVPGYISTEVDARLSFDTQATIDKAHTLLSLYEKEGVSKDKILIKVASTWEGIKAAEQLEKEGTKCNLTLLFSDAQARACADANVFLISPFVGRILDWHVANGMEKPTDPLQDPGVQSVRSIFEFYKRHDYKTVVMGASFRNTGEIIALTGCDKLTISPNLLEDLGNLEGAQEYLLESDIPKEPKPEPLTEAQFRWLHNQDAMATEKLAEGIRSFADAQEQLEARFKAM

SEQ ID NO: 98663 - DNA, 951 bp, marine gamma proteobacterium HTCC2143
  CDS (1)..(951): transl_table=11
atgagtaataagctggaacagctaaaagcaatgaccgatgttgtcgccgatactggcgatatcgaagcaattcaacgttttaagccgatggatgcgaccaccaacccctcgttactactgaaggccgcccagctaccacagtatcaggcacttattgcgcaagcaaaagactgggccaatttacaaggtggcgacgcggcgcagcagctaagcaattgtagcgacaaaattgcagtggctatcggcagtgaaatactaaaaattatacccggtagaatatcaacggaagttgattcccggctttcattcaataccgatgcaacggtaagaaaggcacataggcttatcgagttgtattcgcaagccggcgttgaacccaatcgggtccttataaaaattgctgccacttgggagggcattcgcgcagcagaaatactagagcgcgaaggtatcaattgtaatttaaccttgctgtttggattctctcaggctgcagcatgtgcagatgctggcgtatttcttatctcaccgtttgtcggccgcattctcgattggcataaagctaagtcaggacaaacggactatgccccccacgaggatccaggagtgatttcggtatctaaaatttattcattttataaacaacacaattattccaccgtcgtcatgggtgccagctttcgcaacaccggagagattgaacacttggctggctgcgacagactaaccataagcccgcaactattgaatgaattggaacaagacatgggccaactccagcgaaagttgtcccccgacacctcgatcggtaatgtcgaaaaatcagacaacggcgaagatagttttcgctgggcaatgaatgaagatgccatggctaccgaaaaactggccgaaggtataagaaacttcacaattgaccaaattaaactcgaaaaattattgagaagctaa

SEQ ID NO: 98664 - protein, 316 aa, marine gamma proteobacterium HTCC2143
MSNKLEQLKAMTDVVADTGDIEAIQRFKPMDATTNPSLLLKAAQLPQYQALIAQAKDWANLQGGDAAQQLSNCSDKIAVAIGSEILKIIPGRISTEVDSRLSFNTDATVRKAHRLIELYSQAGVEPNRVLIKIAATWEGIRAAEILEREGINCNLTLLFGFSQAAACADAGVFLISPFVGRILDWHKAKSGQTDYAPHEDPGVISVSKIYSFYKQHNYSTVVMGASFRNTGEIEHLAGCDRLTISPQLLNELEQDMGQLQRKLSPDTSIGNVEKSDNGEDSFRWAMNEDAMATEKLAEGIRNFTIDQIKLEKLLRS

SEQ ID NO: 98665 - DNA, 927 bp, marine gamma proteobacterium HTCC2080
  CDS (1)..(927): transl_table=11
atgaacaaacttgaccaacttcgaggcatgactgatgtcgtagctgatactggcgatatcgacgctattgagcgcttgaagcctcaggacgctaccaccaatccgtcactactgcttaaagcagcaaaaatgcctcggttcgaagagcttgttgcagttgtaaaggcaggcaacaattctggggccgatgcctgcgatcaatttgcggtcgccgttggtgctgaaatcatcaaattaatccccggtagaatcagtacagaagtcgatgcacgcctctcatttgatactcaagctacattgaaaaaagctcgagaagtgatggccttatatgacaatcagggcattaacagcgagcgtattttgataaaaattgccgcaacttgggagggtattcgtgctgcagaaatcctggagcgggaaggaattcagtgcaacctgactctggtatttggatttgctcaggcacaggcatgcgccgatgctggcgtctttctgatttcacccttcgttggacgtattcttgattggtatatggcgaataccggccttaaagtgacacaatctaatgaagatcccggcgtgcagtcagtaaatcgaatatacgaatactacaaaagtcatggatacggcactgttgtaatgggagctagtttccgcaatacaggtgaggttgaagctctggccggctgcgatcgcctgacgattagtcctgatctaatggaagccttgagcgaagaccacggcaagctcacaagatcattagtacccctaccggccacccttaataaagcagcacccctcagtgagggaaatttccgctggcagaacaatgaagagcctatggtaaccgacaagctgtctgatggtattcggcgatttgcagctgatcaggtaaaactagaacacatactcacccgggatcactga

SEQ ID NO: 98666 - protein, 308 aa, marine gamma proteobacterium HTCC2080
MNKLDQLRGMTDVVADTGDIDAIERLKPQDATTNPSLLLKAAKMPRFEELVAVVKAGNNSGADACDQFAVAVGAEIIKLIPGRISTEVDARLSFDTQATLKKAREVMALYDNQGINSERILIKIAATWEGIRAAEILEREGIQCNLTLVFGFAQAQACADAGVFLISPFVGRILDWYMANTGLKVTQSNEDPGVQSVNRIYEYYKSHGYGTVVMGASFRNTGEVEALAGCDRLTISPDLMEALSEDHGKLTRSLVPLPATLNKAAPLSEGNFRWQNNEEPMVTDKLSDGIRRFAADQVKLEHILTRDH

SEQ ID NO: 98667 - DNA, 960 bp, Pseudomonas putida GB-1
  CDS (1)..(960): transl_table=11
atgtcgagtaaatgcacaggacagagcacgcccatgacctccaagctggaacaactcaagcagttcaccaccgtggtcgccgacaccggggacctggacgccatcacccgcctgaagccggtcgatgccaccaccaacccgtctttgctgctcaaggccgctgccatcccgggctatgccgatctgctcaagcaagtgaaggccgacgccaagggtgatgtcgacctggcctgcgacaagtttgccgtggccgtgggctcgggcattctcaaggtcatcccagggcgtatctccaccgaggttgatgcacgcctgtcgttcgatgagccggccctgctgaacaaggcacgccagttgatcgccctttacgaagcggccggtgtgccaaaagaccgagtgctgatcaagctggcctccacctgggaaggcattcgcgccgccgagaagctggagaaggaaggcatccagaccaacctcaccctgctgttctccttcgcccaggcccaggcctgcgccgatgccggggtgtttctgatttcgccgttcgtgggccgtatctacgactggtacaaaaaaagcaccggcaaggactacgtcggcgccgaggacccgggcgtgcagtcggtcacgcgtatctacaactactacaaggccaatggctacaacaccgtggtcatgggcgccagcttccgtaatatcggccaaatcgagcaactggccggctgcgaccgcctgaccatcagcccggaactgctgcaacagcttagcgatgaccagggcgaactaccgcaggtactgaagccaggcaatgccggtgaagccaagcagccgttgaacgaaagccaattccgctgggcgatgaatgaagatgccatgggcaccgagaagctggccgagggtattcgccagtttgcgcgggaccaggagaagctggagaagttgatggctgaaaaggcctga

SEQ ID NO: 98668 - protein, 319 aa, Pseudomonas putida GB-1
MSSKCTGQSTPMTSKLEQLKQFTTVVADTGDLDAITRLKPVDATTNPSLLLKAAAIPGYADLLKQVKADAKGDVDLACDKFAVAVGSGILKVIPGRISTEVDARLSFDEPALLNKARQLIALYEAAGVPKDRVLIKLASTWEGIRAAEKLEKEGIQTNLTLLFSFAQAQACADAGVFLISPFVGRIYDWYKKSTGKDYVGAEDPGVQSVTRIYNYYKANGYNTVVMGASFRNIGQIEQLAGCDRLTISPELLQQLSDDQGELPQVLKPGNAGEAKQPLNESQFRWAMNEDAMGTEKLAEGIRQFARDQEKLEKLMAEKA

SEQ ID NO: 98669 - DNA, 969 bp, Marinobacter sp. ELB17
  CDS (1)..(969): transl_table=11
atgagcaacaagcttgagcaactgaaaaccatgaccaccgtcgtggctgacaccggcgatcttgatgccattgccgcctggcgcccgcaagatgccaccaccaacccgtcacttttgctcaaggccgttgagtctgacgcttaccaaccgatggtcgacaaggccattgccgcggcaaaacgccaggccggcgcaagttcgggccggcctggtctggctaccgatattctggcggtattggctggcggcgaaattctgcgactgattccgggtgtggtgtctaccgaggtagacgcccgcctgtcgtttgacaccatcggcacactgtcgcgcgcacgacggatggtagcgctttacgaccaacagggtattgatacccagcgcgtgctggtcaagattgccgccacttgggaaggcatcaaagccgccgagcagctggaaaaagagggcattcgctgcaaccttactctgctgttctccttcgcccaggccgttgcctgtgcacaagccggggtcacgctgatttcaccgtttgttggccgtattatggactggcatctggcagacagcggtcgcgacagctttccagccagtgaagacccgggcgtgctgtcggttgcgcgtatctacaattactacaaaaccaacgatttcaacaccgcggtgatgggcgccagtttccgcaacatcgggcaaattgaaatgttggccggctgtgaccggctgaccataagcccggcgctgatgcaggcgctccagaacgaaacgggtttacttgaatgcaagctcagcccggaaggtgcccgctctaaagacaagcgcagccacatggatgaaaagcagttccgctgggattcaaacaacgatgccatggcgaccgaaaagctggcagacggcattcggctttttgcggccgaccagctgaaactggaagcgcggatacgccaacgggcagaagctgcaaaataa

SEQ ID NO: 98670 - protein, 322 aa, Marinobacter sp. ELB17
MSNKLEQLKTMTTVVADTGDLDAIAAWRPQDATTNPSLLLKAVESDAYQPMVDKAIAAAKRQAGASSGRPGLATDILAVLAGGEILRLIPGVVSTEVDARLSFDTIGTLSRARRMVALYDQQGIDTQRVLVKIAATWEGIKAAEQLEKEGIRCNLTLLFSFAQAVACAQAGVTLISPFVGRIMDWHLADSGRDSFPASEDPGVLSVARIYNYYKTNDFNTAVMGASFRNIGQIEMLAGCDRLTISPALMQALQNETGLLECKLSPEGARSKDKRSHMDEKQFRWDSNNDAMATEKLADGIRLFAADQLKLEARIRQRAEAAK

SEQ ID NO: 98671 - DNA, 1200 bp, Oryza sativa subsp
  CDS (1)..(1200)
atggcgctctccatctccacgccgccgacctcctcctccctcctgccggcctccctccaggtcggcaggtggagctcgtcggcggcgatgtcggccaggcctgtggcctttagcctccggaggccggttcttgcggcccgtgtagccgccggcggcaacgcaccgtcttcctccgtggacgaggtggtcactgagctcgatgccgtggccagcttcagcgagatcgtgccggataccgtcgtgttcgatgacttcgagaagtttgcgccgaccgccgccacggtgagctcgtcgctgctgctcggtatcgctggcctcccggatacaaagttcaagagtgctatagatacagcattggcagacggtgaatgtaacacaatggagaagcccgaggaccggatgtcctgtttcctaaccaaggccctggcaaatgttggagctgaaatggctcatctagtccctggtcgggtgtcgactgaaatagatgctcggttggcttatgatacccaaggaattatccagagggtgcatgagcttttgaagctatacagtgatcatgatgtcttatctgaacgcctgctgttcaaaattccggctacatggcaaggtatagaggcctcgaggttgcttgaatctgaagggattcaaacacatttaacatttgtgtacagttttgcccaagcagcagctgcagcacaagccggtgcatctgttgtacagatctttgtgggacgtgttcgggattgggcaaggactcactctggcgacccagagattgatgaagctttgaagaaaggagaagatgctgggcttgctttggtgaagaaagtgtatgcctacattcacaaaaatgggtataaaacaaagttgatggctgctgccatacgcaacaagcaagatgtgtttagcctcctggggattgactacatcattgcacctctgaagatattgcagtctttggaagaatctgtcactgatactgacgtgaagtatggttatgtcccaaggctgactcctgctcttggcaagacgtacaacttcactgaagaggagcttgtgaagtgggaccaattgagtctagcagctgcaatggggccagctgcggaagaactacttgcttctgggttggaaggatatgtgaaccaagcacgccgagtggaggaactcttcgggaagatctggcctcctccgaatgtttga

SEQ ID NO: 98672 - protein, 399 aa, Oryza sativa subsp
MALSISTPPTSSSLLPASLQVGRWSSSAAMSARPVAFSLRRPVLAARVAAGGNAPSSSVDEVVTELDAVASFSEIVPDTVVFDDFEKFAPTAATVSSSLLLGIAGLPDTKFKSAIDTALADGECNTMEKPEDRMSCFLTKALANVGAEMAHLVPGRVSTEIDARLAYDTQGIIQRVHELLKLYSDHDVLSERLLFKIPATWQGIEASRLLESEGIQTHLTFVYSFAQAAAAAQAGASVVQIFVGRVRDWARTHSGDPEIDEALKKGEDAGLALVKKVYAYIHKNGYKTKLMAAAIRNKQDVFSLLGIDYIIAPLKILQSLEESVTDTDVKYGYVPRLTPALGKTYNFTEEELVKWDQLSLAAAMGPAAEELLASGLEGYVNQARRVEELFGKIWPPPNV

SEQ ID NO: 98673 - DNA, 1203 bp, Medicago truncatula
  CDS (1)..(1203)
atggcagcaacattgcaaactccgctctatgcagctatctcctcttctcctgcatcatcatcatcatcatcatcttccattcgaacaacaacatcattctccttcttccgttctacaccgccaccaactctcctcttcaactccaaaaactccttctctttaattcgcgcttcctccactgacactgttatcactgaattggatgctgtttccgctttcagtgagatcgttccagataccgttattttcgatgatttccaaaagtttcctccaactgctgctactgttagttcatcactgattttggggatatgtggtcttccggatactatttttaggaaggctgtggaaatggctttggctgattctgaatgttatggacttcaagatcctaatgcaagattatcttgtttcgccaccaaggctttagtgaatgttggtagtgacatgacaaagcttgtccctggccgtgtttcaactgaagtggatgcgcgtcttgcttatgacacacatggcattatcaggaaggtgcacgacctgttgaagttgtacaatgatagtaatgtccctcatgaacgtctgctatttaaaattccttcaacatggcaaggaatagaggctgcaagattgctggaatcagagggcatacaaacacatttgactttcgtttacagctttgcccaagctgctgctgccgctcaagctggtgcttctgttattcaaatttttgttggccgcgtcagggactgggcgcgtaatcattctggtgataaagagatagaatctgccaagctaaatggagaggatcccgggctggcattggtcacaaaggcttacaattatattcaccaatatggacataagtcaaagttgatggcagcagcagttcgtaacaagcaggacctatttagtcttctgggggttgactacatcatagctccattgaaggtgttgcagtctctcaaagaatccgttgcttctggtgatgagaagtactctttcgctaggaggttatcaccgcagtctgctgaccgctacatgtttagtgatgaagagcttgttaaatgggaccaaatgagccttacaaatgccatggggccagcagcagtgcagcttctgacttctgggctggatggttatgctgatcaagcaaagcgggtggaagatttattcgggaaaatttggccaccaccaaatgtataa

SEQ ID NO: 98674 - protein, 400 aa, Medicago truncatula
MAATLQTPLYAAISSSPASSSSSSSSIRTTTSFSFFRSTPPPTLLFNSKNSFSLIRASSTDTVITELDAVSAFSEIVPDTVIFDDFQKFPPTAATVSSSLILGICGLPDTIFRKAVEMALADSECYGLQDPNARLSCFATKALVNVGSDMTKLVPGRVSTEVDARLAYDTHGIIRKVHDLLKLYNDSNVPHERLLFKIPSTWQGIEAARLLESEGIQTHLTFVYSFAQAAAAAQAGASVIQIFVGRVRDWARNHSGDKEIESAKLNGEDPGLALVTKAYNYIHQYGHKSKLMAAAVRNKQDLFSLLGVDYIIAPLKVLQSLKESVASGDEKYSFARRLSPQSADRYMFSDEELVKWDQMSLTNAMGPAAVQLLTSGLDGYADQAKRVEDLFGKIWPPPNV

SEQ ID NO: 98675 - DNA, 1717 bp, Arxula adeninivorans
  CDS (516)..(1481)
gagctcaactacatttccaaagaagcattaatcgaggatatcaagactgacgttcgagtagcactcaattcgctacaacgacctgactacgaaaagtacgagaaggatgagttttggacggataattagacgtaagcctagactgtgtcttccccccacgtgtcggttgttagccggggaaacccaacatttatgacgagcatagaaatagagcataattgaatccgactgtaaagaacgaaacagaactccacatgtccatgtcctatacataacgctaacaacaattctacataatccagcgtcactatgatccaatgggctatggccccatggttaatatattgacccggtcccccccttaggaattattcaacattagtcttaaccgtatcgggtggctctggcccggcccctccggtgttatagggttgctccggtccgacgtgtatatatatgaagcccttccccggaaaccactcctcgaaaacaaaatcacatctgattaataaaaaatgtctaactctctcgaagccctgaaagccactggaactgtcattgtcaccgacactggtgagtttgagtccattgccaagtacaagccccaggatgccaccaccaacccctctctgatcctggccgtttccaagaagcccgagtacgctgctctggtggatgctgctgctaaggccgctaccggagccaatgctaaggagaaggcttccaacgctctggacattctgctggttgagtttggaaccaagattctcgagattgtccccggccgtgtgtccactgaggttgacgctcgtctgtctttcgacaaggacgccactatcaagaaggctcttcacattatcgagctgtacaagcagaagggtatctccaaggaccgagtgctcatcaagattgcttccacctgggagggaatccaggctgctgctgagctggaggccaagcacggtatccactgtaacctgaccctgctgttctcgtttgtgcaggccgtcactgccgccgaggccaaggctactctgatttctcctttcgttggacgaatcctggactggtacaagaagtccaccggtaagacctacgagtcttccgaggaccccggtgtgcactctgtcaagagcatttacaactactacaagaagttcggttacgacaccattgtcatgggagcttctttccgaaacactggagagatcaaggagctcgctggtgtcgactacctgactgtgtctcctgccctgcttgaggagctggtcaactccaccgaggctgtgcccaagaagctcgagaagtcccaggctacttctctggatctcgagaaggtttcgtacattaacgacgaggccaagttccgattcgagcttaacgaggaccagatggccaccgagaagctgtctgagggtatccgaaagtttgctgctgatgccgtgaccatgttggaggagctggagaagcgtgtcgcctaaataggaatgtatgtaatcaacacgtagttagatgaaaaggtctttgcacagtgacatttgttggtcaggatatactatactttgtagttttaacggtcgattctgaagctttataccatgtcagtgtatgcccgcttgtcactgctgcgtataccagcctgctgcttgacagtggaagactattatctacatctaaccgaaaatcatgcttaggtttatgaaacgttgcaaagctt

SEQ ID NO: 98676 - protein, 321 aa, Arxula adeninivorans
MSNSLEALKATGTVIVTDTGEFESIAKYKPQDATTNPSLILAVSKKPEYAALVDAAAKAATGANAKEKASNALDILLVEFGTKILEIVPGRVSTEVDARLSFDKDATIKKALHIIELYKQKGISKDRVLIKIASTWEGIQAAAELEAKHGIHCNLTLLFSFVQAVTAAEAKATLISPFVGRILDWYKKSTGKTYESSEDPGVHSVKSIYNYYKKFGYDTIVMGASFRNTGEIKELAGVDYLTVSPALLEELVNSTEAVPKKLEKSQATSLDLEKVSYINDEAKFRFELNEDQMATEKLSEGIRKFAADAVTMLEELEKRVA

SEQ ID NO: 98677 - DNA, 984 bp, Phaeosphaeria nodorum
  CDS (1)..(984)
atgtccagctctcttgatcaattgaaggccactggcaccgtcgtcgtctgcgactctggtgactttgcgaccatcgccaagtaccagccccaggatgccaccaccaacccctccctcatcctcgctgcctccaagaaggaggagtacgcgaagctgatcgactccgccgtcgagtacggcaagaagcacggcggcagcaacatcgaggaccaggtcgacgccacattggacaacttgctcgtacaattcggcaaggagatcctcaagatcatccccggcaaggtctcaactgaggtcgacgcccgcttctcgttcgacactgaggcctcggtaaccaaggctctccgaatcatcgacctgtacaaggagcagggtatcggcaaggagcgcattctcatcaagatcgcttcaacatgggaaggcatcaaggccgccgagatcctccagtccaagcacggaatcaacaccaacctcaccctcatgttctcccagacccaggctatcgccgctgctgaggccggcgccttcttgatctcgcccttcgttggccgcatccttgactggtacaaggcttcgaccaagaatggagtacaccaaggaggaggactcccggtgtcaagagcgtccagaaacattcttcaactactaacaagaagttcgggctacaagaccatcgtcatgggtgcctctttcaggagcatcggcgaggtcactgagctcgctggatgcgactacctcaccattgcccccaacctacttgagcagctctacaactcgcaagaccccgtccccaagaagctcgatgccagcggcgccaactcgctcgacctcgagaagaagacttacattaacaacgaggccgagttccgcttttacttcaacgaggaccagatggccgtcgagaagctccgcgagggtatctcgaaattcgctgctgacgccgttaccctcaaggacattctccgccagaagattcaggcttag

SEQ ID NO: 98678 - protein, 327 aa, Phaeosphaeria nodorum
MSSSLDQLKATGTVVVCDSGDFATIAKYQPQDATTNPSLILAASKKEEYAKLIDSAVEYGKKHGGSNIEDQVDATLDNLLVQFGKEILKIIPGKVSTEVDARFSFDTEASVTKALRIIDLYKEQGIGKERILIKIASTWEGIKAAEILQSKHGINTNLTLMFSQTQAIAAAEAGAFLISPFVGRILDWYKASTKNGVHQGGGLPVSRASRNILQLLTRSSGYKTIVMGASFRSIGEVTELAGCDYLTIAPNLLEQLYNSQDPVPKKLDASGANSLDLEKKTYINNEAEFRFYFNEDQMAVEKLREGISKFAADAVTLKDILRQKIQA

SEQ ID NO: 98679 - DNA, 1002 bp, Aedes aegypti
  CDS (1)..(1002)
atgagcagtagtgaaccgcagatcaagaaaaccaagatgggctcgagtctggaacaactgaagcaattgaccactatcgtggccgatacgggcgatttcgaagcaatgaaggtctacaagcccacggatgcaacgacgaatccatcgttgatcctgtctgctgcaggcatgccacagtatcagcacctgatcgacaaagccgtcaagtacggcctggctcatggaagcactaaagacgaacaggtggcggaagcggctgatatgttgtttgtcctgtttggatgcgaaatccttaagctggtcccgggacgcgtctcgaccgaagtcgacgcccggatatcgttcaacaaggacgcctcggtggccaaggccctgaagctgatccaactgtacgaggaacaaggcatcaagcgggatcgtgtcctcatcaagttggcctccacctgggagggcatccaggcggcccgtgtccttgaacaggagcacggaatccactgcaatctcacgctgctgttctcgttcgcgcaggctgttgcctgtgctgaggccggagtcacgctcatttccccattcgtgggacgcatcttggactggtatgtggccaatactgacaagaaatcattcgaaccgaaacaggatccaggcgttgtttcggttacgaagatttacaattactacaaaaaattcggatacaaaaccgtggtcatgggagcgtccttccgtaatacgggagagattcgcgccttggccggttgtgacctcttaaccatcagtccaaaactgctcggagatttggagaagagcgaggagcctatcaagcgctatttggatcctgaagcggctaagaactgcgacctggagaagatcacaatggacgaggccacgttccgctggatgctcaatgaggatcaaatgtcgaccgacaaactttcggacggaatccgaaagttcgctgccgatggacgcaagctggactccatgctgcgcgaattgcttcaatag

SEQ ID NO: 98680 - protein, 333 aa, Aedes aegypti
MSSSEPQIKKTKMGSSLEQLKQLTTIVADTGDFEAMKVYKPTDATTNPSLILSAAGMPQYQHLIDKAVKYGLAHGSTKDEQVAEAADMLFVLFGCEILKLVPGRVSTEVDARISFNKDASVAKALKLIQLYEEQGIKRDRVLIKLASTWEGIQAARVLEQEHGIHCNLTLLFSFAQAVACAEAGVTLISPFVGRILDWYVANTDKKSFEPKQDPGVVSVTKIYNYYKKFGYKTVVMGASFRNTGEIRALAGCDLLTISPKLLGDLEKSEEPIKRYLDPEAAKNCDLEKITMDEATFRWMLNEDQMSTDKLSDGIRKFAADGRKLDSMLRELLQ

SEQ ID NO: 98681 - DNA, 966 bp, Aedes aegypti
  CDS (1)..(966)
atgggctcgagtctggaacaactgaagcaattgaccactatcgtggccgatacgggcgatttcgaagcaatgaaggtctacaagcccacggatgcaacgacgaatccatcgttgatcctgtctgctgcaggcatgccacagtatcagcacctgatcgacaaagccgtcaagtacggcctggctcacggaagcactaaagacgaacaggtggcggaagcggccgatatgttgtttgtcctgtttggatgcgaaatccttaagctggtcccgggacgcgtctcgaccgaagtcgacgcccggatatcgttcaacaaggacgcctcggtggccaaggccctgaagctgatccaactgtacgaggaacaaggcatcaagcgggatcgtgtcctcatcaagttggcctccacctgggagggcatccaggcggcccgtgtccttgaacaggagcacggaatccactgcaatctcacgctgctgttctcgttcgcgcaggctgttgcctgtgctgaggccggagtcacgctcatttccccattcgtgggacgcatcttggactggtatgtggccaataccgacaagaaatcattcgaaccggaacaggatccaggcgttgtttcggttacgaagatttacaattactacaaaaaattcggatacaaaaccgtggtcatgggagcgtccttccgtaatacgggagagattcgcgccttggccggttgtgacctcttaaccatcagcccaaaactgctcggagatttggagaagagcgaggagcctatcaagcgctatttggatcctgaagcggctaagaactgcgacctggagaagatcacaatggacgaggccacgttccgctggatgctcaatgaggatcaaatgtcaaccgacaaactttcggacggaatccgaaagttcgctgccgatggacgcaagctggactccatgctgcgcgaattgcttcaatag

SEQ ID NO: 98682 - protein, 321 aa, Aedes aegypti
MGSSLEQLKQLTTIVADTGDFEAMKVYKPTDATTNPSLILSAAGMPQYQHLIDKAVKYGLAHGSTKDEQVAEAADMLFVLFGCEILKLVPGRVSTEVDARISFNKDASVAKALKLIQLYEEQGIKRDRVLIKLASTWEGIQAARVLEQEHGIHCNLTLLFSFAQAVACAEAGVTLISPFVGRILDWYVANTDKKSFEPEQDPGVVSVTKIYNYYKKFGYKTVVMGASFRNTGEIRALAGCDLLTISPKLLGDLEKSEEPIKRYLDPEAAKNCDLEKITMDEATFRWMLNEDQMSTDKLSDGIRKFAADGRKLDSMLRELLQ

SEQ ID NO: 98683 - DNA, 999 bp, Aspergillus oryzae
  CDS (1)..(999)
atgtcttcttctcttgaacagctcaaggccaccggcactgtcgttgtctgcgactctggtaagtatctcggccactggaactcgtcccatgatgccatcggcaagtacaagccccaggatgccaccaccaacccctctttgatcctggccgcttccaagaagcccgagtacgccgcccttatcgacgccgctgtcgagtacggcaagcagcacggcagcaacgtcgacgagaaggtcgacgccacccttgaccgtctcctggttgagttcggcaagaagatcctcgagatcatccccggaaaggtctccactgaggttgatgctcgcctctctttcgacacccaggcttccatcgacaaggccctccacatcatcaagctctacgaggagaacggtatctctaaggaccgtgtcctgattaagatcgcctccacctgggagggtatcaaggccgctcaggtcctccagcgtgaccacggcatcaactgcaacctgaccctcatgttctccaccgtccaggccatcgctgctgccgaggccggtgcctacctcatctctcctttcgttggccgtatccttgactggtacaaggctgcccacaagcgtgactacactgcccaggaggaccccggtgttaagtccgtccagaacattttcaactactacaagaagcacggctacaacaccattgtcatgggtgcttccttccgtaacactggtgaaatcaccgagcttgctggctgtgactacctgaccatctcccccaacctcctcgaggatctctacaactctaccgccgctgtccccaagaagctcgacgccgccagcgctaccggccttgacatccccaagaagacctacatcaatgacgaggctctgttccgcttcgagttcaacgaggaggccatggccgtcgagaagctgcgtgagggtatctccaagttcgcggccgatgccgtgaccctgaaggacatcctcaagcagaaggtccaggcctaa

SEQ ID NO: 98684 - protein, 332 aa, Aspergillus oryzae
MSSSLEQLKATGTVVVCDSGKYLGHWNSSHDAIGKYKPQDATTNPSLILAASKKPEYAALIDAAVEYGKQHGSNVDEKVDATLDRLLVEFGKKILEIIPGKVSTEVDARLSFDTQASIDKALHIIKLYEENGISKDRVLIKIASTWEGIKAAQVLQRDHGINCNLTLMFSTVQAIAAAEAGAYLISPFVGRILDWYKAAHKRDYTAQEDPGVKSVQNIFNYYKKHGYNTIVMGASFRNTGEITELAGCDYLTISPNLLEDLYNSTAAVPKKLDAASATGLDIPKKTYINDEALFRFEFNEEAMAVEKLREGISKFAADAVTLKDILKQKVQA

SEQ ID NO: 98685 - DNA, 1002 bp, Saccharomyces cerevisiae
  CDS (1)..(1002)
atgtcagaaccttcagagaaaaaacaaaaagttgctacctcatccttagaccaattaaaaaaggccgggacccatgtggttgctgattcgggtgattttgaggctatttcgaagtatgaaccacaggattcaacaactaacccttctctgatattggctgcttcaaagttggagaaatatgcgaggtttatcgacgctgccgttgaatatggtagaaagcatggcaaaaccgatcatgagaaaatcgagaacgccatggataagattttggtggaattcggcacccagattttgaaggtagtgccaggaagggtttccactgaagtagacgcaaggttatcttttgataagaaggcgacggtgaagaaggctctccacatcatcaaactatataaagatgcgggagtacctaaagaaagggtcttgatcaagatagcttctacgtgggagggtatccaagctgctagagaattggaagtaaagcatggtattcattgtaatatgacattactgttttcctttacgcaagcagtagcctgtgcggaggcaaatgtcacattgatctccccatttgttggaaggattatggacttttacaaggccctttcaggcaaagactatactgcagaaactgatcccggtgttctttctgttaagaagatatacagttactataagaggcatggttatgcaactgaggtaatggcggcttctttcaggaatttagatgaattgaaggcgttagccggtattgataatatgactctcccactgaaccttctagaacagttatatgaatcaacagatcctattgaaaacaaattgaattctgagagtgctaaggaagaaggcgtcgaaaaagtctcttttatcaacgacgagcctcatttcagatatgttttaaacgaagatcaaatggctacagaaaaactatcagatggtatcagaaaattctccgcagacattgaagcactgtacaaactggttgaagaaaaaatgtga

SEQ ID NO: 98686 - protein, 333 aa, Saccharomyces cerevisiae
MSEPSEKKQKVATSSLDQLKKAGTHVVADSGDFEAISKYEPQDSTTNPSLILAASKLEKYARFIDAAVEYGRKHGKTDHEKIENAMDKILVEFGTQILKVVPGRVSTEVDARLSFDKKATVKKALHIIKLYKDAGVPKERVLIKIASTWEGIQAARELEVKHGIHCNMTLLFSFTQAVACAEANVTLISPFVGRIMDFYKALSGKDYTAETDPGVLSVKKIYSYYKRHGYATEVMAASFRNLDELKALAGIDNMTLPLNLLEQLYESTDPIENKLNSESAKEEGVEKVSFINDEPHFRYVLNEDQMATEKLSDGIRKFSADIEALYKLVEEKM

SEQ ID NO: 98687 - DNA, 1136 bp, Pichia stipitis
  CDS (64)..(1035)
  misc_feature (4)..(4): n is a, g, c or t
  misc_feature (236)..(236): y is t or c
  misc_feature (393)..(393): y is t or c
ccantaatccagcacttgaaaaattctattctgttttattcaattcctcaattccacatcacaatgtcctccaactcccttgaacaattgaaagccacaggtaccgtcatcgtcaccgacaccggtgaattcgactcgattgccaagtacactccacaagatgccaccaccaacccatcgttgattttggctgctgctaagaagcctgaatacgccaaggtcattgacgtcgccaytgaatacgccaaggacaagggttcctccaagaaggaaaaggctgaaatcgccttggaccgtttgttgattgaattcggtaagaacatcttggccattgttccaggaagagtgtctaccgaagtcgacgccagattgtctttcgacaaagaggccacyatcaagaaggctcttgaattgattgccttgtacgaatcccaaggtatctccaaggacagaatcttgatcaagatcgcctccacttgggaaggtatccaagctgccagagaattggaagccaagcacggtattcactgtaacttgactttgttgttctctttcgttcaggcagttgcctgtgctgaagccaaggtcaccttgatctcgccattcgtcggcagaatcttggactggtacaaggcttctaccggaaagacctacgaaggtgacgaagacccaggtgtgatttctgtcagagccatctacaactactacaagaagtacggctacaaaactattgtcatgggtgcctctttcagaaacaccggtgaaatcaaggctttggctggttgcgactacttaactgttgctcctaagttgttggaagaattgttgaactccactgaaccagttccacaagtgttggacgctgcttctgcctctgctactgatgtcgaaaaggtttcttacgttgatgacgaagctaccttcagatacttgttcaacgaagacgccatggctaccgaaaagttggcccaaggtatcagagctttcggcaaggacgctgtcaccttgttggaacaattggaagccagattctaagtatcgtgcttcgagtcctagatggatctctggtatttacatatttcgcttctattaataatttcacaaaaacaatataatacgatcaatgaacttaattg

SEQ ID NO: 98688 - protein, 323 aa, Pichia stipitis
  misc_feature (58)..(58): The Xaa at location 58 stands for Ile, or Thr.
MSSNSLEQLKATGTVIVTDTGEFDSIAKYTPQDATTNPSLILAAAKKPEYAKVIDVAXEYAKDKGSSKKEKAEIALDRLLIEFGKNILAIVPGRVSTEVDARLSFDKEATIKKALELIALYESQGISKDRILIKIASTWEGIQAARELEAKHGIHCNLTLLFSFVQAVACAEAKVTLISPFVGRILDWYKASTGKTYEGDEDPGVISVRAIYNYYKKYGYKTIVMGASFRNTGEIKALAGCDYLTVAPKLLEELLNSTEPVPQVLDAASASATDVEKVSYVDDEATFRYLFNEDAMATEKLAQGIRAFGKDAVTLLEQLEARF

SEQ ID NO: 98689 - DNA, 1002 bp, Saccharomyces cerevisiae
  CDS (1)..(1002)
atgtcagaaccttcagagaaaaaacaaaaagttgctacctcatctttagaacaattaaaaaaggccgggacccatgtggttgctgattcgggtgattttgaggctatttcgaagtatgaaccacaggattcaacaactaacccttctctgatattggctgcttcaaagttggagaaatatgcgaggtttatcgacgctgccgttgaatatggtagaaagcatggcaaaactgatcatgagaaaatcgagaacgccatggataagattttggtggaattcggcacccagattttgaaggtagtcccaggaagggtttccactgaagtagacgcaaggttatcttttgataagaaggcgacggtgaagaaggctctccacatcatcaaactatataaagatgcgggagtacctaaagaaagagtcttgatcaagatagcttctacgtgggagggtatccaagctgctagagaattggaagtaaagcatggtattcattgtaatatgacattactgttttcctttacgcaagcagtagcctgtgcggaggcaaatgtcacattgatctccccatttgttggaaggattatggacttttacaaggccctttcaggcaaagactatactgcagaaactgatcccggtgttctttctgttaagaagatatacagttactataagaggcacggttatgcaactgaggtaatggcggcttctttcaggaatttagatgaattgaaggcgttagccggtattgataatatgactctcccactgaaccttctagaacagttatatgaatcaacagatcctattgaaaacaaattgaattctgagagtgctaaggaagaaggcgtcgaaaaagtctcttctatcaacgacgagcctcatttcagatatgttttaaacgaagatcaaatggctacagaaaaactatcagatggtatcagaaaattctccgcagacattgaagcactgtacaaactggttgaagaaaaaatgtga

SEQ ID NO: 98690 - protein, 333 aa, Saccharomyces cerevisiae
MSEPSEKKQKVATSSLEQLKKAGTHVVADSGDFEAISKYEPQDSTTNPSLILAASKLEKYARFIDAAVEYGRKHGKTDHEKIENAMDKILVEFGTQILKVVPGRVSTEVDARLSFDKKATVKKALHIIKLYKDAGVPKERVLIKIASTWEGIQAARELEVKHGIHCNMTLLFSFTQAVACAEANVTLISPFVGRIMDFYKALSGKDYTAETDPGVLSVKKIYSYYKRHGYATEVMAASFRNLDELKALAGIDNMTLPLNLLEQLYESTDPIENKLNSESAKEEGVEKVSSINDEPHFRYVLNEDQMATEKLSDGIRKFSADIEALYKLVEEKM

SEQ ID NO: 98691 - DNA, 1489 bp, Gossypium hirsutum
  CDS (61)..(1251)
  misc_feature (643)..(643): y is t or c
  misc_feature (644)..(644): m is a or c
  misc_feature (910)..(910): w is a or t
  misc_feature (924)..(924): n is a, g, c or t
  misc_feature (963)..(963): s is g or c
cgaccacgcgtccgctttcacctgttttctctctcacgcacgaaaacagaggaaaaaaatatgtcactctccttgcaatcttcgccttcatcatttctctcttcttctctaccaaaattaagattgggatttgcaaatgggtgtccttcttccagcctactcttcaaattcaacgcatcttttccagctattcgtgcttcctcgggcttctcttcttctctcgacactgggttaagaactgaattggatgctgtgtctactttcagtgagatagttcctgacactgtcatctttgatgattttgaaaagtttccaccaacagctgcaactgttagctcttcactgctgttgggtatattgagccttccagataccatttttagaaatgctgtggatttggccttggcggattcaacttgttctaggcttgacaatcctgaactgaggttggcttgtttctttaacaaggctttagtaaatgttggtggtgacttggcaaagctagttccaggtcgagtttcaactgaagtggatgcacgtctggcttatgatacacatggtattattaggagggttcatgacttactgaagttgtataatgagattgatgttccacctgagcgcttattgtttaaaattcctymaacttggcaaggaatagaagcctcaagattgcttgaatctgagggtatacaaacacatttaacttttgtttatagctttgctcaagctgcagctgcagcccaagctggtgcttctgttattcagatttttgttggccgtgttagggattgggcacgcaatcattctggtgaccctgagattgaagctgccattcaaagaggagaggatcccgggttaggtctggtgacaaaagcttataactacattcacaaatatggacataaawacaaagcttatggnctgcagcagttcgaaacaaagcaggatttattcagtttsctgggggttgattatatcattgcaccgttgaagatattgcagtcgctgaaagaatcaattactgctcctgatgagaagtactcttacattaggaggctttccccacagtctgctgccaaccacgatttcactgctgaagagctcacaaagtgggaccaattaagccttgcatcagctatgggacctgcatctatgcagcttctggctgctggacttgaaggatacgttaatcaagcgaatcgagtcgaggaattacttgacaagatttggccgccccctaatgtctaaaatggcccctccattttgacccacatctcatatgccataaaataagaagatgatactgactccattatgttgtttacgtttttctttttggttatgcagagcagtttagttggtctttaaatctgatgtcaatcctccatctttcatgttatcaatgaacataatgctactgttttagaaacttgcaattcaatcccatggcaaagctttcctctttactaaaaaaaaaaaaaaaaaa

SEQ ID NO: 98692 - protein, 396 aa, Gossypium hirsutum
  misc_feature (195)..(195): The Xaa at location 195 stands for Stop, Gln, Pro, or Ser.
  misc_feature (284)..(284): The Xaa at location 284 stands for Asn, or Tyr.
  misc_feature (301)..(301): The Xaa at location 301 stands for Leu, or Phe.
MSLSLQSSPSSFLSSSLPKLRLGFANGCPSSSLLFKFNASFPAIRASSGFSSSLDTGLRTELDAVSTFSEIVPDTVIFDDFEKFPPTAATVSSSLLLGILSLPDTIFRNAVDLALADSTCSRLDNPELRLACFFNKALVNVGGDLAKLVPGRVSTEVDARLAYDTHGIIRRVHDLLKLYNEIDVPPERLLFKIPXTWQGIEASRLLESEGIQTHLTFVYSFAQAAAAAQAGASVIQIFVGRVRDWARNHSGDPEIEAAIQRGEDPGLGLVTKAYNYIHKYGHKXKAYGLQQFETKQDLFSXLGVDYIIAPLKILQSLKESITAPDEKYSYIRRLSPQSAANHDFTAEELTKWDQLSLASAMGPASMQLLAAGLEGYVNQANRVEELLDKIWPPPNV

SEQ ID NO: 98693 - DNA, 1005 bp, Saccharomyces kluyveri
  CDS (1)..(1005)
atggctcctcacgttaacaagaagcaaaagttgtctaactctctagaacagttgaaggctaccggtaccgttgtcgtctctgacactggtgattttgaatccattgccaagtacactccacaagatgctaccaccaacccatctttgattctagccgctgccaagaaggaaaactacgccaaattgatcgacaccgctgttgaatacggtaagaagcagggtaagactttggaagacaaagtcgaccaagccgtcgacatgctattggtcgaattcggcaaggccatcttaaacatcgttccaggtagagtctccaccgaagttgacgccagattgtccttcgacaaggacgccaccgtcgccaaggccttgcacatcatcaagttgtacgaagatgctggtatctccagagaaagagtcttgatcaagatcgcttccacttgggaaggtatccaagccgccaaagaattggaagaaaagcacggcatccacgtcaacttgactctgctattttccttctcccaagccgttgccgctgctgaagccaaggtcactttgatctccccattcgttggcagaatcctggactggtacaaggccagcaccggtaaggattacaccgctgaaaccgacccaggtgtcaaatccgtcaggaagattttcaactactacaagaaatacggttacgacaccattgtcatgggtgcttctttcagaaacgttggcgaaatcaaggctttggctggtgtcgacttcttgaccatctctccaggtttgttggatgaattgatgtcatccgaggaccctgtcccacaagttttggacgcagaagccgccaagtccgaagacttggccaaggtttccttcatctccgacgaagccaagttcagattcgaattgaacgaagacgctatggccaccgaaaagttgtccgaaggtatcagaaagttctctgctgatatcgtcactttgttcgaattgatcgaaaagaagattaaggcttaa

SEQ ID NO: 98694 - protein, 334 aa, Saccharomyces kluyveri
MAPHVNKKQKLSNSLEQLKATGTVVVSDTGDFESIAKYTPQDATTNPSLILAAAKKENYAKLIDTAVEYGKKQGKTLEDKVDQAVDMLLVEFGKAILNIVPGRVSTEVDARLSFDKDATVAKALHIIKLYEDAGISRERVLIKIASTWEGIQAAKELEEKHGIHVNLTLLFSFSQAVAAAEAKVTLISPFVGRILDWYKASTGKDYTAETDPGVKSVRKIFNYYKKYGYDTIVMGASFRNVGEIKALAGVDFLTISPGLLDELMSSEDPVPQVLDAEAAKSEDLAKVSFISDEAKFRFELNEDAMATEKLSEGIRKFSADIVTLFELIEKKIKA

SEQ ID NO: 98695 - DNA, 1020 bp, Saccharomyces castellii
  CDS (1)..(1020)
atggttggaccaaagactaagaaacaaaaagttgctaatgcgggaggatcgacatcattagatctcttgaagaaaacaggaactacagtcgttgctgatacgggggattttgcaaccattgataagtataagcctcaagacgctactaccaatccatctttgatattagcagcttccaaaaaggaagattattccagtcttgttgataatgctgtcgcatacggtaaagaaaatggggaaactattgatgaacaagtcgaatgtgccattgataagttattagttgagtttgggactgagatattgaagattgtaccagggaaagtttcaaccgaagtagatgcaagattatcctttgataaggatgcaaccattaagaaagcattacaattgatccatttgtacgaaaaagctggtatttccaaagaccgcgtatatatcaaagtagcctccacatgggaaggtattcaagcggctaaagtattagagcaagagcatggaattaccacaaacttgaccctgttattttctttcactcaagctgtcgcctgtgccgaagctggtgtttcactaatatctccatttgtggctagaattactgactattacaaagctcaaacaggaaaagattattctccagaggatgatcctggtattcattcggtgaaaaagatttacaactattataagaagcatggatatcatactattattatggctgcatctctaagaacaacgggtcaagtaaagcagcttgcaggtattgataatctaactttatctcctaaagtattagatgaattagttgctagcacagatgaggtcccaaaacttttagatccgaaaaaagctgcaaagcagggagatgagaagatatctttccttgatgatgaaccaaaatttagatacagtttaaatgacgatgcaatggcaactgaaaaattggcagatggtatcaggaagtttgcagctgatgccatcacgttatcgaatgctatcaaagagaaacttcaaaagtag

SEQ ID NO: 98696 - protein, 339 aa, Saccharomyces castellii
MVGPKTKKQKVANAGGSTSLDLLKKTGTTVVADTGDFATIDKYKPQDATTNPSLILAASKKEDYSSLVDNAVAYGKENGETIDEQVECAIDKLLVEFGTEILKIVPGKVSTEVDARLSFDKDATIKKALQLIHLYEKAGISKDRVYIKVASTWEGIQAAKVLEQEHGITTNLTLLFSFTQAVACAEAGVSLISPFVARITDYYKAQTGKDYSPEDDPGIHSVKKIYNYYKKHGYHTIIMAASLRTTGQVKQLAGIDNLTLSPKVLDELVASTDEVPKLLDPKKAAKQGDEKISFLDDEPKFRYSLNDDAMATEKLADGIRKFAADAITLSNAIKEKLQK

SEQ ID NO: 98697 - DNA, 1008 bp, Saccharomyces castellii
  CDS (1)..(1008)
atgtccgaaccagctcaaaagaaacaaaagaccaccggatcctccctagaacaactaaaggcttccggtaccgtcgtcgtcgctgacactggtgattttgcctcaatcgccaagttcaccccacaagattccactacaaacccatctttgatcttggccgccgctaaacaaccagcttacgctaaattgattgacgtcgctgtcagttacggtaagaagaatggtaagaccactgatgaaaaagtggaacttgctgtcgacagattgttggtcgaattcggtaaggaaatcttgaagattgtcccaggtagagtttccactgaagtggatgctagattatccttcgacaaggaagctaccatcgctaaggctttggaaatcattaaattatatgaagatttaggaatctccagagaaagagtccttattaagatcgcttccacttgggaaggtattcaagccgctagagaattggaaagtaaacacaagatccactgtaatttgaccttgttgttctccttctctcaagctgtcgcttgtgctgaagctaaggtcactttgatctccccattcgttggtagaatcatggattggtataaggctaagaccggtgaaacttacaacggtagaaatgacccaggtgttctttctgtccataagatttacaactactacaagaaacatggttacaaaaccattgtcatgggtgcttctttcagaaacgtcgatgaaattaagaacttggctggtgtcgattacttaaccatctctccaaacctgttagatgaattattgaacagtaacgatcatgtcccaagagtcttggatgtcgctactgccaagaaggaaggtgctgaaaaaatctcatacattgacgatgaagctaccttcagattcagcttgaatgaagatgccatgggaactgaaaagttggctgaaggtattagaaaattctctgctgatattgtcactttgtttgatatgattgaaaagaaggttactgcttaa

SEQ ID NO: 98698 - protein, 335 aa, Saccharomyces castellii
MSEPAQKKQKTTGSSLEQLKASGTVVVADTGDFASIAKFTPQDSTTNPSLILAAAKQPAYAKLIDVAVSYGKKNGKTTDEKVELAVDRLLVEFGKEILKIVPGRVSTEVDARLSFDKEATIAKALEIIKLYEDLGISRERVLIKIASTWEGIQAARELESKHKIHCNLTLLFSFSQAVACAEAKVTLISPFVGRIMDWYKAKTGETYNGRNDPGVLSVHKIYNYYKKHGYKTIVMGASFRNVDEIKNLAGVDYLTISPNLLDELLNSNDHVPRVLDVATAKKEGAEKISYIDDEATFRFSLNEDAMGTEKLAEGIRKFSADIVTLFDMIEKKVTA

SEQ ID NO: 98699 - DNA, 1008 bp, Saccharomyces bayanus
  CDS (1)..(1008)
atgtctgaaccagcccaaaagaaacaaaaggtcgccaataactctttggagcaattgaaggccgccggtaccgtcgtcgtcgccgacactggtgatttcaactccattgccaagttccagccccaagactccaccaccaacccatctttgatcttggctgctgctaaacaaccagctcacgctaagttgatcgatgttgctgtggcatacggtaagaagcacggtaagactaccgcagaacaagtggaaagcgccgtagatagattgttggtggaattcggtaaggaaatcttgaaaattgtcccaggtagagtttctaccgaagtggacgccagattgtctttcgacactcaagctaccattgacaaggccagacacatcattaagttgtacgaacaagaaggtgtctctagagaaagagtccttatcaagatcgcttccacctgggaaggtattcaagccgccaaggaattggaagaaaaggacggtatccactgtaacttgactctattattctccttcggtcaagccgtcgcctgtgccgaagctcaagtcactttgatctctccattcgtcggtagaattctagactggtacaaggccagtaccggtaaggaatacgccggtgaaaccgacccaggtgtcgtttccgtcaagagtatttacaactactacaagaagtacggctacaagaccatcgttatgggtgcctctttcagaagcactgacgaaatcaaaaacttggccggtgtcgactatctaacaatctctcctcagttattggacacattgatgaacagcactgagcctttcccaagagtcttggaccctgccactgccaagaaggaagccggcgacaagatctcgtacattaacgacgaacctaagttcagattcgacttgaacgaagacgccatggccaccgaaaaattgtccgaaggtatcagaaagttctctgctgatattgtcactttgttcgatttgatcgaaaagaaggtcaccgcttaa

SEQ ID NO: 98700 - protein, 335 aa, Saccharomyces bayanus
MSEPAQKKQKVANNSLEQLKAAGTVVVADTGDFNSIAKFQPQDSTTNPSLILAAAKQPAHAKLIDVAVAYGKKHGKTTAEQVESAVDRLLVEFGKEILKIVPGRVSTEVDARLSFDTQATIDKARHIIKLYEQEGVSRERVLIKIASTWEGIQAAKELEEKDGIHCNLTLLFSFGQAVACAEAQVTLISPFVGRILDWYKASTGKEYAGETDPGVVSVKSIYNYYKKYGYKTIVMGASFRSTDEIKNLAGVDYLTISPQLLDTLMNSTEPFPRVLDPATAKKEAGDKISYINDEPKFRFDLNEDAMATEKLSEGIRKFSADIVTLFDLIEKKVTA

SEQ ID NO: 98701 - DNA, 1002 bp, Saccharomyces bayanus
  CDS (1)..(1002)
atgtcagaacacgaagataaaaaacaaaaagttggtggttcatccttggaccagttgaagaatgctggtacccatgtggtggctgactctggggattttgagtctatttccaagtacgaaccgcaggactcaactaccaacccttctctgatattggccgcttcaaagctagagaagtatgagaagctgatcgacgccgctgtcgagttcggtagaaagcatggtaagaccgaccatgagaaagtcgaaaatgccatggataaaattttggtggagtttggttcacagatcttgaagatcgtgccaggtagagtttccaccgaggtggatgcaaggctgtcctttgacaagaaagccacggtcaagaaagcccttcatatcatcaaactatacaaagacatgggcgtacctaaagaaagagtattgattaagatagcttctacatgggaaggtatccaagccgctaaggagttggaagcaaaacacggcatccactgtaacatgacgttgttgttttccttcactcaagcagtagcatgcgcggaggcaaacgttactttgatttccccatttgtgggaaggattatggacttctacaaggagcggtcaggtgaagactacaccggagagactgatcccggtgttctttctgtaagaaagatatacagctattataagaggcacggctataaaaccgaagtgatggcggcttcctttagaaaccttgacgagttgaaggccttggcgggtattgatgacatgactctcccactaaaccttttgcaacagttacacgagtcaacagatcctattgaaaacaaattgaatgcagagaccgctaagcaagaaggtgttgaaaaagtatcttttatcaatgacgaacctcacttcagatacgtctttaacgaagatcaaatggccacagaaaaactatctgatggtattaggaaattttctgtagacattgaagcgctgtacgagctggttgagaaaaaaatgtga

SEQ ID NO: 98702 - protein, 333 aa, Saccharomyces bayanus
MSEHEDKKQKVGGSSLDQLKNAGTHVVADSGDFESISKYEPQDSTTNPSLILAASKLEKYEKLIDAAVEFGRKHGKTDHEKVENAMDKILVEFGSQILKIVPGRVSTEVDARLSFDKKATVKKALHIIKLYKDMGVPKERVLIKIASTWEGIQAAKELEAKHGIHCNMTLLFSFTQAVACAEANVTLISPFVGRIMDFYKERSGEDYTGETDPGVLSVRKIYSYYKRHGYKTEVMAASFRNLDELKALAGIDDMTLPLNLLQQLHESTDPIENKLNAETAKQEGVEKVSFINDEPHFRYVFNEDQMATEKLSDGIRKFSVDIEALYELVEKKM

SEQ ID NO: 98703 - DNA, 1218 bp, Arabidopsis thaliana
  CDS (1)..(1218)
atgccactctcgttgcaatctccgccttgtgcaactctctctgcttcaatccgaaagggacgatggaagacgctcgccgccggattctccgttactcctcttcccgccgttaacttcagtcttcggcgatcgattcctcggattcttgcttccgctagttcctcctcctctcctgcgtcttcgtctctcgaagctggtgagaacaatgagctaaatgctgtttcagcttttagtgagattgttcctgatactgtcgttttcgatgactttgagaggtttccgccgactgcagctactgttagctctgctcttcttctgggtatctgtggtctacctgataccattttccgcaatgctgtggacatggctttggcggattcttcttgtgcagggcttgaaaccacagaatctcgactctcttgctttttcaataaggctattgtcaacgtaggtggcgatcttgtcaaactcgttccaggtcgagtttctactgaagtggatgcacgtcttgcttatgacacaaatggcattatccgcaaggttcatgatctgctgagactatacaatgaaatcgatgtaccacacgaccggctcctattcaaaatccctgcaacttggcaaggtattgaagctgcaagattgttggaatcagagggaatccaaacgcatatgacctttgtttacagctttgctcaagctgcagcagcttctcaagccggtgcttctgtcattcagattttcgtcggtcgcctcagggattgggcgcgtaatcattcgggagataccgagattaaatctgctattaaatcgggagaagatcctggtttggccttggtcaaaagatcatataactacattcacaagtatggttacaagtccaagctgatggctgctgctgtccggaacaaacaagacttgttcagtcttctcggggtcgattatgtcattgcaccattaaaggtactgcaatctcttaaagattcacccgccattcccgatgatgaaaaatactcatttgttcggaaacttactcctgaaactgcaacacattaccacttcaccaacaaagagctggtcaaatgggaccagctaagcttggcttcatctatgggtcctgcatcagtggagcttttatcagccggtgttgaaggttatgcgaaccaagcgaaacgtgttgaagagcttttcgggaagatttggccacctcctaatgtctaa

SEQ ID NO: 98704 - protein, 405 aa, Arabidopsis thaliana
MPLSLQSPPCATLSASIRKGRWKTLAAGFSVTPLPAVNFSLRRSIPRILASASSSSSPASSSLEAGENNELNAVSAFSEIVPDTVVFDDFERFPPTAATVSSALLLGICGLPDTIFRNAVDMALADSSCAGLETTESRLSCFFNKAIVNVGGDLVKLVPGRVSTEVDARLAYDTNGIIRKVHDLLRLYNEIDVPHDRLLFKIPATWQGIEAARLLESEGIQTHMTFVYSFAQAAAASQAGASVIQIFVGRLRDWARNHSGDTEIKSAIKSGEDPGLALVKRSYNYIHKYGYKSKLMAAAVRNKQDLFSLLGVDYVIAPLKVLQSLKDSPAIPDDEKYSFVRKLTPETATHYHFTNKELVKWDQLSLASSMGPASVELLSAGVEGYANQAKRVEELFGKIWPPPNV

SEQ ID NO: 98705 - DNA, 969 bp, Xanthomonas campestris pv
  CDS (1)..(969)
atgactgcatccccctccaagctcgcccagctgcgtgaactgtccgttgtggttgccgataccggcgactacgacgccatcaagcgcctgcagccggtcgactgcaccaccaatcccaccctggtcaaaaaggccctggatctgccggtctacgccgacctgatcgaacgcgagctggcctggggccgcgagcacggcggcgacgatcgcactgccaccgtcaacgaagtcgccgaccggctcaccatcggcgtaggcgtcaagctggccggactggtgccggggcgcgtgtccaccgaagtcgacgccgatctggcacacgacacccaggccaccatcgccaaggcgcgcaagttcattgcgatgtacgccgagcgcggcgtgtccaaggacaagatcctgatcaagatcgccgcgacctgggaaggcatcgaagccgcccgtcagctgcagaaagaaggcatcgactgcaacctgacgctgatcttcaaccgctcgcaggcgctggcctgcgctgaagccggcgtgttcctgatctccccgttcgtgggccgcatcctggactactacgtgggcaaggggcagaccccggccagcatcgacgaagacccgggcgtggtcttcgtgcgcaccgtctacaacgagttcaagcagcgcggctactccacagtagtcatgggagcctcgttccgctccaccgcgcagatcgaagcgctggcaagttgcgaccgcctgaccatttcgccggacctgctggaaaagctcgacgccgagcacggcgagttgccgcgcaagctctccccggccaaggccgacaatgcccagttcaccccgatcgacagcgacagcttcgcttcgggcctggccgccgacccgatggccaccgagaagctggccggcggcatcgacacgttcgccaaggacttgcacgcactgcgcaagaccattgccgacaagctcgctggctga

SEQ ID NO: 98706 - protein, 322 aa, Xanthomonas campestris pv
MTASPSKLAQLRELSVVVADTGDYDAIKRLQPVDCTTNPTLVKKALDLPVYADLIERELAWGREHGGDDRTATVNEVADRLTIGVGVKLAGLVPGRVSTEVDADLAHDTQATIAKARKFIAMYAERGVSKDKILIKIAATWEGIEAARQLQKEGIDCNLTLIFNRSQALACAEAGVFLISPFVGRILDYYVGKGQTPASIDEDPGVVFVRTVYNEFKQRGYSTVVMGASFRSTAQIEALASCDRLTISPDLLEKLDAEHGELPRKLSPAKADNAQFTPIDSDSFASGLAADPMATEKLAGGIDTFAKDLHALRKTIADKLAG

SEQ ID NO: 98707 - DNA, 1194 bp, Solanum lycopersicum
  CDS (1)..(1194)
atgtcatcctctttgcattctccgctatactcctctctctcatcttcctcagctctccaggacaggaaactgagaaatgcagttaattttgcgaagccgaatttgattttcaagcctcgccggtcgtttcctctaatccgagcttccgctggcttctcctcatctctcgatacaggtttgagtactgaattggatgctgtagcaaatcatagtgagatcgttccagatacagtcattttcgatgatttcgagaaatttcctccaactgctggtactgcaagctcttctctgctcttaggcatatgtggtctacctgatacaaaatttaagagtgctgtagacagagctttatcagattctgagtgttatggattggagagttctgatcttcagatgtcttgtttcttcaacaaggctttagcacacgttggcggtgatctagcaaagcttgtgcctggtcgagtttctactgaagtggatgctcgcctcgcatacgacacacatggcattgtgcgaaaggtgcatgaccttttgaaagcctataccgaaattgaagtgcctccagaaagattgctgttcaaaattcctgcaacttggcaaggaattgaggcatcaagggtgctcgaagctgaaggtatacagacacatttgacatttgtttacagcttttgtcaagctgctgctgctgctcaagctggtgcttctgtcattcagatttttgttggtcgcctgagggattggtctcgcaatcacactggtgactctgaagttgaaagtgctcttagaagaggagaagacccagggttggctttggtaacaaaaacttataactacatccacaagtatgggcacaaaacaaagctgatggctgctgcagtacggaacaagccagatgtcttcaaccttttggggggtggatacattattaccccactgaaggtattgcaatctcttaaagaatctgtgaccctacttgatgagaagtactcatttacaagaagattatctccacagtcagcagctgccttcaatttcactcaagatgagcttcaaaagtgggatcagtatagcttttcctcggctatgggtcctgcatcagtggagctcctcactattggactggatgggtatattaatcaggctaagcgggttgaagagttgtttggcaagatatggccaccaccaaatgtatga

SEQ ID NO: 98708 - protein, 397 aa, Solanum lycopersicum
MSSSLHSPLYSSLSSSSALQDRKLRNAVNFAKPNLIFKPRRSFPLIRASAGFSSSLDTGLSTELDAVANHSEIVPDTVIFDDFEKFPPTAGTASSSLLLGICGLPDTKFKSAVDRALSDSECYGLESSDLQMSCFFNKALAHVGGDLAKLVPGRVSTEVDARLAYDTHGIVRKVHDLLKAYTEIEVPPERLLFKIPATWQGIEASRVLEAEGIQTHLTFVYSFCQAAAAAQAGASVIQIFVGRLRDWSRNHTGDSEVESALRRGEDPGLALVTKTYNYIHKYGHKTKLMAAAVRNKPDVFNLLGGGYIITPLKVLQSLKESVTLLDEKYSFTRRLSPQSAAAFNFTQDELQKWDQYSFSSAMGPASVELLTIGLDGYINQAKRVEELFGKIWPPPNV

SEQ ID NO: 98709 - DNA, 951 bp, Erwinia carotovora subsp
  CDS (1)..(951): transl_table=11
atgaatcaattagaagcccttaagcagtttaccgtagtggtcgccgatagcggcgatatcgactccattcgccaattttcaccacaagatgccaccacgaatccgtctctgattctgaaagcagccaccctgccccaataccaaccgctctttgatgacgcgattgcctatgctaacctgcaaggcggtagcccggaaacgcggctcatcaacgccagcgaccgactggcggtgaacatcggcgcagaagtactgaaaagtattcccggccgcatctccaccgaagtggatgcccgcctctcgttcgatcgcgggatgtgcgtcgccaaagcccgtaaacttattgggatgtatcaggaaaaagacattccacgctcgcgcatcctgatcaaactcgccgccacttgggaaggcattcgcgcggctgaagagctggagaaagaagggattaactgcaacctgacgctgctattctcttttgctcaggcgcgtgcctgcgccgaagcgggcgtcttcctgatctcgccgtttgtgggccggatttatgactggtatcaggaaaaacagcccaccagcgattatcaggccgaaagcgatcccggcgtgatctccgtgcgtgatatctatgattattacaaacgccaccgctaccaaaccgtgatcatgggtgccagcttccgcaaagtggaacaaattttggcactggcgggatgcgatcgtctgacgatttcccctgcgctgctggagcagttgaaaaatagcagtgatcctgtcgaacgccaattgacaccgtccaccgaagcattccatcccccttcaccgctgtctgaagccgaattccgctgggaacatcatcaggatgcgatggccgtcgataaactggcggaaggcattcgcctgttcgctgccgaccaacagaagctggaagcgctgctggcggccaagctgtaa

SEQ ID NO: 98710 - protein, 316 aa, Erwinia carotovora subsp
MNQLEALKQFTVVVADSGDIDSIRQFSPQDATTNPSLILKAATLPQYQPLFDDAIAYANLQGGSPETRLINASDRLAVNIGAEVLKSIPGRISTEVDARLSFDRGMCVAKARKLIGMYQEKDIPRSRILIKLAATWEGIRAAEELEKEGINCNLTLLFSFAQARACAEAGVFLISPFVGRIYDWYQEKQPTSDYQAESDPGVISVRDIYDYYKRHRYQTVIMGASFRKVEQILALAGCDRLTISPALLEQLKNSSDPVERQLTPSTEAFHPPSPLSEAEFRWEHHQDAMAVDKLAEGIRLFAADQQKLEALLAAKL

SEQ ID NO: 98711 - DNA, 1005 bp, Kluyveromyces lactis
  CDS (1)..(1005)
atgtctgaaccaagtgctaagaaacaaaagtttgccaactctttggaagccttgaaggccaccggtaccactgtcgttgccgacactggtgatttcgaatctattgctaagttcactccacaagatgctactaccaacccatctttgatcttggccgctgccaagcaacaagcctacgctaagttgatcgactctgctgtacaatacggtaagaagcaaggtcaaaacattgacgagcaagttgaaattgctgttgacaagctattggtcgaattcggtactgctatcttgaaggtcgttccaggtagagtttctactgaagtcgatgctagattgtccttcgacaaggatgctaccgttaagaaggctttggaaatcatcaagttgtatgaagcagaaggtatttccaaggacagagtcttgatcaagattgcttccacttgggaaggtatccaagctgctcaagaactagaaaaggaacacgatatccacgtcaacttgactttgttgttctctttcgctcaagccgttgctgctgctgaagctaacgttaccttgatttctccattcgttggtagaatcttggattggtacaaggccagcactggtgaaacttacactgctgaaactgatccaggtgtgatttctgtcaagagtatctacaattactacaagaagcatggttacaacaccattgttatgggtgcttccttcagaaacgtgggtgaaattaaggctcttgccggtgtcgatttcttgaccatttctccaaagttgttggacgaattgttgtcctctgatgaaccagttgctaagatcttggaccctgaatccgcaaaggctgaaggttctgaaagagtttctttcatcaacgacgagcctaaattcagattcgagttgaacgaagatgctatggccactgaaaagttgtctgaaggtatcagaaagttctctgctgatatcgtcacactgttcgacttaatcaaggctaagatccaagcttaa

SEQ ID NO: 98712 - protein, 334 aa, Kluyveromyces lactis
MSEPSAKKQKFANSLEALKATGTTVVADTGDFESIAKFTPQDATTNPSLILAAAKQQAYAKLIDSAVQYGKKQGQNIDEQVEIAVDKLLVEFGTAILKVVPGRVSTEVDARLSFDKDATVKKALEIIKLYEAEGISKDRVLIKIASTWEGIQAAQELEKEHDIHVNLTLLFSFAQAVAAAEANVTLISPFVGRILDWYKASTGETYTAETDPGVISVKSIYNYYKKHGYNTIVMGASFRNVGEIKALAGVDFLTISPKLLDELLSSDEPVAKILDPESAKAEGSERVSFINDEPKFRFELNEDAMATEKLSEGIRKFSADIVTLFDLIKAKIQA

SEQ ID NO: 98713 - DNA, 969 bp, Schizosaccharomyces pombe
  CDS (1)..(969)
atgtcttcattggaacaattaaaggccactggcactgttgtcgtctccgatactggagattttgaatcgatcgccaaatacaaaccccaagatgccaccacaaacccttctctcatcttggccgcttctaagaagccccaatatgctgctctcgtcgacgctgctgttgactatgccaaggcaaagggtggttccatcaactctcaaattgagattgcttttgatcgtcttttgatcgaattcggtaccaagatcctcgctatcgtccctggccgtgtctccaccgaagttgatgctcgttactcttttgacacccaaactactatcgagaaggctcgtcacctcatcaagttgtacgaagccgagggcattggtcgtgagcgtgttctcatcaagattgcctccacctatgagggtatccaagctgctaagcaactcgaggaagagggcatccactgcaacttgactctcttgttctcttttgtccaagctgttgcttgcgccgaggctaacgttaccttgatttctcctttcgtcggtcgtattctcgatttctacaaggctaagaataaccgtgactataccgctcaagaagaccccggtgtcgtcagtgtctctaacatcttcaactactacaaaaaattcggttacaagaccattgtcatgggtgcttctttccgtaacgtcggtgagatcaaggaactcgctggtgttgactttttgaccatctcccccgcccttcttgagcagctcaacaacagcaccgacgctgtccccaagaagcttgatgcctccaaggcttccagcctcaatttggagaaggtttcctaccttactgatgagcccaagttccgtttcgactttaacaacgacgaaatggctgtagtcaagttgtccactggtatcgctgcctttgccaaggatgctgatactcttcgtaccatcttgaaggctaagcttgaggcctaa

SEQ ID NO: 98714 - protein, 322 aa, Schizosaccharomyces pombe
MSSLEQLKATGTVVVSDTGDFESIAKYKPQDATTNPSLILAASKKPQYAALVDAAVDYAKAKGGSINSQIEIAFDRLLIEFGTKILAIVPGRVSTEVDARYSFDTQTTIEKARHLIKLYEAEGIGRERVLIKIASTYEGIQAAKQLEEEGIHCNLTLLFSFVQAVACAEANVTLISPFVGRILDFYKAKNNRDYTAQEDPGVVSVSNIFNYYKKFGYKTIVMGASFRNVGEIKELAGVDFLTISPALLEQLNNSTDAVPKKLDASKASSLNLEKVSYLTDEPKFRFDFNNDEMAVVKLSTGIAAFAKDADTLRTILKAKLEA

SEQ ID NO: 98715 - DNA, 1008 bp, Saccharomyces cerevisiae
  CDS (1)..(1008)
atgtctgaaccagctcaaaagaaacaaaaggttgctaacaactctctagaacaattgaaagcctccggcactgtcgttgttgccgacactggtgatttcggctctattgccaagtttcaacctcaagactccacaactaacccatcattgatcttggctgctgccaagcaaccaacttacgccaagttgatcgatgttgccgtggaatacggtaagaagcatggtaagaccaccgaagaacaagtcgaaaatgctgtggacagattgttagtcgaattcggtaaggagatcttaaagattgttccaggcagagtctccaccgaagttgatgctagattgtcttttgacactcaagctaccattgaaaaggctagacatatcattaaattgtttgaacaagaaggtgtctccaaggaaagagtccttattaaaattgcttccacttgggaaggtattcaagctgccaaagaattggaagaaaaggacggtatccactgtaatttgactctattattctccttcgttcaagcagttgcctgtgccgaggcccaagttactttgatttccccatttgttggtagaattctagactggtacaaatccagcactggtaaagattacaagggtgaagccgacccaggtgttatttccgtcaagaaaatctacaactactacaagaagtacggttacaagactattgttatgggtgcttctttcagaagcactgacgaaatcaaaaacttggctggtgttgactatctaacaatttctccagctttattggacaagttgatgaacagtactgaacctttcccaagagttttggaccctgtctccgctaagaaggaagccggcgacaagatttcttacatcagcgacgaatctaaattcagattcgacttgaatgaagacgctatggccactgaaaaattgtccgaaggtatcagaaaattctctgccgatattgttactctattcgacttgattgaaaagaaagttaccgcttaa

SEQ ID NO: 98716 - protein, 335 aa, Saccharomyces cerevisiae
MSEPAQKKQKVANNSLEQLKASGTVVVADTGDFGSIAKFQPQDSTTNPSLILAAAKQPTYAKLIDVAVEYGKKHGKTTEEQVENAVDRLLVEFGKEILKIVPGRVSTEVDARLSFDTQATIEKARHIIKLFEQEGVSKERVLIKIASTWEGIQAAKELEEKDGIHCNLTLLFSFVQAVACAEAQVTLISPFVGRILDWYKSSTGKDYKGEADPGVISVKKIYNYYKKYGYKTIVMGASFRSTDEIKNLAGVDYLTISPALLDKLMNSTEPFPRVLDPVSAKKEAGDKISYISDESKFRFDLNEDAMATEKLSEGIRKFSADIVTLFDLIEKKVTA

SEQ ID NO: 98717 - DNA, 951 bp, Salmonella paratyphi
  CDS (1)..(951): transl_table=11
atgaaccagctagacggcatcaaacaattcactaccgtcgtcgccgacagcggcgacattgagtccatccgccactaccagccgcaggatgccacgacaaatccctctttactgttaaaagccgccggacttgagcagtatggtcatttgattgaggatgcgattgcctggggaaaaaaacacggcggtacgcaggaacagcaggttgcggcagccagcgataaactggcggtcaattttggcgcggaaatactgaaaagtattcccggtcgcgtctccactgaagtcgacgcgcggttatcattcgataaagaaaaaagtatcgagaaagcgcgccatctggtgggtctctaccagcagcagggtattgataaatcgcgcattctgatcaagctcgccgcaacctgggaaggtatccgcgccgccgggcagctcgaaaaagaaggcattaattgcaacctgacgttgttgttctcttttgcccaggcgcgcgcctgcgccgaagcgggcgtctatttgatctctccgttcgtgggccgaatttacgactggtatcaggcgcgtagtccgctagagccgtatgtcgtggaggaagatcccggcgtgaaatcggtacgcaatatctacgattactttaaacagcatcgctatgaaaccatcgtgatgggcgcaagtttccgccgtactgagcaaatcctcgcgctaaccggctgcgatcgactgactatctctcctaacctgcttaaagagctgaaagaaaaagaagaaccggtgatccgtaaactggtgccttcctcgcagatgttccaccgtcctacgtcaatgacggaagcggagttccgctgggaacataatcaggacgcgatggccgtagagaagctgtcggaaggtatccgtctttttgccgttgaccagcgcaaactggaagacctgcttgccgccaaactataa

SEQ ID NO: 98718 - protein, 316 aa, Salmonella paratyphi
MNQLDGIKQFTTVVADSGDIESIRHYQPQDATTNPSLLLKAAGLEQYGHLIEDAIAWGKKHGGTQEQQVAAASDKLAVNFGAEILKSIPGRVSTEVDARLSFDKEKSIEKARHLVGLYQQQGIDKSRILIKLAATWEGIRAAGQLEKEGINCNLTLLFSFAQARACAEAGVYLISPFVGRIYDWYQARSPLEPYVVEEDPGVKSVRNIYDYFKQHRYETIVMGASFRRTEQILALTGCDRLTISPNLLKELKEKEEPVIRKLVPSSQMFHRPTSMTEAEFRWEHNQDAMAVEKLSEGIRLFAVDQRKLEDLLAAKL

SEQ ID NO: 98719 - DNA, 1002 bp, Saccharomyces cerevisiae
  CDS (1)..(1002)
atgtcagaaccttcagagaaaaaacaaaaagttgctacctcatctttagaacaattaaaaaaggccgggacccatgtggttgctgattcgggtgattttgaggctatttcgaagtatgaaccacaggattcaacaactaacccttctctgatattggctgcttcaaagttggagaaatatgcgaggtttatcgacgctgccgttgaatatggtagaaagcatggcaaaactgatcatgagaaaatcgagaacgccatggataagattttggtggaattcggcacccagattttgaaggtagtcccaggaagggtttccactgaagtagacgcaaggttatcttttgataagaaggcgacggtgaagaaggctctccacatcatcaaactatataaagatgcgggagtacctaaagaaagagtcttgatcaagatagcttctacgtgggagggtatccaagctgctagagaattggaagtaaagcatggtattcattgtaatatgacattactgttttcctttacgcaagcagtagcctgtgcggaggcaaatgtcacattgatctccccatttgttggaaggattatggacttttacaaggccctttcaggcaaagactatactgcagaaactgatcccggtgttctttctgttaagaagatatacagttactataagaggcatggttatgcaactgaggtaatggcggcttctttcaggaatttagatgaattgaaggcgttagccggtattgataatatgactctcccactgaaccttctagaacagttatatgaatcaacagatcctattgaaaacaaattgaattctgagagtgctaaggaagaaggcgtcgaaaaagtctcttttatcaacgacgagcctcatttcagatatgttttaaacgaagatcaaatggctacagaaaaactatcagatggtatcagaaaattctccgcagacattgaagcactgtacaaactggttgaagaaaaaatgtga

SEQ ID NO: 98720 - protein, 333 aa, Saccharomyces cerevisiae
MSEPSEKKQKVATSSLEQLKKAGTHVVADSGDFEAISKYEPQDSTTNPSLILAASKLEKYARFIDAAVEYGRKHGKTDHEKIENAMDKILVEFGTQILKVVPGRVSTEVDARLSFDKKATVKKALHIIKLYKDAGVPKERVLIKIASTWEGIQAARELEVKHGIHCNMTLLFSFTQAVACAEANVTLISPFVGRIMDFYKALSGKDYTAETDPGVLSVKKIYSYYKRHGYATEVMAASFRNLDELKALAGIDNMTLPLNLLEQLYESTDPIENKLNSESAKEEGVEKVSFINDEPHFRYVLNEDQMATEKLSDGIRKFSADIEALYKLVEEKM

SEQ ID NO: 98721 - DNA, 951 bp, Escherichia coli O157
  CDS (1)..(951): transl_table=11
atgaacgagttagacggcatcaaacagttcaccactgtcgtggcagacagcggcgatattgagtccattcgccattatcatccccaggatgccaccaccaatccttcgctgttactcaaggctgccggattatcacaatatgagcatttaatagacgatgctatcgcctggggtaaaaaaaatggcaagacccaggaacaacaggtggtcgcagcgtgtgacaaactggcggtcaatttcggtgctgaaatcctcaaaatcgtacccggtcgcgtgtcaacagaagttgatgcacgcctctcttttgataaagaaaagagtattgagaaggcgcgccatctggtggacttgtatcagcaacaaggcgttgagaaatcacgcattctgatcaaactggcttcgacctgggaaggaattcgcgcggcagaagagctggaaaaagaaggtattaactgcaacctgacgctgctgttttcttttgcacaggcgcgggcctgtgcagaagcgggcgtttttctgatttcgccgtttgtcgggcgtatttatgactggtatcaggcacgcaagccgatggacccatatgtggtggaagaagatccgggcgttaaatcggtgcgcaatatctacgactactataagcaacaccactatgaaaccattgtgatgggcgcgagcttccgtcgcaccgaacaaatcctcgccttaaccggctgcgatcgactgactatcgcaccgaatttgctgaaggagctgcaggaaaaagtttcgccagtggtacgtaaattaatcccaccttctcagacgttcccacgcccagctcccatgagcgaagcggagttccgttgggagcacaatcaggatgcgatggcggtagaaaaactgtctgaaggcattcgtctgttcgccgttgatcaacgcaaactggaagatcttcttgccgccaaactataa

SEQ ID NO: 98722 - protein, 316 aa, Escherichia coli O157
MNELDGIKQFTTVVADSGDIESIRHYHPQDATTNPSLLLKAAGLSQYEHLIDDAIAWGKKNGKTQEQQVVAACDKLAVNFGAEILKIVPGRVSTEVDARLSFDKEKSIEKARHLVDLYQQQGVEKSRILIKLASTWEGIRAAEELEKEGINCNLTLLFSFAQARACAEAGVFLISPFVGRIYDWYQARKPMDPYVVEEDPGVKSVRNIYDYYKQHHYETIVMGASFRRTEQILALTGCDRLTIAPNLLKELQEKVSPVVRKLIPPSQTFPRPAPMSEAEFRWEHNQDAMAVEKLSEGIRLFAVDQRKLEDLLAAKL

SEQ ID NO: 98723 - DNA, 954 bp, Pasteurella multocida
  CDS (1)..(954): transl_table=11
atgacaacacaacttgattctctacgtaatatgacggtggtggttgctgatactggtgatattgaagctatcaaaaaataccaacctgaagatgcaacaacgaacccatctttaattctcagcgcgtctgccttgccacaatatgcctcattaattgatgaagccattgcttatgccaaatcaaaaagcaactgttcaaaacaacaattaattgatgcagaagataaattagccgttaacatcggcttggaaatcttgaaaattgtgccgggacgcatttcaacagaagtggatgctcgtctttcttatgatacacaagcaacaatcgaaaaagcgaaaaaattaatcgcactttataacgaagctggtatctcaaacgatcgtatcttgatcaaaattgcttcaacttggcaagggattcgtgcggcagaagaattagaaaaacaaggtattaactgtaacttaacccttttattctctgaagcgcaagcgcgtgcttgtgcggaagccggggtttacttaatttcgccattcgtgggtcgaattcttgactggtacaaagccaacagcgataaaaaagactatgcgccggcagaagatccgggtgtgatttccgtgactaaaatctataactattacaaacaacacggctataacacgatcgtcatgggcgcaagtttccgtaatgtcggtgaaattaccgaattagccggctgtgaccgcttaaccattgcaccagccttgttgaaagagttacaagaaaacaacgcaccacttgagcgtaaattaagctacacgggcgaagtgaaagcaaaaccacaaccattaactgaagcagaattctattggcaacacaatagcgatgcaatggcagtggaaaaactggctgacggtatccgtaaatttgcggccgaccaagaaaaattagaagcgatgttattaacaaaattctaa

SEQ ID NO: 98724 - protein, 317 aa, Pasteurella multocida
MTTQLDSLRNMTVVVADTGDIEAIKKYQPEDATTNPSLILSASALPQYASLIDEAIAYAKSKSNCSKQQLIDAEDKLAVNIGLEILKIVPGRISTEVDARLSYDTQATIEKAKKLIALYNEAGISNDRILIKIASTWQGIRAAEELEKQGINCNLTLLFSEAQARACAEAGVYLISPFVGRILDWYKANSDKKDYAPAEDPGVISVTKIYNYYKQHGYNTIVMGASFRNVGEITELAGCDRLTIAPALLKELQENNAPLERKLSYTGEVKAKPQPLTEAEFYWQHNSDAMAVEKLADGIRKFAADQEKLEAMLLTKF

SEQ ID NO: 98725 - DNA, 951 bp, Salmonella typhimurium
  CDS (1)..(951): transl_table=11
atgaaccagctagacggcatcaaacaattcactaccgtcgtcgccgatagcggcgacatcgagtccatccgccactaccagccgcaggatgccacgacaaatccctctttactgttaaaagccgccgggcttgagcagtatggtcatttgattgaggatgcgattgcctgggggaaaaaacacggcggtacgcaggaacagcaggttgcggcagccagcgataaactggcggttaattttggcgcggaaatactgaaaagtattcccggtcgcgtctccactgaagtcgacgcgcggttatcgttcgataaagaaaaaagtatcgagaaagcgcgccatctggtggatctctaccagcagcagggtgttgataaatcacgcattctgatcaagctcgccgcgacctgggaaggtatccgcgccgccgggcagctcgaaaaagagggtattaattgcaacctgacgttgttgttctcttttgcccaggcgcgcgcctgcgccgaagcgggcgtctatttgatctctccgttcgtgggccgaatttacgactggtatcaggcgcgtagtccgctggagccgtatgtcgtggaggaagatcccggcgtgaaatcggtacgcaatatctacgattactttaaacagcatcgctatgaaaccatcgtgatgggggcaagtttccgccgtactgagcaaatcctcgcgctaaccggctgcgatcgactgactatctcccctaacctgcttaaagagctgaaagaaaaagaagaaccggtgatccgtaaactggtgccttcctcgcagatgttccaccgtcctacgccaatgacggaagcggagttccgctgggaacataatcaggacgcgatggccgtagagaagctgtcggaaggtatccgtctttttgccgttgaccagcgcaaactggaagacctgcttgccgccaaactataa

SEQ ID NO: 98726 - protein, 316 aa, Salmonella typhimurium
MNQLDGIKQFTTVVADSGDIESIRHYQPQDATTNPSLLLKAAGLEQYGHLIEDAIAWGKKHGGTQEQQVAAASDKLAVNFGAEILKSIPGRVSTEVDARLSFDKEKSIEKARHLVDLYQQQGVDKSRILIKLAATWEGIRAAGQLEKEGINCNLTLLFSFAQARACAEAGVYLISPFVGRIYDWYQARSPLEPYVVEEDPGVKSVRNIYDYFKQHRYETIVMGASFRRTEQILALTGCDRLTISPNLLKELKEKEEPVIRKLVPSSQMFHRPTPMTEAEFRWEHNQDAMAVEKLSEGIRLFAVDQRKLEDLLAAKL

SEQ ID NO: 98727 - DNA, 954 bp, Escherichia coli O6
  CDS (1)..(954): transl_table=11
atgacggacaaattgacctcccttcgtcagtacaccaccgtagtggccgacactggggacatcgcggcaatgaagctgtatcaaccgcaggatgccacaaccaacccttctctcattcttaacgcagcgcagattccggaataccgtaagttgattgatgatgctgtcgcctgggcgaaacagcagagcaacgatcgcgcgcagcagatcgtggacgcgaccgacaaactggcagtaaatattggtctggaaatcctgaaactggttccgggccgtatctcaactgaagttgatgcgcgtctttcctatgacaccgaagcgtcaattgcgaaagcaaaacgcctgatcaaactctacaacgatgcaggtattagcaacgatcgtattctgatcaaactggcttctacctggcagggtatccgtgctgcagaacagctggaaaaagaaggtattaactgtaacctgaccctgctgttctccttcgctcaggctcgtgcttgtgcggaagcgggcgtgttcctgatctcgccgtttgttggccgtattcttgactggtacaaagcgaataccgataagaaagagtacgctccggcagaagatccgggcgtggtttctgtatctgaaatctaccagtactacaaagagcatggttatgaaaccgtggttatgggcgcaagcttccgtaacatcggcgaaattctggaactggcaggctgcgaccgtctgaccatcgcaccggcactgctgaaagagctggcggagagcgaaggggctatcgaacgtaaactgtcttacactggtgaagtgaaagcgcgtccggcgcgtatcactgagtccgagttcctgtggcagcacaaccaggatccaatggcagtagataaactggcggaaggtatccgtaagtttgctgttgaccaggaaaaactggaaaaaatgatcggcgatctgctgtaa

SEQ ID NO: 98728 - protein, 317 aa, Escherichia coli O6
MTDKLTSLRQYTTVVADTGDIAAMKLYQPQDATTNPSLILNAAQIPEYRKLIDDAVAWAKQQSNDRAQQIVDATDKLAVNIGLEILKLVPGRISTEVDARLSYDTEASIAKAKRLIKLYNDAGISNDRILIKLASTWQGIRAAEQLEKEGINCNLTLLFSFAQARACAEAGVFLISPFVGRILDWYKANTDKKEYAPAEDPGVVSVSEIYQYYKEHGYETVVMGASFRNIGEILELAGCDRLTIAPALLKELAESEGAIERKLSYTGEVKARPARITESEFLWQHNQDPMAVDKLAEGIRKFAVDQEKLEKMIGDLL

SEQ ID NO: 98729 - DNA, 951 bp, Pasteurella multocida
  CDS (1)..(951): transl_table=11
atgacacaattagattcgttacgcagtatgacggttgttgtcgcagatactggtgatattgaagcaattaagcaatatcagccacaagatgcaacaacaaatccttctttgattttaagtgcttctgcattgccccagtatgcgccattaattgatgacgccattgcttatgcgaaaacaaaaagtgattgtccacgccagcaattggttgatgctgaagataaactggccgttaatatcggcttagaaatactcaaaattatccccggacggatttctacagaagtcgatgcaaggctttcgtatgatacacaagcgactattgagaaagcgcgtaaattgatcaagctttataatgaagcgggaatagagaatcatcggatcctcatcaaaattgcttcaacttggcaaggtattcgtgctgcagaagtgcttgagaaagaaggaattaattgtaacttgacgttgttgttttctgaagcacaagcgagagcttgtgctgaagccggtgtgtatttaatttcaccgtttgtagggcgaattttagattggcataaagcaaatacgggtagacaagattatccggctgcggaagatccaggtgtgatttccgtgactcaaatttataattattataaacaacataattataagacggttgtcatgggcgcaagtttccgaaatgtagatgaaattattgagttagcaggatgtgatcgtttgacgatttcacctactttattgagtcatttacaagcaagagaaggggaacttgttcgtaagttagcattcagcggcgagttaaaagacagacctcaacctttaacagagagcgagttttattggcaacataacagcgatccaatggctgttgcaaaattagcagaaggcatttgtaaatttgcagaagatcaagaaaaactagaaaaaatgctcttggaaagactataa

SEQ ID NO: 98730 - protein, 316 aa, Pasteurella multocida
MTQLDSLRSMTVVVADTGDIEAIKQYQPQDATTNPSLILSASALPQYAPLIDDAIAYAKTKSDCPRQQLVDAEDKLAVNIGLEILKIIPGRISTEVDARLSYDTQATIEKARKLIKLYNEAGIENHRILIKIASTWQGIRAAEVLEKEGINCNLTLLFSEAQARACAEAGVYLISPFVGRILDWHKANTGRQDYPAAEDPGVISVTQIYNYYKQHNYKTVVMGASFRNVDEIIELAGCDRLTISPTLLSHLQAREGELVRKLAFSGELKDRPQPLTESEFYWQHNSDPMAVAKLAEGICKFAEDQEKLEKMLLERL

SEQ ID NO: 98731 - DNA, 996 bp, Drosophila melanogaster
  CDS (1)..(996)
atgggaagtgatcgcacgttaaaaaagcaaaagatgtcggtattacaggaactcaagaaaatcaccacaattgtggctgacaccggcgactttgaagccatcaacatctataagcccacggatgccaccactaatccctccctcatcttgtccgcttcgtccatggagcggtaccagccgctggtccaaaaggcggtggaatacgccaagggcaagaagggctccgtgagtgagcaggtggccgaggccatggactacctgtgcgtgctgttcggaacggaaatcctgaaggttgtgcccggtcgcgtttccaccgagatcgatgcccgcttgtccttcgacaccaagaagagcgtggagaaggccctgaagctgatcgccctgtacaaatccctgggcgtcgacaaggagcgaattctgatcaagctggcgtccacctgggagggcatcaaggcggccgagatcctggagaacgagcacggtgtgcactgcaacctgacgctccttttctcgttcgcacaggccgtggcttgcgccgaggccggcgtgaccctcatctccccgttcgtgggccgcatcctggactggtacgtggccaacacggataccaagaagttcgaggcgctcaaggacccgggcgtgatctccgtgacgaacatctacaactactacaagaagttcggctacaagaccctggtcatgggcgcctccttccgtaacgtgggcgaaatcaaggccctggctggctgcgatctgcttaccatcagcccagcgctgcttaaggagctggagaacgagaccgagtcggtggtcacctacctgtccgtaagcaacgccaagctgcaggacatcgagaagatcaccgtcgatgagagccggttccgctggctgctcaacgaggacgccatggccaccgacaaactttccgagggcatcaggaagttcgccgtggatactgttaagctggagaatttgattaagacctatcttaagtag

SEQ ID NO: 98732 - protein, 331 aa, Drosophila melanogaster
MGSDRTLKKQKMSVLQELKKITTIVADTGDFEAINIYKPTDATTNPSLILSASSMERYQPLVQKAVEYAKGKKGSVSEQVAEAMDYLCVLFGTEILKVVPGRVSTEIDARLSFDTKKSVEKALKLIALYKSLGVDKERILIKLASTWEGIKAAEILENEHGVHCNLTLLFSFAQAVACAEAGVTLISPFVGRILDWYVANTDTKKFEALKDPGVISVTNIYNYYKKFGYKTLVMGASFRNVGEIKALAGCDLLTISPALLKELENETESVVTYLSVSNAKLQDIEKITVDESRFRWLLNEDAMATDKLSEGIRKFAVDTVKLENLIKTYLK

SEQ ID NO: 98733 - DNA, 966 bp, Agrobacterium tumefaciens
  CDS (1)..(966): transl_table=11
atgacgtccaaactcgaacaacttcgcgccatcaccacggtcgttgccgataccggcgacatcgaggcggtagcacgcctgaagccggtggattgcaccaccaacccgaccatcgttctcaaagcgctcggcacgccggcctttgccgatgcggtgaaggaagctgtcgcctggggcaggaagcagggcggccagtccgacgccgtcgttgccgccgttgccgaccgtctggcgatttccgtcggtgcagctcttgccggtctcgttcccggccgtgtgtcgaccgaggtcgatgccgacctgtccttcgacacgcaggcttccatcaccaaggcacgccacatcatcgcctcctataaggagcgcggcatcgagcgtgaacgcatcctcatcaagctggcctccacatgggaaggcatcaaggctgccgaagttctgcagtccgaaggcatcgactgcaacctgacgctgctgttctcgcaggcacaggcgattgcctgcgccgaagccaaggctttccttatctcgcccttcgtcggccgtatcctcgactggtacaagaaatcgaccggcgagacctacactgccgagacagatccgggcgtcgtttcggtgcgcagcatctacaattattacaaggcgaatggcatcggcaccgttgtcatgggcgcctccttccgcaatgttggcgaaatcgaagcgctggccggttgcgaccgcctgacgatcagcccggcgctgctcgaagagctggacaaggacaatggcaagctcgagcgcaagctttcgcctgacaatgtcaaggccgaggcgctgcagtcgctcgatgaaaaggcgttccgctgggcgatgaacgaagacgcgatggcaaccgagaagctttccgaaggcatccgcctgttcgccaaggatctggttacgctgcgcgagatggtccgcaaggagctgacggccgctgccgcctga

SEQ ID NO: 98734 - protein, 321 aa, Agrobacterium tumefaciens
MTSKLEQLRAITTVVADTGDIEAVARLKPVDCTTNPTIVLKALGTPAFADAVKEAVAWGRKQGGQSDAVVAAVADRLAISVGAALAGLVPGRVSTEVDADLSFDTQASITKARHIIASYKERGIERERILIKLASTWEGIKAAEVLQSEGIDCNLTLLFSQAQAIACAEAKAFLISPFVGRILDWYKKSTGETYTAETDPGVVSVRSIYNYYKANGIGTVVMGASFRNVGEIEALAGCDRLTISPALLEELDKDNGKLERKLSPDNVKAEALQSLDEKAFRWAMNEDAMATEKLSEGIRLFAKDLVTLREMVRKELTAAAA

SEQ ID NO: 98735 - DNA, 999 bp, Anabaena variabilis
  CDS (1)..(999): transl_table=11
atgactaaaaatctactagaacaattgcgagaaatgactgtagtagttgctgacacaggtgatattcaagcaattgaaaagtttacaccccgcgacgctaccaccaatccttctctgattacggcagccgctaaaatgccagaatatcaggaaattgttgatcaaaccttactccaagctaaaaaagacgcaggcgcaggagctagcaaaggccaaattgtctcccttgcttttgaccgtctggcggtatcctttggattgaaaattttacaaattatccctggtcgcgtttctacagaagtagatgcccgcttgtcctacgatactgaagctactatcaccaaagcacgagaattaatcgctcaatacaaagcggctggtattggcccagaacgtgttttgattaaaattgcctctacttgggaagggatcaaggctgcggaaattttggaaaaagaaggtattcactgtaacttaacattattgtttggtttgcatcaggcgatcgcctgtgccgaagccggtatcaccttaatttctcccttcgtcggccgcattctcgactggtacaagaaggaaaccggacgtgatagctacccctctgcggaagaccctggtgtaatttctgttaccacgatttacaactactataagaagttcggctacaccaccgaagttatgggagctagtttccgtaatattggtgaaattactgagcttgcaggtagcgacttgctgacaatctcccctggtttgttgggtgaactacaagccacaattggtgagctaccccgcaaactcgacccagcaaaagcagcaactttggatatagaaaagatttccatcgataaagctacctttgacaagatgcacgctgctgaccgcatggcctatgacaaactagacgaaggtatcaaaggttttaccaaagctctagaagagttagaaacactactagcagaaagactagctcgtctagaagtagtagcaagtcactag

SEQ ID NO: 98736 - protein, 332 aa, Anabaena variabilis
MTKNLLEQLREMTVVVADTGDIQAIEKFTPRDATTNPSLITAAAKMPEYQEIVDQTLLQAKKDAGAGASKGQIVSLAFDRLAVSFGLKILQIIPGRVSTEVDARLSYDTEATITKARELIAQYKAAGIGPERVLIKIASTWEGIKAAEILEKEGIHCNLTLLFGLHQAIACAEAGITLISPFVGRILDWYKKETGRDSYPSAEDPGVISVTTIYNYYKKFGYTTEVMGASFRNIGEITELAGSDLLTISPGLLGELQATIGELPRKLDPAKAATLDIEKISIDKATFDKMHAADRMAYDKLDEGIKGFTKALEELETLLAERLARLEVVASH

SEQ ID NO: 98737 - DNA, 984 bp, Chlamydophila caviae
  CDS (1)..(984): transl_table=11
atgtctagccaattcgagcagctaaaactcttgagtgttcttgtttgcgatactggtgatccagagttagttaaaacttcaggatctcaagatgcaacgacgaatccatctctcattctcaaagttgcgcaagagccgaaatatcaagaattgctaacggaagcaattgcttggggcattcgacaaaatggcgatgatattcaaactctgacttttgttttagacaagatacaggtaaattttggtttagagattctaaaatgtattcctggtagagtttctttagagatagacgctcgtctttcgtttaatacagaagcgatgattcaaagggctatttttctaagtgaattatttgctgctactggtggcgataagaaacgtcttttagttaaaatccctggtacttgggaaggcattcgagctgtagaagttttagaaaagcaaggtattgcttgtaatgtcactctcatttttaatttgattcaggctattgctgctgcgaaagcaaacgcaacgttaatttcaccgtttgttggtcgtatttatgattggtggatagcagcttatggagatgaaggttactctatagatgctgatcctggtgtagcgtctgtatcgaatatctatacttattataagaagtttgatatccctacacaaatcatggctgcttctttccgttctaaggagcaggtattagccttagcaggatgtgatttgctaacagtttctccaaagttgttagatgaattgaaaaaggatcaatcaccggttgcgaaaaaattagacgtggctgctgctaagaaacttgatgtacaacctgttgaattgacagaaagtgtatttcgtttcttaatgaatgaagatgccatggctacagagaaacttgctgagggtattcgtatattttctggcgatactcaaattcttgaagcagcggttacagaatttattaagcaaatagccgcccaagatgcgtaa

SEQ ID NO: 98738 - protein, 327 aa, Chlamydophila caviae
MSSQFEQLKLLSVLVCDTGDPELVKTSGSQDATTNPSLILKVAQEPKYQELLTEAIAWGIRQNGDDIQTLTFVLDKIQVNFGLEILKCIPGRVSLEIDARLSFNTEAMIQRAIFLSELFAATGGDKKRLLVKIPGTWEGIRAVEVLEKQGIACNVTLIFNLIQAIAAAKANATLISPFVGRIYDWWIAAYGDEGYSIDADPGVASVSNIYTYYKKFDIPTQIMAASFRSKEQVLALAGCDLLTVSPKLLDELKKDQSPVAKKLDVAAAKKLDVQPVELTESVFRFLMNEDAMATEKLAEGIRIFSGDTQILEAAVTEFIKQIAAQDA

SEQ ID NO: 98739 - DNA, 963 bp, Colwellia psychrerythraea
  CDS (1)..(963): transl_table=11
atgacaaattcttcttcacagcttgcacaattaaaacaaatgaccactgttgtggctgacacaggtgatattgaggctattgcaaaatttcaacctcaagatgcgacaacaaacccatcgcttttattaaaagcagcttctttacctaattatcaagggttagttaaagactctgttgcatgggctaaaacacaatctgacaatgcagaacagcaagttatagatgctgcagataaaatttcagtattaattggcctggaaattctaaaaattgtccctggtcgtatttctactgaagtggatgctcgattatcttttgatacctctgcatctattactaaagcccacaaactgattgctatgtataacgaagcaggcattagtaacgatagaattttaattaaacttgcctctacttgggaaggaattaaagcagcagaacaacttgagcaagaaggtattaactgtaacctaactttgttatttagctttgcacaagcacgcgcatgtgctgaagcaggcgcttatttaatatctccatttgttggtcgtattttagattggtataaaaaagataccggtagaaatgactatgcaagtaatgaagaccctggtgttgtttctgttaccagtatttttaattattacaagctacaaggttttaacaccgtagtaatgggtgccagctttagaaatatcggcgagattcttgaattagccggctgtgatcgtttaacaatcagcccacagttaatggaagaactagcaaacagcacagacacggtaatccaaaagttaacggcttgtgaagctacggcagaaaaagaagccgctttaagccaagcagagttccgctggcagatgaatgaagacccaatggcaacagagaaacttgctgaaggtattcgtaacttcaccattgatcaggtcaagcttgaaaagcaattaacagatttactctaa

SEQ ID NO: 98740 - protein, 320 aa, Colwellia psychrerythraea
MTNSSSQLAQLKQMTTVVADTGDIEAIAKFQPQDATTNPSLLLKAASLPNYQGLVKDSVAWAKTQSDNAEQQVIDAADKISVLIGLEILKIVPGRISTEVDARLSFDTSASITKAHKLIAMYNEAGISNDRILIKLASTWEGIKAAEQLEQEGINCNLTLLFSFAQARACAEAGAYLISPFVGRILDWYKKDTGRNDYASNEDPGVVSVTSIFNYYKLQGFNTVVMGASFRNIGEILELAGCDRLTISPQLMEELANSTDTVIQKLTACEATAEKEAALSQAEFRWQMNEDPMATEKLAEGIRNFTIDQVKLEKQLTDLL

SEQ ID NO: 98741 - DNA, 1170 bp, Gloeobacter violaceus
  CDS (1)..(1170): transl_table=11
atgaccggaagcctacttgaccaactgcggcagatgaccatcgtcgtcgccgacaccggcgacatccaggccattgagcagttcacaccgcgcgacgccaccaccaatccttcgctgatcaccgccgccgcccagatgccgcagtatcagcaaatcgtagacgacaccctcaagcaggcgcgcgcggagctgggtcccgaggcgaaggccgcggcggtcgccaccctcgccttcgaccggctggcggtggcctttggcctcaagatcctggccatcgtccccgggcgggtctcgaccgaagtcgacgcgcgcctgtcctacgacaccgaggcgacgatcgaaaaggggcgctcactgatcgcccagtacgaagcggcgggcatttcccgcgagcgggtgctcatcaagatcgcttcgacctgggagggtatccgcgccgccgaaattcttgaggacgaaggcatccactgcaacctgacgttgctgttcggtgtgcaccaggcgatcgcctgcgccgaggcgggggtgaccctcatctcacctttcgtcggtcgcatcctcgactggtacaaaaaagaaaccggccgcgattacgagccccacgaagatccgggcgtggtctcggtgacgaccatttacaactactacaaaaagttcggctaccaaacccaggtgatgggggcgagcttccgcaacatcggcgaaatcgtcgaactggccggctgcgatttgctcacgatctctccaaagcttctcgaacaactgcaggcgaccgacgcagaactcgtccgcaagctggatccggaccaagccgctggcctggagatcgaaaagatcgacatggaccaggcgaccttcgagaagaggcacgccgaagaccgcatggcttctgagaagctcgacgagggcatcaagggcttcaccaacgccctggtggccctggagaagctgctcgccgaccgtctggcgcggctggagggtgaagtggccctcaaccaggccttcgaaagcatcttccgcacttttgatctcgacggcgacgggtttatcacccgcgaggagtggatgggcaccgacgcggtttttgatgccatcgacctcaaccatgacggcaagatcacagcggaggaattgggggccgggatcggggccgtctcgaaactggcgtag

SEQ ID NO: 98742 - protein, 389 aa, Gloeobacter violaceus
MTGSLLDQLRQMTIVVADTGDIQAIEQFTPRDATTNPSLITAAAQMPQYQQIVDDTLKQARAELGPEAKAAAVATLAFDRLAVAFGLKILAIVPGRVSTEVDARLSYDTEATIEKGRSLIAQYEAAGISRERVLIKIASTWEGIRAAEILEDEGIHCNLTLLFGVHQAIACAEAGVTLISPFVGRILDWYKKETGRDYEPHEDPGVVSVTTIYNYYKKFGYQTQVMGASFRNIGEIVELAGCDLLTISPKLLEQLQATDAELVRKLDPDQAAGLEIEKIDMDQATFEKRHAEDRMASEKLDEGIKGFTNALVALEKLLADRLARLEGEVALNQAFESIFRTFDLDGDGFITREEWMGTDAVFDAIDLNHDGKITAEELGAGIGAVSKLA

SEQ ID NO: 98743 - DNA, 948 bp, Haemophilus ducreyi
  CDS (1)..(948): transl_table=11
atgaatcaattagatgctttacgcgaaatgactgtggttgttgctgataccggtgatatagaagccattagacaatatcagcctcaagatgctaccactaatccctcgttaattttaagtgcttctgcattatcacaatatgcgcctttaattgatgatgcaattcgttatgcaaaatcaaaaagtggcaataaggctcaacagttagttgatgctgaagataagcttgcagttaatattggtttggagattttgaaaattgttcccggacgaatttcaactgaggtagatgctagattttcttacgatactgaaaaaacgattgctaaggcacgtaagctgattggcttatataatgaagcaggtgttgctaataatcgtattttgatcaaaatagcggctacttggcaaggtatccgtgctgctgaaatattagaaaaagagggaattaattgtaatttaacattattattctctcaagcacaagccagggcctgtgctgaagcgggcgtttacttgatttcaccatttgttggacgtatcttagactggtataaagcaaatgagaaaaaggaatatgccgcggcagaagatccgggcgttatttcggtcaccgctatttataactactataagcagtacaattataagactattgttatgggggcaagcttccgaaatgtaggtgaaattactgaaattgcaggctgtgatcgtttaactattgcgccgccattattaaaagcattagcggaaagcaatgaaacattggtgcgtaagttagattatcaaggtgagattttagatcgccctgcgcctttaagcgaagctgagttttattggcaacataaccaagatcctatggccgtggacaaattagccgaaggtatccgtaaatttgcgattgaccaagaaaaattagaagagatgctttcagcaaaactgtaa

SEQ ID NO: 98744 - protein, 315 aa, Haemophilus ducreyi
MNQLDALREMTVVVADTGDIEAIRQYQPQDATTNPSLILSASALSQYAPLIDDAIRYAKSKSGNKAQQLVDAEDKLAVNIGLEILKIVPGRISTEVDARFSYDTEKTIAKARKLIGLYNEAGVANNRILIKIAATWQGIRAAEILEKEGINCNLTLLFSQAQARACAEAGVYLISPFVGRILDWYKANEKKEYAAAEDPGVISVTAIYNYYKQYNYKTIVMGASFRNVGEITEIAGCDRLTIAPPLLKALAESNETLVRKLDYQGEILDRPAPLSEAEFYWQHNQDPMAVDKLAEGIRKFAIDQEKLEEMLSAKL

SEQ ID NO: 98745 - DNA, 954 bp, Mannheimia succiniciproducens
  CDS (1)..(954): transl_table=11
atgactacacaacttgatgcattacgcaatatgactgtggtggttgccgatacgggtgatatcgaagcaatcaaaaaatatcaaccgcaagacgcaacaacaaacccgtctcttattcttagtgcttcagcattaccccaatatgcctcgttaattgatgacgcgattaattatgcgaaagcaaaaagtaccgacaaagcgcaacaactcattgatgcggaagataaattagcggttaatatcggtctggaaattttaaaaatcgtgccgggacgtatttctaccgaagtagatgcacgtctttcctatgacacggcggcaaccgttgaaaaagcccgtaagttaatcaaactttataatgaagccggtattaataatgatcgcattttgatcaaagtcgcttctacatggcaaggtatccgtgcggcggaaattttagaaaaagaaggtattaattgtaacttgacccttttattctctcaagctcaagcacgcgcctgtgccgaagccggcgtttatctgatttcaccttttgtgggccgtattcttgactggtacaaagcaaatacggataaaaaagaatatgttccaaacgaagacccgggcgttatttccgtaacaagtatttataactattacaaacaatacgggtatcaaaccgttgtaatgggtgcgagtttccgcaatatcggcgaaattaccgagttagcgggttgcgatcgcttaaccattgcacctgctttattaaaagaattacaagaaagcaatgcagacttaccgcgtaaactcgattataaaggtgaggtcaaaccaaaaccggcaccattaacagaaagtcaattctactgggaacataacaacgatccgatggcggttgataaattagccgaaggtatccgtaaatttgctgcggatattgaaaaactggaagcaatgcttagtacaaaactttaa

SEQ ID NO: 98746 - protein, 317 aa, Mannheimia succiniciproducens
MTTQLDALRNMTVVVADTGDIEAIKKYQPQDATTNPSLILSASALPQYASLIDDAINYAKAKSTDKAQQLIDAEDKLAVNIGLEILKIVPGRISTEVDARLSYDTAATVEKARKLIKLYNEAGINNDRILIKVASTWQGIRAAEILEKEGINCNLTLLFSQAQARACAEAGVYLISPFVGRILDWYKANTDKKEYVPNEDPGVISVTSIYNYYKQYGYQTVVMGASFRNIGEITELAGCDRLTIAPALLKELQESNADLPRKLDYKGEVKPKPAPLTESQFYWEHNNDPMAVDKLAEGIRKFAADIEKLEAMLSTKL

SEQ ID NO: 98747 - DNA, 951 bp, Methylomonas aminofaciens
  CDS (1)..(951): transl_table=11
atggctaatttattcgatcaacttaaggaattcaccacgatcgtggctgacactggtgacgtggaagcgatcaagagcgttaagccctacgatgcaactaccaacccatccctgttgctgaaggcaagcacactgccacaatacgctccgctgatcgacgaagcgattgcttatgccaagtcccaaagcggtgacaaggcacaacaaatcgaggatgctgctgacaagctggctgtgctgattggtcaagagattctcaagcacatcccaggcaagatttccactgaagtggatgcgcgtctgtcctttgataccgatgctatggtgcaaaagggtcgcaagctgatcaagctgtacgctgatgctggcatttccaaggaccgcgtgctgatcaagctggcttccacatgggaaggtatcaaggctggtgaaatccttgaaaaggaaggcatcaactgcaacctgacactcttgtttagcttcgctcaagcacgtgcatgtgctgaggctggtgtattcctgatctccccattcgttggtcgtatcctcgattggtacaaagccaagactggtgaaaactacacttctgaaactgatccaggcgtgttgtctgttcgcaagatctacgcttactacaaggagcacggttacaagaccgtcgtgatgggcgcttccttccgtaacactggtgaaattactgcacttgctggttgtgaccgtctgacagtttctcctaacctgctggaaagagctgaaggctaccgaaggtacctgccacgcgtactggtggacaatggtgcaaccaagcaacgtcctgctctgttgacagagaaggaattccgttttgatcagaacgaagatgcgatggcaacagaaaagttggctgaaggcatacgtggtttcgtggttgaccagaacaagctggaaaaggcattggctgaaaagctgtaa

SEQ ID NO: 98748 - protein, 316 aa, Methylomonas aminofaciens
MANLFDQLKEFTTIVADTGDVEAIKSVKPYDATTNPSLLLKASTLPQYAPLIDEAIAYAKSQSGDKAQQIEDAADKLAVLIGQEILKHIPGKISTEVDARLSFDTDAMVQKGRKLIKLYADAGISKDRVLIKLASTWEGIKAGEILEKEGINCNLTLLFSFAQARACAEAGVFLISPFVGRILDWYKAKTGENYTSETDPGVLSVRKIYAYYKEHGYKTVVMGASFRNTGEITALAGCDRLTVSPNLLERAEGYRRYLPRVLVDNGATKQRPALLTEKEFRFDQNEDAMATEKLAEGIRGFVVDQNKLEKALAEKL

SEQ ID NO: 98749 - DNA, 951 bp, Photobacterium profundum
  CDS (1)..(951): transl_table=11
atgagcactaaactggaacaattgcgcgcactaaccactgttgttgctgacactggcgatatcgaagcaatcagtaaatatcagcctgaagatgctacgacaaacccatcgttgattcttaaagcagctcagattgctgaatatgctcctcttatcgacgcttctattgcgtacgctaaagcacaaagcaatgacaaaacccagcaagttgcagacacctgcgacatgcttgccgttaacatcggtaaagaaatcctgaaagttgtacctggtcgtatttcaacagaagttgatgcgcgcctttcttacgatacagaaggcagcgtaattaaagcacgtcagcttattaaaatgtataacgatgctggcatcactaacgaccgtatccttattaagttagcgtctacttgggaaggcattcgcgccgctgaagtcctagagaaagaaggcattaactgtaacctaacactgctattctcattcgcacaagcacgtgcttgtgctgaagcgggtgtattcttaatttctcctttcgttggtcgcatcatggactggtataaagcgaaagaaggtcgtgactttgaatcatctgaagatccaggcgtggtttcggtaacgggtatttacgactactacaaaacgtatggctacaacacagttgttatgggtgctagcttccgtaacatcggcgaaatccttgagcttgcgggttgtgatcgtctaactatcagccctaacctacttcaagaacttgaagatgcaacgggtgaagtggttgagaaactgattgacacgaatggcactaaagaacgcccagcagcaatgacgcacgctgaattcctatgggaacataaccaagacccaatggctgttgaaaaactggctgacggtatccgtaactttgcggttgaccaaggtaagcttgaagtcatgatcgcagagcgtctataa

SEQ ID NO: 98750 - protein, 316 aa, Photobacterium profundum
MSTKLEQLRALTTVVADTGDIEAISKYQPEDATTNPSLILKAAQIAEYAPLIDASIAYAKAQSNDKTQQVADTCDMLAVNIGKEILKVVPGRISTEVDARLSYDTEGSVIKARQLIKMYNDAGITNDRILIKLASTWEGIRAAEVLEKEGINCNLTLLFSFAQARACAEAGVFLISPFVGRIMDWYKAKEGRDFESSEDPGVVSVTGIYDYYKTYGYNTVVMGASFRNIGEILELAGCDRLTISPNLLQELEDATGEVVEKLIDTNGTKERPAAMTHAEFLWEHNQDPMAVEKLADGIRNFAVDQGKLEVMIAERL

SEQ ID NO: 98751 - DNA, 1008 bp, Prochlorococcus marinus
  CDS (1)..(1008): transl_table=11
atgaccagtcttcttgatcaactttcttcaatgactgttgttgttgcagatacgggtgacttggaagcgattcgaacatttaaaccacaagatgcaactactaatccttcgctaattcttgcggcagctcagatacctgcatatcaaaatttaattgataaatctcttcaggcttcaaggcaaagagttggatcatttgcatcagcaaaagaagtagttgatgaagcattagatgaggtatgtgtaacctttggaaaagaaattcttaaaattattcctgggagagtatctactgaagttgatgcaagattgagttttaatacgcaggcaactattaataaagcaagaaagatcattgatctttacaaaaaagttgatatttctaaagaaagagtgttgattaaggttgcatcaacttgggaagggattaaggctgctgaagttcttgaaagtgagggtattcattgtaatttaacgttgttatttggcttttctcaggcagttgcatgtgcagaggcaggtgtgacacttatttcaccttttgtaggtcgtatacttgattggtataaagcagaaacagggaaggactcttatgctggagaagaagatccaggtgtagtttctgtaactaagatctttaattattataagtcaaataattataagactgaagtaatgggagcaagttttagaaatatagatgaaatcttagaattagcaggctgtgatttgcttacgattgcaccaaaatttttagaacaattggaaaactctgattcaaaattaacaagaaaattagactcattaaagccattgccttcagaaactaaaatccatcttgaagaatacgattttagaaatatgcttaagttagatcgtatggcaacagaaaagcttgaagaaggaattattaatttcagcaaggcaattgaacaattggagcagcttttgagtaaaaggctttcttatattgagagcggttcaaatgctgagctttctatcgcttag

SEQ ID NO: 98752 - protein, 335 aa, Prochlorococcus marinus
MTSLLDQLSSMTVVVADTGDLEAIRTFKPQDATTNPSLILAAAQIPAYQNLIDKSLQASRQRVGSFASAKEVVDEALDEVCVTFGKEILKIIPGRVSTEVDARLSFNTQATINKARKIIDLYKKVDISKERVLIKVASTWEGIKAAEVLESEGIHCNLTLLFGFSQAVACAEAGVTLISPFVGRILDWYKAETGKDSYAGEEDPGVVSVTKIFNYYKSNNYKTEVMGASFRNIDEILELAGCDLLTIAPKFLEQLENSDSKLTRKLDSLKPLPSETKIHLEEYDFRNMLKLDRMATEKLEEGIINFSKAIEQLEQLLSKRLSYIESGSNAELSIA

SEQ ID NO: 98753 - DNA, 927 bp, Pseudomonas putida
  CDS (1)..(927): transl_table=11
atgacctccaagctggaacaactcaagcagttcaccaccgtggtcgccgacaccggggacctggacgccatcacccgcctgaagccggtcgatgccaccaccaacccgtcgctgctgctcaaggctgctgccatcccgggctacgccgacctgcttaaacaggtgaaggccgacgccaagggtaatgtcgacctggcctgcgacaagtttgcagtggcggtaggctcgggcattctcaaggtcatcccggggcgtatctccaccgaggtggatgcacgcctgtcgttcgatgagccagccctgctgaacaaggctcgtcagctgatcgccctgtacgaggcggccggagtggcaaaagagcgtgtactgatcaagctggcctccacctgggaaggcattcgcgccgccgagcagctggagaaggaaggtatccagaccaacctgaccctgctgttctccttcgcccaggcccaggcttgtgccgatgccggggtgtttttgatttcgccgttcgtgggccgtatctacgactggtacaagaagagcaccggccaggaatacgtgggcgccgaggacccaggcgtgcagtcggtcacccgcatctacaactactacaaggccaatggttacaacaccgtggtcatgggcgccagcttccgcaatatcggccagatcgaacaactggccggctgtgaccgcctgaccatcagccccgaactgctgcagcagttgagtgatgaccagggtgaattgccgcaggtgctgaaaccgggcaacgccggtgaagccaagcagcacctgaacgaaagccagttccgctgggcgatgaacgaagacgccatgggcaccgagaaactggccgaaggtatccgtcagtttgcacgggaccaggaaaagcttgagaagttgatagctgaaaaggcctga

SEQ ID NO: 98754 - protein, 308 aa, Pseudomonas putida
MTSKLEQLKQFTTVVADTGDLDAITRLKPVDATTNPSLLLKAAAIPGYADLLKQVKADAKGNVDLACDKFAVAVGSGILKVIPGRISTEVDARLSFDEPALLNKARQLIALYEAAGVAKERVLIKLASTWEGIRAAEQLEKEGIQTNLTLLFSFAQAQACADAGVFLISPFVGRIYDWYKKSTGQEYVGAEDPGVQSVTRIYNYYKANGYNTVVMGASFRNIGQIEQLAGCDRLTISPELLQQLSDDQGELPQVLKPGNAGEAKQHLNESQFRWAMNEDAMGTEKLAEGIRQFARDQEKLEKLIAEKA

SEQ ID NO: 98755 - DNA, 984 bp, Rhodospirillum rubrum
  CDS (1)..(984): transl_table=11
atgtccgaaaccaagctcgacgccctccggcgccacaccatcatcgtcgctgacagtggcgatatcgacgcgatccgctcgtttgccccccaggactgcacgaccaaccccagcctgatcctcaaggcggcgaagatgcccgcctatgccgggctgatcgcccaggcgatcgaggcgggcagcgccgaggccgggccgtccgaggggcttatcgaccgcatccttgaccacctcgccgtgaccttcggcagcgaactggcccgcatcgtcccgggcgtggtgtcgaccgaggtcgacgcccggctgtctttcgacacccaggccaccgtcgcccgggccgagcggctgatcggcctttacgccgcccgtggcgtggcggccgagcgcatcttgatcaaggtcgcggcgacctgggaaggcattcgcgccgtcgagatcctgcaaagccgcggcatcgcctgcaacgtcaccctggtcttctcgctggcccaggcggtggcggcggccgaggccggggcgttcctaatttcgcccttcgtcggccgcatcctcgattggcacgtgaaggccagcggcaagagctttgacatcgacgaggatccgggcgtgcgctcggtgaccgagatctacacgtatttcaagcacttcggctacaagaccatcgtcatgggcgcttccttccgctcgagcgccgaggtcgaggcgctgtgcggctgcgaccgcttgaccgtcagcccggccctgctcgaccagttgcgcagccaaaccggcgatgtgcccaagcgcctggacccggccgccagcaaggcggcgaccatctcccgcttggccgtcgacgaggcctccttccgctggcagatcaacgaggacgccctggcaaccgagaaactggccgagggcatccgcctgttcaacgccgataccgacgccctgcgccgcaccatcgccgaaaccctggccaagcgcgcctccaccgtcgcctga

SEQ ID NO: 98756 - protein, 327 aa, Rhodospirillum rubrum
MSETKLDALRRHTIIVADSGDIDAIRSFAPQDCTTNPSLILKAAKMPAYAGLIAQAIEAGSAEAGPSEGLIDRILDHLAVTFGSELARIVPGVVSTEVDARLSFDTQATVARAERLIGLYAARGVAAERILIKVAATWEGIRAVEILQSRGIACNVTLVFSLAQAVAAAEAGAFLISPFVGRILDWHVKASGKSFDIDEDPGVRSVTEIYTYFKHFGYKTIVMGASFRSSAEVEALCGCDRLTVSPALLDQLRSQTGDVPKRLDPAASKAATISRLAVDEASFRWQINEDALATEKLAEGIRLFNADTDALRRTIAETLAKRASTVA

SEQ ID NO: 98757 - DNA, 951 bp, Vibrio cholerae
  CDS (1)..(951): transl_table=11
atgagcaataaattagcgcaacttcgtaaactgaccacagtcgtggccgacactggtgaaattgatgcaatcaaaaaataccagccagaagacgcaaccactaacccttctctgattcttaaagctgcgcagattgctgaatacgcacctctgattgatcaagctatcgcctacgcaaaaactcaaagcaacgacaaagcacaacaagtacaagacacttgtgacatgctggcggtcaacatcggtaaagaaatcctaaaaaccattcctggccgtatttcgactgaagttgacgcgcgtctttcttacgacaccgagcgcagcgttgcgaaagcacgtcagctagtaaaaatgtacaacgatgcgggcatcagcaacgatcgtatcctgatcaaactggcttctacttgggaaggtatccgcgcggcggaaattcttgagaaagaaggcatcaactgtaacctgactctgctgttctctttcgcacaagcgcgtgcgtgtgctgaagcaggcgtgttcctgatctctccattcgttggccgtatcatggactggtacaaagctaaagaaggtcgtgatttcgcggcaagcgaagatccaggcgtactgtcagtcaccaagatctacaactactacaaagagcacggctacaaaacggttgtgatgggcgcaagcttccgtaacatcggcgagatcctagaactggctggctgtgaccgcctgactatcgcaccttcgctactggctgagcttgaagcggctgaaggcgaattggttgcaaaactggttgactcaaaaggctctaaagctcgccctgccccaatgacgcacagcgaattcctgtgggaacacaacctagacgctatggccgttgagaagctggcagaaggcatccgtaacttcgcggttgaccaaggcaaactggaagcgatgatcgcggctaagctgtaa

SEQ ID NO: 98758 - protein, 316 aa, Vibrio cholerae
MSNKLAQLRKLTTVVADTGEIDAIKKYQPEDATTNPSLILKAAQIAEYAPLIDQAIAYAKTQSNDKAQQVQDTCDMLAVNIGKEILKTIPGRISTEVDARLSYDTERSVAKARQLVKMYNDAGISNDRILIKLASTWEGIRAAEILEKEGINCNLTLLFSFAQARACAEAGVFLISPFVGRIMDWYKAKEGRDFAASEDPGVLSVTKIYNYYKEHGYKTVVMGASFRNIGEILELAGCDRLTIAPSLLAELEAAEGELVAKLVDSKGSKARPAPMTHSEFLWEHNLDAMAVEKLAEGIRNFAVDQGKLEAMIAAKL

SEQ ID NO: 98759 - DNA, 951 bp, Vibrio parahaemolyticus
  CDS (1)..(951): transl_table=11
atgagcaacaagttagagcaacttcgtaaactaacgactgtagtagcagacactggtgaaattgatgcaatcaaaaagtaccagccagaagacgcaacaactaacccttctcttatcctaaaagcagctcaaatcgcagagtacgcacctctaatcgatgcttcaatcgaatacgctaaagcacagagcaacgataaagctcaacaagttcaagacacttgtgacatgcttgcagtaaacatcggtaaagaaatcctaaaaactatcccaggtcgtatctctacagaagttgatgctcgcctatcttacgatatggaaggcagcgtagcgaaagcacgccaactagtgaaaatgtacaacgatgctggcatcactaacgaccgcatccttatcaaactggcgtctacttgggaaggtatccgcgcagctgaaatcctagagaaagaaggcatcaactgtaacctgactcttctattctcattcgctcaagcgcgtgcttgtgcagaagcgggcgtattcctaatctctccattcgttggccgtattatggactggtacaaagcgaaagaaggccgcgactttgaagcatcagaagatccaggcgtactgtctgtaactaagatctacaactactacaaagagtacggctacaaaacggtagtaatgggcgcaagcttccgtaacatcggtgagatcctagaacttgctggttgtgaccgtctaactatcgctcctgctctacttgcagaactagaagctgcagaaggtgaagtggttgagaagctagttgattctaaaggcgcagctgagcgtccagcaccaatgactcacgctgagttcctatgggaacacaaccaagacccaatggctgttgagaaactggcagaaggcatccgcaacttcgcagttgaccaaggcaaactagaagcgatgatcgaagctaagctttaa

SEQ ID NO: 98760 - protein, 316 aa, Vibrio parahaemolyticus
MSNKLEQLRKLTTVVADTGEIDAIKKYQPEDATTNPSLILKAAQIAEYAPLIDASIEYAKAQSNDKAQQVQDTCDMLAVNIGKEILKTIPGRISTEVDARLSYDMEGSVAKARQLVKMYNDAGITNDRILIKLASTWEGIRAAEILEKEGINCNLTLLFSFAQARACAEAGVFLISPFVGRIMDWYKAKEGRDFEASEDPGVLSVTKIYNYYKEYGYKTVVMGASFRNIGEILELAGCDRLTIAPALLAELEAAEGEVVEKLVDSKGAAERPAPMTHAEFLWEHNQDPMAVEKLAEGIRNFAVDQGKLEAMIEAKL

SEQ ID NO: 98761 - DNA, 954 bp, Yersinia pestis
  CDS (1)..(954): transl_table=11
atgaccgataaacttacttccctacgtcaaatcaccactgtagtcgccgatactggggatattgcggcgatgaaattgtatcagccgcaagatgcaacgactaacccatcgattattctgaatgctgcccaaatccctgaataccgtaaattgatcgatgaagctattgcctgggcgcgcgaacaaagcagcgatcatgctcagcagatcgttgatgcgacggataaactggcagtgaatattggtttggaaattctgaaactgatccctggtcgtatttctaccgaagttgatgctcgcttgtcctatgataccgtcgccagcgtggcaaaagccaaacgtctgatcaaactgtataacgaagccggtatcagcaatgatcgtattctgatcaaattggcttcaacctggcagggcatccgcgctgcggagcaactggaaaaagaaggtatcaactgtaacctgacactgttgttctccttcgctcaggcacgtgcttgtgctgaagcgggtgtgttccttatttctccttttgttggtcgtattcttgattggtacaaagccaatggcgatcaaaaagagttcgcaccaagcgaagatccaggtgttgtttccgtcaccgagatttaccagtactacaaaaaacacggttataagaccgtggtgatgggtgcaagcttccgtaatttgggtgaaatcattgagttagccggttgtgaccgtttgactatcgccccttcactgctgaaagagttagcagagagcgaaggcccggtagaacgtaaactggcttacaccggtgaaattcaggcgaagcctgctccattgactgaagcggaattctactggcagcataatcaggatccaatggcggttgataaactggcagacggcatccgcaagtttgctatcgaccaaggcaaacttgagaaaatgatctccgacttgttgtaa

SEQ ID NO: 98762 - protein, 317 aa, Yersinia pestis
MTDKLTSLRQITTVVADTGDIAAMKLYQPQDATTNPSIILNAAQIPEYRKLIDEAIAWAREQSSDHAQQIVDATDKLAVNIGLEILKLIPGRISTEVDARLSYDTVASVAKAKRLIKLYNEAGISNDRILIKLASTWQGIRAAEQLEKEGINCNLTLLFSFAQARACAEAGVFLISPFVGRILDWYKANGDQKEFAPSEDPGVVSVTEIYQYYKKHGYKTVVMGASFRNLGEIIELAGCDRLTIAPSLLKELAESEGPVERKLAYTGEIQAKPAPLTEAEFYWQHNQDPMAVDKLADGIRKFAIDQGKLEKMISDLL

SEQ ID NO: 98763 - DNA, 954 bp, Yersinia pseudotuberculosis
  CDS (1)..(954): transl_table=11
atgaccgataaacttacttccctacgtcaaatcaccactgtagtcgccgatactggggatattgcggcgatgaaattgtatcagccgcaagatgcaacgactaacccatcgattattctgaatgctgcccaaatccctgaataccgtaaattgatcgatgaagctattgcctgggcgcgcgaacaaagcagcgatcatgctcagcagatcattgatgcgacggataaactggcagtgaatattggtttggaaattctgaaactgatcccaggccgtatttctaccgaagttgatgctcgcttgtcctatgacaccgtcgccagcgtgacaaaagccaaacgtctgatcaagctgtataacgaagccggtatcagcaatgatcgtattctgatcaaattggcctcaacctggcagggcatccgcgctgcggagcaactggaaaaagaaggtatcaactgtaacctgacactgttgttctccttcgcccaggcacgtgcttgtgctgaagcgggtgtgttccttatttctccttttgttggtcgtattcttgattggtacaaagccaatggcgatcaaaaagagttcgcaccaagcgaagatccaggtgttgtttccgtcactgagatttaccagtactacaaaaaacacggttataagaccgtggtgatgggtgcaagcttccgtaatttgggtgaaatcattgagttagccggttgtgaccgtttgactatcgccccttcactgctgaaagagttagcagagagcgaaggcccggtagaacgtaaattggcttacaccggtgaaattcaggcgaagcctgctccattgactgaagcagaattctactggcagcataatcaggatccaatggcggttgataaactggcagacggcatccgcaagtttgctatcgaccaaggcaaacttgagaaaatgatctccgacttgttgtaa

SEQ ID NO: 98764 - protein, 317 aa, Yersinia pseudotuberculosis
MTDKLTSLRQITTVVADTGDIAAMKLYQPQDATTNPSIILNAAQIPEYRKLIDEAIAWAREQSSDHAQQIIDATDKLAVNIGLEILKLIPGRISTEVDARLSYDTVASVTKAKRLIKLYNEAGISNDRILIKLASTWQGIRAAEQLEKEGINCNLTLLFSFAQARACAEAGVFLISPFVGRILDWYKANGDQKEFAPSEDPGVVSVTEIYQYYKKHGYKTVVMGASFRNLGEIIELAGCDRLTIAPSLLKELAESEGPVERKLAYTGEIQAKPAPLTEAEFYWQHNQDPMAVDKLADGIRKFAIDQGKLEKMISDLL

SEQ ID NO: 98765 - DNA, 1233 bp, Brassica napus
  CDS (1)..(1233)
atgacacactctctgcaatctccgccttctgcagcagctctctctgcttcgatccaaaagggacgatggaagacggtcgccgccggattctccgttgctcctcctcctcccgccgttaacttcactctccggcgatcgattccacggattcacgcttccgctagctcctcctcctcctcctcctctccatcttctccatctctcggagctggtgagaacagtgagctagatgctgtatcagcttttagtgagattgttcctgatactgtcgttttcgatgactttgagaggttcccaccaactgcagctactgttagctctgctctcctccttggcatctgcggtctccccgacacaatcttccggaatgctgtggacatggctttggcggactctacctgtgcgggccttgataccactgactccaaactctcttgctttttcgataaggctattgtgaatgtaggtggagatcttgtcaaactcgttccaggtcgtgtttcaactgaagtggatgcacgtcttgcttatgacaccaacgccattatccgcaaggttcatgatctgttaagactatacaatgagatcgacgtaccacacgaccggttgctgttcaaaatccctgcaacctggcaaggtatagaagctgcaaagctgctggaatccgagggaattcaaacgcacttgaccttcgtttacagcttggctcaaccaacagcagccgctcaagccggtgcctctgtcattcagattttcgtcggtcgcctcagggactgggcgcgcaatcattcaggagatgccgagattgaaactgcggttaaatccggggaagatccaggtttggccttggtcagaagatcatataactacattcacaagtatggttacaagtccaagctaatggctgctgcagtcagaaacaaacaagacttgttcagtcttctcggggttgattatgtgattgcgccattgaaggtgctgcagtctctcaaagactcaccagccgttcctgacgatgaaaaatactcgtttgttcggaaacttactcctgagaccgcgacacactacaacttcaccaacaaagagctgatcaaatgggatcagctgagcttggcttcagctatgggtcctgcatccgtggagcttttatcagctggtgtggaaggttacgcgaaccaggcgaaacgcgttgaagagctctttgggaagatttggccacctccaaacgtctaa

SEQ ID NO: 98766 - protein, 410 aa, Brassica napus
MTHSLQSPPSAAALSASIQKGRWKTVAAGFSVAPPPPAVNFTLRRSIPRIHASASSSSSSSSPSSPSLGAGENSELDAVSAFSEIVPDTVVFDDFERFPPTAATVSSALLLGICGLPDTIFRNAVDMALADSTCAGLDTTDSKLSCFFDKAIVNVGGDLVKLVPGRVSTEVDARLAYDTNAIIRKVHDLLRLYNEIDVPHDRLLFKIPATWQGIEAAKLLESEGIQTHLTFVYSLAQPTAAAQAGASVIQIFVGRLRDWARNHSGDAEIETAVKSGEDPGLALVRRSYNYIHKYGYKSKLMAAAVRNKQDLFSLLGVDYVIAPLKVLQSLKDSPAVPDDEKYSFVRKLTPETATHYNFTNKELIKWDQLSLASAMGPASVELLSAGVEGYANQAKRVEELFGKIWPPPNV

SEQ ID NO: 98767 - DNA, 1185 bp, Zea mays
  CDS (1)..(1185)
atggcgctctccatctacacgcccacctcctcctccctcgtcccgccctccattcaggaggtcaggctgacttcgcgaccgccaaagcccgcgactttcagcctacggaggccacatctggccgcgcgggccgccgctggcaacgcacccacgtccccggtccgcgaggtcgtcactgagctcgacgcggtcgccggcttcagcgagatcgtgccggacaccgtcgtgttcgatgatttcgagaggttcgcacccacggcggccacagtgagctcgtcgctgctgcttgggatcactgggctcccagacactaagttcaagagtgcgatagatactgcactggcagatggtgagtgcaacgcactggagaaggctgaggacaggatgtcctgttacctcaccaaggctcttgcaaatgttggcgctgaactggctcatcaagtccctgggagagtttcgacggaaatagatgctcggttagcttatgacacccagggcataatccacagggtacatgaactgttgaatctatacaaccaacatgatgtctcaactgaccgcctgttattcaaaattcctgctacatggcaaggcatagaggcctcaaggttgcttgaatctgaaggaattcaaacgcatctaacatttgtttacagtttcgcacaagcggcagcggcagcacaagctggtgcatctgtagtacaaatgtttgtgggccgattgcgggactgggcaaggcatcactctggtgacccagagatagatgaagctttgaagaatggagaagatgctgggctttctttggcgaagaaagtatatgcctatattcacaggaatgggtacaaaacaaagctgatggccgctgccatacggaacaagcaggacgtatttagccttctggggattgattacatcattgcaccactgaagatattgcagtctctggaagaatctgtcaccgatcccgatgtgaagtacggctatgtcccgaagttgactcctgctattggcaagacgtacaacttcactgaagaggagcttgtgaagtgggaccagctgagcctgtcagctgccatgggaccagctgcagaagaactgcttgcttcagggctagaggggtacgtgaaccaagcacgccgcgttgaggagctctttgggaagatctggccacctcccaatgtttaa

SEQ ID NO: 98768 - protein, 394 aa, Zea mays
MALSIYTPTSSSLVPPSIQEVRLTSRPPKPATFSLRRPHLAARAAAGNAPTSPVREVVTELDAVAGFSEIVPDTVVFDDFERFAPTAATVSSSLLLGITGLPDTKFKSAIDTALADGECNALEKAEDRMSCYLTKALANVGAELAHQVPGRVSTEIDARLAYDTQGIIHRVHELLNLYNQHDVSTDRLLFKIPATWQGIEASRLLESEGIQTHLTFVYSFAQAAAAAQAGASVVQMFVGRLRDWARHHSGDPEIDEALKNGEDAGLSLAKKVYAYIHRNGYKTKLMAAAIRNKQDVFSLLGIDYIIAPLKILQSLEESVTDPDVKYGYVPKLTPAIGKTYNFTEEELVKWDQLSLSAAMGPAAEELLASGLEGYVNQARRVEELFGKIWPPPNV

SEQ ID NO: 98769 - DNA, 22 bp, Artificial sequence
  primer
atgacggacaaattgacctccc

SEQ ID NO: 98770 - DNA, 25 bp, Artificial sequence
  primer
ttacagcagatcgccgatcattttt

SEQ ID NO: 98771 - protein, 336 aa, Artificial sequence
  consensus sequence
  Variant (2)..(7): Xaa in position 2 to 7 is any amino acid
  Variant (8)..(8): Xaa in position 8 is any or no amino acid
  Variant (10)..(11): Xaa in position 10 to 11 is any amino acid
  Variant (13)..(13): Xaa in position 13 is any amino acid
  Variant (18)..(25): Xaa in position 18 to 25 is any amino acid
  Variant (26)..(33): Xaa in position 26 to 33 is any or no amino acid
  Variant (35)..(35): Xaa in position 35 is any amino acid
  Variant (44)..(44): Xaa in position 44 is any amino acid
  Variant (46)..(46): Xaa in position 46 is any amino acid
  Variant (48)..(52): Xaa in position 48 to 52 is any amino acid
  Variant (54)..(71): Xaa in position 54 to 71 is any amino acid
  Variant (72)..(82): Xaa in position 72 to 82 is any or no amino acid
  Variant (84)..(86): Xaa in position 84 to 86 is any amino acid
  Variant (88)..(89): Xaa in position 88 to 89 is any amino acid
  Variant (91)..(92): Xaa in position 91 to 92 is any amino acid
  Variant (95)..(97): Xaa in position 95 to 97 is any amino acid
  Variant (101)..(101): Xaa in position 101 is any amino acid
  Variant (111)..(111): Xaa in position 111 is any amino acid
  Variant (113)..(118): Xaa in position 113 to 118 is any amino acid
  Variant (121)..(125): Xaa in position 121 to 125 is any amino acid
  Variant (128)..(130): Xaa in position 128 to 130 is any amino acid
  Variant (132)..(135): Xaa in position 132 to 135 is any amino acid
  Variant (137)..(137): Xaa in position 137 is any amino acid
  Variant (141)..(141): Xaa in position 141 is any amino acid
  Variant (143)..(143): Xaa in position 143 is any amino acid
  Variant (146)..(146): Xaa in position 146 is any amino acid
  Variant (149)..(149): Xaa in position 149 is any amino acid
  Variant (152)..(153): Xaa in position 152 to 153 is any amino acid
  Variant (156)..(157): Xaa in position 156 to 157 is any amino acid
  Variant (158)..(158): Xaa in position 158 is any or no amino acid
  Variant (161)..(161): Xaa in position 161 is any amino acid
  Variant (169)..(171): Xaa in position 169 to 171 is any amino acid
  Variant (174)..(174): Xaa in position 174 is any amino acid
  Variant (178)..(178): Xaa in position 178 is any amino acid
  Variant (180)..(182): Xaa in position 180 to 182 is any amino acid
  Variant (192)..(192): Xaa in position 192 is any amino acid
  Variant (195)..(206): Xaa in position 195 to 206 is any amino acid
  Variant (207)..(211): Xaa in position 207 to 211 is any or no amino acid
  Variant (213)..(213): Xaa in position 213 is any amino acid
  Variant (217)..(217): Xaa in position 217 is any amino acid
  Variant (220)..(221): Xaa in position 220 to 221 is any amino acid
  Variant (224)..(224): Xaa in position 224 is any amino acid
  Variant (228)..(229): Xaa in position 228 to 229 is any amino acid
  Variant (230)..(230): Xaa in position 230 is any or no amino acid
  Variant (233)..(233): Xaa in position 233 is any amino acid
  Variant (235)..(235): Xaa in position 235 is any amino acid
  Variant (238)..(238): Xaa in position 238 is any amino acid
  Variant (245)..(250): Xaa in position 245 to 250 is any amino acid
  Variant (254)..(254): Xaa in position 254 is any amino acid
  Variant (256)..(256): Xaa in position 256 is any amino acid
  Variant (259)..(260): Xaa in position 259 to 260 is any amino acid
  Variant (262)..(262): Xaa in position 262 is any amino acid
  Variant (265)..(266): Xaa in position 265 to 266 is any amino acid
  Variant (268)..(277): Xaa in position 268 to 277 is any amino acid
  Variant (278)..(284): Xaa in position 278 to 284 is any or no amino acid
  Variant (286)..(301): Xaa in position 286 to 301 is any amino acid
  Variant (302)..(307): Xaa in position 302 to 307 is any or no amino acid
  Variant (309)..(313): Xaa in position 309 to 313 is any amino acid
  Variant (314)..(314): Xaa in position 314 is any or no amino acid
  Variant (316)..(316): Xaa in position 316 is any amino acid
  Variant (319)..(320): Xaa in position 319 to 320 is any amino acid
  Variant (323)..(324): Xaa in position 323 to 324 is any amino acid
  Variant (327)..(328): Xaa in position 327 to 328 is any amino acid
  Variant (330)..(331): Xaa in position 330 to 331 is any amino acid
  Variant (333)..(335): Xaa in position 333 to 335 is any amino acid
LXXXXXXXTXXVXDTGDXXXXXXXXXXXXXXXXPXDATTNPSLXLXAXXXXXYXXXXXXXXXXXXXXXXXXXXXXXXXXXXXDXXXVXXGXXILXXXPGRXSTEVDARLSXDXXXXXXKAXXXXXLYXXXGXXXXRXLIKXAXTWXGIXAAXXLEXXXGIXCNLTLLFXXXQAXACAXAXXXLISPFVGRIXDWXXXXXXXXXXXXXXXXXDXPGVXSVXXIYXYYKXXXGYXTXVMXGASFRNXXXXXXLAGXDXLTXXPXLLXXLXXXXXXXXXXXXXXXXXLXXXXXXXXXXXXXXXXXXXXXXFXXXXXXDXMAXXKLXXGIXXFXXDXXXL

SEQ ID NO: 98772 - protein, 40 aa, Artificial sequence
  protein pattern
  Variant (2)..(2): Xaa in position 2 is any amino acid
  Variant (3)..(5): Xaa in position 3 to 5 is any or no amino acid
  Variant (7)..(7): Xaa in position 7 is any amino acid
  Variant (8)..(8): Xaa in position 8 is Cys, Thr or Val
  Variant (10)..(10): Xaa in position 10 is Leu, Met or Val
  Variant (13)..(13): Xaa in position 13 is Ile, Leu or Val
  Variant (15)..(15): Xaa in position 15 is Cys, Gly, Asn or Ser
  Variant (16)..(17): Xaa in position 16 to 17 is any amino acid
  Variant (20)..(20): Xaa in position 20 is any amino acid
  Variant (22)..(22): Xaa in position 22 is Ala or Cys
  Variant (24)..(24): Xaa in position 24 is any amino acid
  Variant (26)..(26): Xaa in position 26 is any amino acid
  Variant (27)..(27): Xaa in position 27 is Ala, Ile or Val
  Variant (28)..(28): Xaa in position 28 is any amino acid
  Variant (34)..(34): Xaa in position 34 is Ile or Val
  Variant (35)..(35): Xaa in position 35 is Ala or Gly
  Variant (37)..(37): Xaa in position 37 is Ile or Val
  Variant (38)..(38): Xaa in position 38 is any amino acid
  Variant (40)..(40): Xaa in position 40 is Phe, Trp or Tyr
EXXXXIXXNXTLXFXXXQAXAXAXAXXXLISPFXXRXXDX

SEQ ID NO: 98773 - protein, 59 aa, Artificial sequence
  protein pattern
  Variant (2)..(5): Xaa in position 2 to 5 is any amino acid
  Variant (8)..(8): Xaa in position 8 is any amino acid
  Variant (9)..(9): Xaa in position 9 is Ile or Val
  Variant (13)..(13): Xaa in position 13 is any amino acid
  Variant (15)..(15): Xaa in position 15 is Ala, Ser or Val
  Variant (16)..(16): Xaa in position 16 is Lys or Arg
  Variant (17)..(17): Xaa in position 17 is any amino acid
  Variant (19)..(19): Xaa in position 19 is Phe or Tyr
  Variant (20)..(20): Xaa in position 20 is Asp or Asn
  Variant (21)..(24): Xaa in position 21 to 24 is any amino acid
  Variant (25)..(25): Xaa in position 25 is Ile, Leu or Val
  Variant (26)..(27): Xaa in position 26 to 27 is any amino acid
  Variant (28)..(28): Xaa in position 28 is Ala or Gly
  Variant (29)..(30): Xaa in position 29 to 30 is any amino acid
  Variant (31)..(32): Xaa in position 31 to 32 is Ile, Leu, Met or Val
  Variant (33)..(34): Xaa in position 33 to 34 is any amino acid
  Variant (35)..(35): Xaa in position 35 is Phe or Tyr
  Variant (36)..(38): Xaa in position 36 to 38 is any amino acid
  Variant (39)..(39): Xaa in position 39 is Asp, Gly or Asn
  Variant (40)..(40): Xaa in position 40 is Ile, Leu or Val
  Variant (41)..(43): Xaa in position 41 to 43 is any amino acid
  Variant (44)..(44): Xaa in position 44 is Lys or Arg
  Variant (45)..(45): Xaa in position 45 is Ile or Val
  Variant (46)..(46): Xaa in position 46 is any amino acid
  Variant (47)..(47): Xaa in position 47 is Ile or Val
  Variant (49)..(49): Xaa in position 49 is Ile, Leu, Met or Val
  Variant (51)..(51): Xaa in position 51 is Ala or Ser
  Variant (53)..(53): Xaa in position 53 is Trp or Tyr
  Variant (54)..(54): Xaa in position 54 is Glu or Gln
  Variant (57)..(57): Xaa in position 57 is any amino acid
  Variant (59)..(59): Xaa in position 59 is Ala or Gly
IXXXXPGXXSTEXDXXXSXXXXXXXXXXXXXXXXXXXXXXXXXXXXXKXAXTXXGIXAX

SEQ ID NO: 98774 - protein, 28 aa, Artificial sequence
  protein pattern
  Variant (5)..(6): Xaa in position 5 to 6 is any amino acid
  Variant (7)..(7): Xaa in position 7 is Ala, Asp, Glu, Gly or Ser
  Variant (8)..(8): Xaa in position 8 is Glu or Gln
  Variant (9)..(9): Xaa in position 9 is Ile, Leu or Val
  Variant (10)..(11): Xaa in position 10 to 11 is any amino acid
  Variant (13)..(13): Xaa in position 13 is Ala, Cys, Ser or Thr
  Variant (15)..(15): Xaa in position 15 is Cys, Ser or Val
  Variant (17)..(17): Xaa in position 17 is any amino acid
  Variant (20)..(20): Xaa in position 20 is Ile or Val
  Variant (21)..(21): Xaa in position 21 is Ala, Gly or Ser
  Variant (23)..(23): Xaa in position 23 is any amino acid
  Variant (25)..(25): Xaa in position 25 is Ile, Leu or Met
  Variant (26)..(27): Xaa in position 26 to 27 is any amino acid
ASFRXXXXXXXLXGXDXLTXXPXLXXXL

SEQ ID NO: 98775 - protein, 32 aa, Artificial sequence
  protein pattern
  Variant (2)..(2): Xaa in position 2 is any amino acid
  Variant (3)..(3): Xaa in position 3 is any or no amino acid
  Variant (5)..(5): Xaa in position 5 is any amino acid
  Variant (6)..(6): Xaa in position 6 is any or no amino acid
  Variant (8)..(8): Xaa in position 8 is Ser or Thr
  Variant (10)..(10): Xaa in position 10 is Asp or Glu
  Variant (11)..(11): Xaa in position 11 is Phe, Ile, Leu or Val
  Variant (12)..(13): Xaa in position 12 to 13 is any amino acid
  Variant (14)..(14): Xaa in position 14 is Ile, Leu or Met
  Variant (15)..(18): Xaa in position 15 to 18 is any amino acid
  Variant (20)..(20): Xaa in position 20 is any amino acid
  Variant (22)..(22): Xaa in position 22 is Ala, Cys or Ser
  Variant (28)..(28): Xaa in position 28 is Ile or Leu
  Variant (29)..(29): Xaa in position 29 is Ile, Leu or Val
  Variant (30)..(31): Xaa in position 30 to 31 is any amino acid
TXXVXXDXGXXXXXXXXXPXDXTTNPSXXXXA

SEQ ID NO: 98776 - protein, 26 aa, Artificial sequence
  protein pattern
  Variant (2)..(2): Xaa in position 2 is any amino acid
  Variant (4)..(4): Xaa in position 4 is Ala, Gly or Ser
  Variant (5)..(6): Xaa in position 5 to 6 is any amino acid
  Variant (9)..(9): Xaa in position 9 is any amino acid
  Variant (10)..(10): Xaa in position 10 is Asp, Glu, Gln or Thr
  Variant (13)..(14): Xaa in position 13 to 14 is any amino acid
  Variant (16)..(16): Xaa in position 16 is Ala, Cys, Gly, Ser, Thr or Val
  Variant (17)..(17): Xaa in position 17 is any amino acid
  Variant (18)..(18): Xaa in position 18 is Ala or Asp
  Variant (19)..(21): Xaa in position 19 to 21 is any amino acid
  Variant (22)..(22): Xaa in position 22 is Leu or Met
  Variant (23)..(25): Xaa in position 23 to 25 is any amino acid
  Variant (26)..(26): Xaa in position 26 is Phe, Ile, Leu, Met or Val
DXMXXXKLXXGIXXFXXXXXXXXXXX

SEQ ID NO: 98777 - protein, 10 aa, Artificial sequence
  protein pattern
  Variant (5)..(5): Xaa in position 5 is any amino acid
  Variant (8)..(9): Xaa in position 8 to 9 is any amino acid
DPGVXSVXXI

SEQ ID NO: 98778 - DNA, 1461 bp, Escherichia coli
  CDS (1)..(1461): transl_table=11
atgacaaccgtttatacgttggtgagttggttggccattctgggatactggttgctcattgcaggcgtaactttacgcattctaatgaaacgacgcgcagttccctccgcgatggcctggctgttgattatttacattctgccgttagtcggaattattgcctatcttgccgttggcgagctccatttaggcaaacgccgcgctgagcgcgccagagcgatgtggccttccaccgcaaaatggcttaacgaccttaaagcctgtaagcatatcttcgccgaagaaaatagcagtgtcgctgcgccattattcaagctttgcgagcgtcgtcaggggatcgctggggtcaaagggaatcagctacaactgatgaccgagtcagatgatgtgatgcaggcgttaatccgcgacatccagctcgcgcgccataatattgagatggtgttttatatctggcagcccggcggcatggcggaccaggtggctgaatcattaatggcggctgcgcgacgcggcattcattgccgattgatgctcgactccgccgggagtgtggcttttttccgcagcccgtggcccgagctaatgcgtaatgccggtattgaagtggtcgaagccttaaaggtcaatctgatgcgtgtgtttttacgccgtatggacctgcgccaacatcgcaagatgatcatgatcgataattacatcgcgtacaccggcagcatgaatatggtcgatcctcgctacttcaaacaagatgcgggcgtagggcaatggattgatctgatggcgcgtatggaaggccctatcgccaccgcgatggggattatttattcctgcgactgggagattgaaaccggaaaacgtattctgccgccaccaccagatgtcaatattatgccgtttgaacaggccagcggtcacaccattcacacaattgcttctggccccggctttccggaagatctcattcaccaggcattattgactgcggcttattcggcgcgtgaatatttgatcatgaccacgccctactttgtgccaagcgatgatttacttcatgcgatttgcacggcggcgcagcgcggggtggatgtcagtattatccttccgcgaaaaaatgactcgatgctggtcggctgggccagtcgcgcattctttacggaactgctggctgctggggttaaaatttatcagtttgaaggcgggttactgcataccaagagcgtgctggtcgatggcgaactaagtctggttggcacagttaaccttgatatgcgtagtctgtggctaaatttcgagattaccctggcaatcgacgataaaggttttggtgctgacctcgccgccgttcaggacgattatatttcgcgttcacgtctgctcgatgcccgtttatggctaaaacgtccattatggcaacgtgtcgccgagcgactgttttacttcttcagtccgttgctgtaa

SEQ ID NO: 98779 - protein, 486 aa, Escherichia coli
MTTVYTLVSWLAILGYWLLIAGVTLRILMKRRAVPSAMAWLLIIYILPLVGIIAYLAVGELHLGKRRAERARAMWPSTAKWLNDLKACKHIFAEENSSVAAPLFKLCERRQGIAGVKGNQLQLMTESDDVMQALIRDIQLARHNIEMVFYIWQPGGMADQVAESLMAAARRGIHCRLMLDSAGSVAFFRSPWPELMRNAGIEVVEALKVNLMRVFLRRMDLRQHRKMIMIDNYIAYTGSMNMVDPRYFKQDAGVGQWIDLMARMEGPIATAMGIIYSCDWEIETGKRILPPPPDVNIMPFEQASGHTIHTIASGPGFPEDLIHQALLTAAYSAREYLIMTTPYFVPSDDLLHAICTAAQRGVDVSIILPRKNDSMLVGWASRAFFTELLAAGVKIYQFEGGLLHTKSVLVDGELSLVGTVNLDMRSLWLNFEITLAIDDKGFGADLAAVQDDYISRSRLLDARLWLKRPLWQRVAERLFYFFSPLL

SEQ ID NO: 98780 - DNA, 1599 bp, Ureaplasma parvum serovar 3 str. ATCC 700970
  CDS (1)..(1599): transl_table=4
atgaaaaaacgtattttagccaaattcatcataacatttatttgtgtattattaataattaatatttgtttaatatcaatatattttcaccatcgaccaacggttattgttacagatattttaatatcattttatattttaaatactagtattggcttatatattttatcttcaagacatcggcaagatcgttctaaaaaatcatgattgtttatttttttatttctaccaattgtgtcaattatattcttttggatttttggatcacgcccatttaaagataaaaaaattaatgatatcattacaaaccgtcgtgcactttttaaatttgaagattatgaattttatcatagttttcaaaatatgattattaataataatggacttaatttaattcgtaaaattggtcagtataattaccaactttttcgtacacctatttattgtgataatcaaataacaattattaaagagacaaacgaaatgtatgaacaaactattaaattaataagaaaagcaaaaaaaacaatttatttacaatattatattattgagaatggtcgttgattacaatctcttgttaaagaattaataaaaaaaagtaatgatggtataaaaatatatatattatatgacccaattggttcgttaaataaatttcctaaaaaatatcgtcaacagttaattaataatggtatagaaattgcttgttttaaagcacgtgcagattataaatttagaagtactattaattttcgttcgcatcgaaaatatttaattattgatggtgaagttgctattagtggcggctctaatattggtgattcttatttaaatattgatcctaaggttggtcattgagttgatttgaattatattttaaccggaggaattgtgcatacaattcttttagaatttattcatgattgatactactatacaccattttcaaaaaagaataattttaatgttgttgttgacagtatgcatcctcaaccttacttatgtcaaggaaaagatgacttaataaataattctattaaaaataaaacaataacaacacttttgcatacaggaccagaccaatcaacaagttctttaaatgaaattctggttatggcaatcgctaatgctaaaaaatcaattacaatttttacgccatatttatttcctactgaagatattttaataggacttaaagctgcagcgaatactggaataaaagttaaaattattttacctggaagggttgattcttgaagttttatcatatcaatgaatcgtttaagttatgaatcattaattaagtccggtgtacaaatttatgaatatagtggttttttacacactaaagcgattttaatagatgatgatatttcactattaggttcttataatcttgataatagagcattagtaattaattacgaatcattattaacaatttattcaatacaagtaaatcacgacattaacgagatttttaatcaatatctccgtaattcacagttaattaatttagaagatttagataacaaattcacattcaacgaattagttcaaacagtatttattaatatttttcaattacttttataa

SEQ ID NO: 98781 - protein, 532 aa, Ureaplasma parvum serovar 3 str. ATCC 700970
MKKRILAKFIITFICVLLIINICLISIYFHHRPTVIVTDILISFYILNTSIGLYILSSRHRQDRSKKSWLFIFLFLPIVSIIFFWIFGSRPFKDKKINDIITNRRALFKFEDYEFYHSFQNMIINNNGLNLIRKIGQYNYQLFRTPIYCDNQITIIKETNEMYEQTIKLIRKAKKTIYLQYYIIENGRWLQSLVKELIKKSNDGIKIYILYDPIGSLNKFPKKYRQQLINNGIEIACFKARADYKFRSTINFRSHRKYLIIDGEVAISGGSNIGDSYLNIDPKVGHWVDLNYILTGGIVHTILLEFIHDWYYYTPFSKKNNFNVVVDSMHPQPYLCQGKDDLINNSIKNKTITTLLHTGPDQSTSSLNEILVMAIANAKKSITIFTPYLFPTEDILIGLKAAANTGIKVKIILPGRVDSWSFIISMNRLSYESLIKSGVQIYEYSGFLHTKAILIDDDISLLGSYNLDNRALVINYESLLTIYSIQVNHDINEIFNQYLRNSQLINLEDLDNKFTFNELVQTVFINIFQLLL

SEQ ID NO: 98782 - DNA, 1464 bp, Mesorhizobium loti MAFF303099
  CDS (1)..(1464): transl_table=11
atgttcgagaccattgcgactcactggacacaaatcctggcgatcatctcggtggtcatggcgaccgtcggcatcgcccatgccgtcatgaccaaggaggatgtgcgcgccgccaccggctgggtcggcgtgatggtgctgtcgccgatccttggcgtgctgatctatgccgtggccggcatcaaccgcatccgccgcgccacgatcacggcgcagcgcccgcttgccggcgacgcggtatccgccaagaatgagcgcgacatcgccgccgaggagaccctgatcgtcgagcgctacggtcagcgcttcaccggcctgcggacgctgggcgacagggtggcgcggcgcgccctcaacccgggcaatgccatcgatgtgctggagaccggcgacgaggcctatgccgccatgtgcgcggcgatagacggcgccgagcgcagcgtcctgctcgagacctatattttcgacaatgacgctgtcggcctgcttttcgtcgaatcgctggccggtgccgtccagcgtggtgtcaccgttcgcgtgctgatcgacgccgtcggtgcccgttactccgttcccagcatcctgggccatctgcgccgcgccaacatccccgccgatgtcttcaacggcaacatcatcataggcctgcgcctgccctacgccaatctccggacccaccggaagatccttgtggtcgacggcaccgttgccttcaccggcggcatgaacatccgcaagggtttttcggccgagttctcaggctccaacagcgccagggacacgcatttcaaggtcaccggacctgccgtcgccgacctgttctcggtcgcggccgaagactggcgcttcgccaccaacgaagcgctgaagggcgatgcctggcgaattgccccgctgtcgccggcgcccggccagccgatgctggtgcgggcggtcgcatccgggccggacgccagcaatgagaccaaccacaagctgttgatcggcgccttctcggtggcgcgcaagtcgatccgtttgatgtcgccctatttcctgccggaccgcgaactgatcagcgccttgatcaccgccgcccggcgcggcgtcgagatcgatgtcgtggtgccggcggtcaacaatctcttcctcgtcgaccgcgccatgaccgcgcaattcgaccagatcctgaagaattattgccgcatatggcgcacggaaggcccgttcgaccattccaagctgctgtcgatcgacggcgtgtgggcctatgtcggctcgtccaacctcgacgcccggtcgctgcggttgaacttcgagatcgatctggaggtcctcgatgcaggctttgcccgcgagatcgaggcccggatcggatcggccatcgaaacggccattcccgtcacgctggactccttgcgggcccggcccttcatcatccggctcttcgaccgcatcctgtggctgggatcgccctatctttag

SEQ ID NO: 98783 - protein, 487 aa, Mesorhizobium loti MAFF303099
MFETIATHWTQILAIISVVMATVGIAHAVMTKEDVRAATGWVGVMVLSPILGVLIYAVAGINRIRRATITAQRPLAGDAVSAKNERDIAAEETLIVERYGQRFTGLRTLGDRVARRALNPGNAIDVLETGDEAYAAMCAAIDGAERSVLLETYIFDNDAVGLLFVESLAGAVQRGVTVRVLIDAVGARYSVPSILGHLRRANIPADVFNGNIIIGLRLPYANLRTHRKILVVDGTVAFTGGMNIRKGFSAEFSGSNSARDTHFKVTGPAVADLFSVAAEDWRFATNEALKGDAWRIAPLSPAPGQPMLVRAVASGPDASNETNHKLLIGAFSVARKSIRLMSPYFLPDRELISALITAARRGVEIDVVVPAVNNLFLVDRAMTAQFDQILKNYCRIWRTEGPFDHSKLLSIDGVWAYVGSSNLDARSLRLNFEIDLEVLDAGFAREIEARIGSAIETAIPVTLDSLRARPFIIRLFDRILWLGSPYL

SEQ ID NO: 98784 - DNA, 1197 bp, Bacillus halodurans C-125
  CDS (1)..(1197): transl_table=11
atgatcggagtcgtactcttatttcttatcgttgcgattattttgtggttacgctttgattacacccaagggttaaagaaacaacgggggaaagccgttagacgaaaccaaccaatccgccacgggacagttcgactattgccaactggcgatgagtttatcggttccctcattcatgacataaaagctgctgaacaccacattcacattttattttatatctttcgtgacgatcacatcgggaaaaaaattcttcagcaccttgaacaaaaagcaaaggaaggggtggctgtccggttgctcgtcgatcgattcggcgccgatgtgaaaaatcgttccattcagagcctgaagcaagcaggggcgcaatttgagtacgctcatcggatcagctttccgtactggtttttctctttaaatcgccgtaatcatcggaaaatcactgtcattgatggaaagatcggctacattggtggctataacatcggggatgagtatttagggcgtgatccgaagttaggtttttggcgtgactaccatcttcgactgacaggggatggcgttcaagatttacaggatcaatttattcaagactgggagcgagagtcccgactccctgtcacaagagatcgctggctgtatccgccattggcaaaaggaccccatgaactacggatcattccaacgaacggctcttttttagaagacagttttcttcaactcgtcgaacaagcggaggaaacgattacgatcggaaccccttacttcattcctggggaaaaattgcaccatgcccttttggatgcagccgctagaggggtggctgttcgtctactcgtaccgaaaaaaggcgatcacccactcgtgaaggaagcagcgttcccttactttaaggagctccttgaagggggcatcaacatttatcgttactatcgcggcttttttcatggaaaggcaatcgtaatcgatgataagctggccgatgtaggaacagccaattttgataagcgcagctttcggttgaattatgaaatcaactgtcttttatatgacaaagagatgattcagctcgttcgcgaagaattggattatgatttttccatatcggaacggcttcaaatggaggacctcgcgaaccgctccttcttccatcgtacgaaagaacaagtagctaccctgttctctggttttttttag

SEQ ID NO: 98785 - protein, 398 aa, Bacillus halodurans C-125
MIGVVLLFLIVAIILWLRFDYTQGLKKQRGKAVRRNQPIRHGTVRLLPTGDEFIGSLIHDIKAAEHHIHILFYIFRDDHIGKKILQHLEQKAKEGVAVRLLVDRFGADVKNRSIQSLKQAGAQFEYAHRISFPYWFFSLNRRNHRKITVIDGKIGYIGGYNIGDEYLGRDPKLGFWRDYHLRLTGDGVQDLQDQFIQDWERESRLPVTRDRWLYPPLAKGPHELRIIPTNGSFLEDSFLQLVEQAEETITIGTPYFIPGEKLHHALLDAAARGVAVRLLVPKKGDHPLVKEAAFPYFKELLEGGINIYRYYRGFFHGKAIVIDDKLADVGTANFDKRSFRLNYEINCLLYDKEMIQLVREELDYDFSISERLQMEDLANRSFFHRTKEQVATLFSGFF

SEQ ID NO: 98786 - DNA, 1446 bp, Lactococcus lactis subsp. lactis Il1403
  CDS (1)..(1446): transl_table=11
ttgagttttattgcactttttgagctggcgctttttttccttaatgttatattatcctttgtcattatttttagggaaagaaaatcaacagcggcaacttggtcatggctctttgtagttaatttactgcctatcataggctttattttatatttactcattggacgtggcatttcgcattatcgtatttttaaagaccgaaaaaggtttcagttgggttttgaaaaacaattagaacatgctgaaaaatcttacacagatcgattatttattaaaaaaatgagacaaaatcatgtaattggtcagttgattcatatgctttatgttgaagaaaaatcaattatttcaacaaatactggtgtgaaaatcttcaatgatggacgtcagaaatttaatgctctgattgatgatattaataaagcaaaacatcacgttcatatggaatattatatttttcggatggatcgaatgggtcatgaaatctatgatgctttacttgcagctgcaaaacgaggagtcgaagttaaacttttaattgacgcttggggttcaaataaaacaaaaatgtctaattttaaagaacttcaggaggctggtgggcatgtagcgcaattttttccattaattatgcctttagttaatccacgaacaaactatcgtttacaccgtaaaattgtagttattgatggaattattggatacacaggtggatttaatgttggtgatgaatatgcttcaattacaaagaaatttggctattggcgtgacaatcatttacgtttgactggtgatattgtttatagtctacaacatcgttttattttagactggaattctcaacatcattttgaagtgaccgagggagagccttatttcccagattcgattgttgaaggtcatgtagcgactcaacttgtaacttcgggaccagatgaggacaaagagcaaattaaattaacttacatgaagatgatttcaggtgcagagcgagagattatcattcaaaccccttattatattccgtctgatgctttacatgaatctataaaattagcattgttatcgggtgtacaggttaaattattgattccaaataagccggaccatccactggtttattgggcgacttatttccatgctgctgatttagttaaatatggcgcgaaagtttatacttacgaaaatggatttgttcactctaaaacattgattattgatggagagtatgcctcagttgggtcagctaatttagattatcgaagtttgcaattatgttttgaagctaatgttgttatctatgattatgacatttctcaaaaattacgaaatgattttatgaaggatttgaaattgagtcgtccattaactttagagcgttatgaggaacgctctaagttagttcgttttaaagaaggtttagctcgtttaattgcaccaatgctctga

SEQ ID NO: 98787 - protein, 481 aa, Lactococcus lactis subsp. lactis Il1403
MSFIALFELALFFLNVILSFVIIFRERKSTAATWSWLFVVNLLPIIGFILYLLIGRGISHYRIFKDRKRFQLGFEKQLEHAEKSYTDRLFIKKMRQNHVIGQLIHMLYVEEKSIISTNTGVKIFNDGRQKFNALIDDINKAKHHVHMEYYIFRMDRMGHEIYDALLAAAKRGVEVKLLIDAWGSNKTKMSNFKELQEAGGHVAQFFPLIMPLVNPRTNYRLHRKIVVIDGIIGYTGGFNVGDEYASITKKFGYWRDNHLRLTGDIVYSLQHRFILDWNSQHHFEVTEGEPYFPDSIVEGHVATQLVTSGPDEDKEQIKLTYMKMISGAEREIIIQTPYYIPSDALHESIKLALLSGVQVKLLIPNKPDHPLVYWATYFHAADLVKYGAKVYTYENGFVHSKTLIIDGEYASVGSANLDYRSLQLCFEANVVIYDYDISQKLRNDFMKDLKLSRPLTLERYEERSKLVRFKEGLARLIAPML

SEQ ID NO: 98788 - DNA, 1464 bp, Lactococcus lactis subsp. lactis Il1403
  CDS (1)..(1464): transl_table=11
atggagaaatattttatgtcacttgcgacaatttatagtttgatgggaacactaataacgattaacacattgcttgcccttgtgacaatttttcggaaacctaggtctattgccagtatttttgcgtggtctatgttcttgttctttttaccaggggttggtttccttggctatctttttttaggaagagggcttgatcgaacaacaacaaatcgttttgaagaagaaaataaatataatctgtctattcttgctcaaagggtgcgtgaaaataatgaaaaatttgagccaaaagaaatggcaccccatgaaagattactgaaaaggtattttaataatatggaacgtacaccactttgtcgtgggaataaagtgaatttttatctgaatggagaagataaattttcagccttgtttgatgacataaagaatgctaaagataatattcatgtagaatactatgcattctttaatgacaaaattggaactgcttttcgcgataatctaattgaaaaagctaaagaaggggtggaagttagagtagtttacgatccatggggaggaaaaacgagaaaggatttctttaaacctttggaagaggcaggaggtaaggtcacagcctttatcacatcgcgtaatacactaacaaaaacccgacttaactatcatttacatcgtaaaattgtagtgatagatggtcaaattggttggactggcggatttaatgttggtgatcaatatatttataacagtaaaaagtttggcttctggcgcgatacacacggtagaattgttggtacagcagcttttggtcttcaagaaacatttattcgagattggaatgtttcagtcagagatcctaaagataagcttgaaagagaagattcatattttgtggtaccggaagaagaagggaacattgatattcagattgtcgctaacggaccaaagagtgataataaaaccttaagaacaggttttattaaaatgattatggatgcggaagactatatttggcttcaatcgccttacttgatacctgatgactctatgataacagcgcttgtagcagcggcgaattctggtgttgatgtaagaattatgattcccaatatgccagatcatccgtttatttttagagcaacacaatattacgcaaattatctacataaacacggtgtgaaaatatacaattatacaaatggcttcatacactctaaaactcttgtaatggatggaaaattaggagtatttggtacaactaatcaagatattcgcagttatgaattaaatttcgagataagtgctttttgttatgatgaaactgtagcaaaagagatgagcaggacctttgagggagacttaagaaattcaaagctacttactgatgaagaaattgcccaacaatctatctggcttaaaatcaagcaaaacttttcgagattacttagtccgatattataa

SEQ ID NO: 98789 - protein, 487 aa, Lactococcus lactis subsp. lactis Il1403
MEKYFMSLATIYSLMGTLITINTLLALVTIFRKPRSIASIFAWSMFLFFLPGVGFLGYLFLGRGLDRTTTNRFEEENKYNLSILAQRVRENNEKFEPKEMAPHERLLKRYFNNMERTPLCRGNKVNFYLNGEDKFSALFDDIKNAKDNIHVEYYAFFNDKIGTAFRDNLIEKAKEGVEVRVVYDPWGGKTRKDFFKPLEEAGGKVTAFITSRNTLTKTRLNYHLHRKIVVIDGQIGWTGGFNVGDQYIYNSKKFGFWRDTHGRIVGTAAFGLQETFIRDWNVSVRDPKDKLEREDSYFVVPEEEGNIDIQIVANGPKSDNKTLRTGFIKMIMDAEDYIWLQSPYLIPDDSMITALVAAANSGVDVRIMIPNMPDHPFIFRATQYYANYLHKHGVKIYNYTNGFIHSKTLVMDGKLGVFGTTNQDIRSYELNFEISAFCYDETVAKEMSRTFEGDLRNSKLLTDEEIAQQSIWLKIKQNFSRLLSPIL

SEQ ID NO: 98790 - DNA, 1578 bp, Streptococcus pyogenes M1 GAS
  CDS (1)..(1578): transl_table=11
atgattatcaaaaagaaagcaaaagtaaaatatttgctccataaagggaaacatggatttttaagaggaatttttagtagaacaacaatcattgtattattaattattttgcaattagttttcttatttcaatcttatgcctggatggagcagtaccgtgtttggataacgattcttgaaagtgtctttgctattactattgttttatatttagttaatagtgatatggatgctatttcaagaatgacgtggttaattttgattatgattgctccattactagggtcactgtttttaatttatacaaaattggattggggttacagagggctaaaacaaagaataaatcatcttgtagatctgtctgcaccttaccttagcgatgatgacgctatattagaggtattaaaggatagcacatcaaccacatatcatttagtacagtacttagaaagaagtcgtggcaactttccgatttataataatacaagggtaacttacttcccaacaggtgaaactttttttgatagtttaaaagaacagttattcttagctaaaaagtacatttttcttgaattttttattattgcagaaggccaaatgtggggagaaatccttagtattctagaaaaaaaagtcagtgaaggtgtagaagttagggtgttgtttgatggcatgaacgaactatcaacgctatcatcagattacgccaagagattagaacaaatagggattaaagctaaatcatttttaccgatttcaccctttatctctacctattacaattatcgagatcaccgaaaaattgtcgttattgatggggaggtatcattcactggaggtattaatctagcagatgagtacattaatgaagtagagcgttttggccactggaaagatgctggtttaatgcttgagggtgaagcaacagacagctttttaattttgtttttacaaatgtggtctatcacagaaaaagaactgattattgatccttatctttcagatcattctttaaaacttccttcagatggctatgttattccctacggtgattccccgcttgatactgataaaataggtaaaaatgtttatatagacattttaaatcatgctaaagagtacgtttatatcatgacaccttaccttattttagatagcgagatggaacacgctttacggtttgcatcagaacgtggagtagatatccgaattattatgccaggagtgccagataagggggtaccatatgccttagctaaaacctattataaagctttgatgtcttctggagtaaaaatttatgagtatcaaccagggttcgttcattcaaaggtatttatctctgataatacaaaagcagttgtcggaacaattaacttagactatcgtagcctttatcatcattttgaatgcgcgacttatttatatcgtgtgtcagttattgctgatattgtgaatgactttaatgaagctcaaaagcaatcactattgatgacatcagatcatttgacgcaacgtccttggtatcaaaaattgataggattattagtacgaataattgcccctctcttgtaa

SEQ ID NO: 98791 - protein, 525 aa, Streptococcus pyogenes M1 GAS
MIIKKKAKVKYLLHKGKHGFLRGIFSRTTIIVLLIILQLVFLFQSYAWMEQYRVWITILESVFAITIVLYLVNSDMDAISRMTWLILIMIAPLLGSLFLIYTKLDWGYRGLKQRINHLVDLSAPYLSDDDAILEVLKDSTSTTYHLVQYLERSRGNFPIYNNTRVTYFPTGETFFDSLKEQLFLAKKYIFLEFFIIAEGQMWGEILSILEKKVSEGVEVRVLFDGMNELSTLSSDYAKRLEQIGIKAKSFLPISPFISTYYNYRDHRKIVVIDGEVSFTGGINLADEYINEVERFGHWKDAGLMLEGEATDSFLILFLQMWSITEKELIIDPYLSDHSLKLPSDGYVIPYGDSPLDTDKIGKNVYIDILNHAKEYVYIMTPYLILDSEMEHALRFASERGVDIRIIMPGVPDKGVPYALAKTYYKALMSSGVKIYEYQPGFVHSKVFISDNTKAVVGTINLDYRSLYHHFECATYLYRVSVIADIVNDFNEAQKQSLLMTSDHLTQRPWYQKLIGLLVRIIAPLL

SEQ ID NO: 98792 - DNA, 1506 bp, Mycoplasma pulmonis UAB CTIP
  CDS (1)..(1506): transl_table=4
atggacaaaaaaaacttcactagatttctttgatattttttatcatttttgtttcttgtaattaacatagtagttttttgacttatttttcatctaaattatgtttattttagtttaatgattgctattgtttatttaattaacactggagtggtagtttttatttttatgcaaaataggaactcttcatcaaagctttcttgaattgttgtaattactattttgcctttttttggacatcttctttattttctagttggtcaaaaatatagacatagaaaagactatgatgcttattataaaaattttaataacatcttaaaagatgggaccaacattgatgatttttcaactatgattcatgactttggagaaaaaaatttatttaatcaactctcacttttaagtcaaaagccaatacttccagctaaattcaaaatgtttagtcatccttataaatattttaattctctttttgagcatattgaaaaagctcaaaaagaaatttgaattgtttcttactatgcaaaagatggtgaattagttgatgaatttttttcacttctaattaaaaaagcaactaatggtgtaaaaattaaatgactaattgatgattttggtcaaaggcatttaaaaagaaaaaccttagataggctaaaacatcctaatattgaaattgaatttattggtagattacgctttggttttttgatctcttcaaatttctacagaaaccatagaaaattttttatcattgataaaaaaatagtttttaacggaggatcaaatatatcagatagatatatttcactagactctcaatttggttattaccatgatattaactatatgattaagggtccttatgttcattcttacatcatcatttttatttacatgtgaaaaagatgaagaaatatagaactacgatataaagagccaattggtgaattagaaaataactttgagtcaagagcaattatctttgaagatggtcctgagttaaatgactcaattattgaagactcacttatcaaattaattgcaaatgctaaagaagaaataaaaatatcaactccttatttttctctttcaaatggtcttttcaatgcttttaaaatagctcttctttcaggggtaaaggtatctattttttatcctggttattcagctcaaaaacttgttcaccaaataggattagttgagcttaaaaaacttgaaaaatatggaatcaaaatttattttacaaatggctttttcaatcactcaaaaatgggaatttttgataaaaatattgcttacataggaactttaaattttgatattagaagtttttatgctcaatatgaaacaattgatattgttgaaggtgaagttgtcaaagatattcaaaaactttttgatgatcttgaacaaagatcagtgcactttttaaaagactatcaaaatatgagaagttttttaccaaaacaaattctttttaaaattttaaaacctcttacttag

SEQ ID NO: 98793 - protein, 501 aa, Mycoplasma pulmonis UAB CTIP
MDKKNFTRFLWYFLSFLFLVINIVVFWLIFHLNYVYFSLMIAIVYLINTGVVVFIFMQNRNSSSKLSWIVVITILPFFGHLLYFLVGQKYRHRKDYDAYYKNFNNILKDGTNIDDFSTMIHDFGEKNLFNQLSLLSQKPILPAKFKMFSHPYKYFNSLFEHIEKAQKEIWIVSYYAKDGELVDEFFSLLIKKATNGVKIKWLIDDFGQRHLKRKTLDRLKHPNIEIEFIGRLRFGFLISSNFYRNHRKFFIIDKKIVFNGGSNISDRYISLDSQFGYYHDINYMIKGPYVHSYIIIFIYMWKRWRNIELRYKEPIGELENNFESRAIIFEDGPELNDSIIEDSLIKLIANAKEEIKISTPYFSLSNGLFNAFKIALLSGVKVSIFYPGYSAQKLVHQIGLVELKKLEKYGIKIYFTNGFFNHSKMGIFDKNIAYIGTLNFDIRSFYAQYETIDIVEGEVVKDIQKLFDDLEQRSVHFLKDYQNMRSFLPKQILFKILKPLT

SEQ ID NO: 98794 - DNA, 1425 bp, Streptococcus pneumoniae TIGR4
  CDS (1)..(1425): transl_table=11
atggctcccattttatggattactgtcctcattctactgagtatcatcacaatcatttcgatagtcaaccgtaatacgactcctgagaataaggtaacctggttgttagtagcctttgtgccagtatttggtcccttgctctatctgatgtttggtgaaaggcgattgtccaaaaaagaaatcaaacaactgaagaagctaggctctatgcatttccaagaagcaaatagccagctactaaaagagaaattaaaagaaagtgacaaggcagcttatggagtcatcaagtccttattgagtatggataccaatgctgacatctatgatcaaactgcctctacattttttcctaacggagaagctatgtggaaaaagatggtagaagatcttaaaaaggctgagaaatttattttcttggaatattacattatagaagaaggtttgatgtggaatcgcatactagatatactagagcaaaaggtagctcagggtgtagaggttaagatgctctatgatgatatcggctgtatggctactttaacaggagattatgcacatcgacttcgtcagctgggcatcgaggcccataaattcaataaagttattcctcgtttgacagtggcttataataacagagatcatagaaaaatattgattgttgatggtcagatagcctatactggtggggtcaatctggcagatgagtacattaaccacgtcgagagatttggttattggaaggatagtggaattcgcttagacggactagcagtaaaagctctgacacgcttatttttgaccacttggtacattaatcgaggagaaattagtgattttgatcaatatcatttagaaaatcattctatcccgagtgacggtttaaccattccatacggaagtggacccaagccaatttttcgagcgcaggtagggaaaaaagtttatcagagtttaatcaatcaagcaacagaatcggtctatattacgacaccttatttgattatagattatgatttaacagagacaatcaaaaatgcagctatgagaggggtcgatgttcgaattatcaccccttacataccagataagaagttcattcagttagtcacgagaggagcttatcccgaccttctttctgctggtgttcggatttatgagtatagtccaggttttattcatagtaagcagatgttggtagacgaagattttgcggtggtggggacaatcaatctcgactaccggagcttggtacaccattatgaaaatgcagtcttactctataaaactccttctataagggaaatcgcccgagattttcgaaatatatttgcagattctcaggaagtctatcctcattctatcaaaacgagctggtatcaaaagcttgtaaaagaaatcgcccagctattcgcccctatcttataa

SEQ ID NO: 98795 - protein, 474 aa, Streptococcus pneumoniae TIGR4
MAPILWITVLILLSIITIISIVNRNTTPENKVTWLLVAFVPVFGPLLYLMFGERRLSKKEIKQLKKLGSMHFQEANSQLLKEKLKESDKAAYGVIKSLLSMDTNADIYDQTASTFFPNGEAMWKKMVEDLKKAEKFIFLEYYIIEEGLMWNRILDILEQKVAQGVEVKMLYDDIGCMATLTGDYAHRLRQLGIEAHKFNKVIPRLTVAYNNRDHRKILIVDGQIAYTGGVNLADEYINHVERFGYWKDSGIRLDGLAVKALTRLFLTTWYINRGEISDFDQYHLENHSIPSDGLTIPYGSGPKPIFRAQVGKKVYQSLINQATESVYITTPYLIIDYDLTETIKNAAMRGVDVRIITPYIPDKKFIQLVTRGAYPDLLSAGVRIYEYSPGFIHSKQMLVDEDFAVVGTINLDYRSLVHHYENAVLLYKTPSIREIARDFRNIFADSQEVYPHSIKTSWYQKLVKEIAQLFAPIL

SEQ ID NO: 98796 - DNA, 1533 bp, Clostridium acetobutylicum ATCC 824
  CDS (1)..(1533): transl_table=11
ttgagattttttataaaatttatatttcatagagctacctttgtagttatttcagcattaatacagctatttgttttgatttttgtaattataaaatttaacgagtattttgtgttcttttatggaattagcattgtagtaagcataattgcagtattgtatatactttacaataatagtaatccagcatataaaattgtgtggattattccaatattagtatttcctctttttgggggattattttatttattttttggcggaagtaagttaagcagaagaactagaaaaaagatggagtgtatagtagctaagtcaagagcggtattgataaagggtgaagtgataataaatgagataaggaataataatgaaacagcagcgaatcaatcaagttatattcaaaattattctctttttcctccatataaatacacaaaggcagaatatttttcaacaggagaagaaacatttaacgaacttatagaacaacttaaaaaagcaaaacaatatattttccttgaatactttattattaaagaaggagttatgtggaatagtgttttacaaatattaagagataaggtacaagaaggagtggaggtcagagttatatatgatgacatagggtgtatgtttactctgcctaacggatatcataaagaacttgagaaaattggcattaaatgctgcgtattcaatcctctcattcctatggtatcttttaaatttaataatagagatcataggaaaattgcagtaattgatggtttggtaggatttactggtggaataaatctatcggatgagtacataaataaatatcaaaagtatggctattggaaggatactgcaattaaagtggaaggaaaagcagcttggaatttatcagttatgtttttatctatgtggagctttcttagaggaatagatgaggactttaatacattcaaaaagaatattgaaaaagaattttcttctagagagggatatgttcagccatttgcggatagcccattagacggagaacctgttggggaaattatatatatgaacttgataagtaaggctacaaaatatgtttatattactacaccttatttagttataggaaacgagatggtaacagcactgacctctgccgcaaagggaggagtagatgttagaattattaccccacacataccagacaaaaaaattgttcattctgtaactaaatcctactataaagttttaattgagagcggagttaaaatttatgagtatatgccaggcttcatacattcaaaaacttatgtttgtgataatgaatacggagttgtaggcagtataaatatggattttagaagtctttatcttcattttgagtgcggtgtttggatgtataaaaccaatactgtatacgatattaagaaggattttatggatacattagataaaagtaaagagataactttagaagagattaacaaagttaagtggtatagtactttatggcgcgtggttctaagagtttttgcacctttgatgtaa

SEQ ID NO: 98797 - protein, 510 aa, Clostridium acetobutylicum ATCC 824
MRFFIKFIFHRATFVVISALIQLFVLIFVIIKFNEYFVFFYGISIVVSIIAVLYILYNNSNPAYKIVWIIPILVFPLFGGLFYLFFGGSKLSRRTRKKMECIVAKSRAVLIKGEVIINEIRNNNETAANQSSYIQNYSLFPPYKYTKAEYFSTGEETFNELIEQLKKAKQYIFLEYFIIKEGVMWNSVLQILRDKVQEGVEVRVIYDDIGCMFTLPNGYHKELEKIGIKCCVFNPLIPMVSFKFNNRDHRKIAVIDGLVGFTGGINLSDEYINKYQKYGYWKDTAIKVEGKAAWNLSVMFLSMWSFLRGIDEDFNTFKKNIEKEFSSREGYVQPFADSPLDGEPVGEIIYMNLISKATKYVYITTPYLVIGNEMVTALTSAAKGGVDVRIITPHIPDKKIVHSVTKSYYKVLIESGVKIYEYMPGFIHSKTYVCDNEYGVVGSINMDFRSLYLHFECGVWMYKTNTVYDIKKDFMDTLDKSKEITLEEINKVKWYSTLWRVVLRVFAPLM

SEQ ID NO: 98798 - DNA, 1479 bp, Agrobacterium tumefaciens str. C58
  CDS (1)..(1479): transl_table=11
gtgctctatagtcttatcatgctcgatctcgtcattgcctattggccgcatatccttgccgttctctccatcttgatgggtaccgtggcggccgtgcatgccacgatgacgaaggaggaggtgcgttccgcgctgggctgggtgggcgtcatcgtgctgtcgccgatcgtcggcgcggtcatctacgccatcgccggcatcaaccgcattcgccggtcgaacatcacgcagcagcggtccttcatgctggacgagatcatggatcgcgtggcgcgcctcgatgccagcaacgatatgatcgcgacgcgtttcggccgccgtttcgaggcgatgaagacgcttggcgaccgggtgacgcgccacgcgctgacgaccggtaacggcatcgagccgctggtgagcggggatgtcgcctatgccgccatgctggaggcgatcggggaggcgaagcggtcgatcattctcgaaacatatattttcgataatgaccggatcggcgcccgtttcgtcgcggcgcttgaaagggcgaagctgcgtggcgtggaggtgagggtgctcatcgatgcggtcggcgcccgttattcggttccgagcatcctgccgacactcagggataaggacatcgttgccgatgtcttcaacggcaatgtcatcatggggctgcggctgccctatgccaatctgcgtacccaccgcaagatcctcgtggtggacggacgtatcgccttcagcggcggcatgaatatccgcgagggtttcaccctggaattcggtggcgaaagccagtcgcacgacacccatttcaagattaccgggccggtggtctccgattttttctccatcgctgcggaggactggcgcttcacgacgggggaggttctcgacgcaccggtctgggatatcgccattcccgatggcgtgccggggtcgcaaatcgttgcccgcgtctgctcctcggggccggacaaaagcatcgagaccagtcacaagatgctgatgggggccttttcggtggcgcgttcctccattctcatcatgtcgccctattttctccccgatcgggagcttatttcggcgctcattaccgcagcaaggcgggggtgcgtggtggatatcatcgtgccgaaaagcaacaatctggtgcttgtcgacagggcgatgacggcgcagttcgaccagatgctgaagaattattgccgcatctggcgggcgaccggggctttcaatcattccaagcttctggtgatcgacgggcgctggagctatattggctcctccaatctcgatccgcgatcgctgcggttgaacttcgagatcgatctcgaagtcatggacgaagaatttgccggggcgatcggagatcgtatccggaatgcgcgtgcaactgccttgcccgtccggctcagcgaactgaatgctcggccattcgttgtccgttttgtggagcgtgtgctgtggctcgcttcaccctatctttag

SEQ ID NO: 98799 - protein, 492 aa, Agrobacterium tumefaciens str. C58
MLYSLIMLDLVIAYWPHILAVLSILMGTVAAVHATMTKEEVRSALGWVGVIVLSPIVGAVIYAIAGINRIRRSNITQQRSFMLDEIMDRVARLDASNDMIATRFGRRFEAMKTLGDRVTRHALTTGNGIEPLVSGDVAYAAMLEAIGEAKRSIILETYIFDNDRIGARFVAALERAKLRGVEVRVLIDAVGARYSVPSILPTLRDKDIVADVFNGNVIMGLRLPYANLRTHRKILVVDGRIAFSGGMNIREGFTLEFGGESQSHDTHFKITGPVVSDFFSIAAEDWRFTTGEVLDAPVWDIAIPDGVPGSQIVARVCSSGPDKSIETSHKMLMGAFSVARSSILIMSPYFLPDRELISALITAARRGCVVDIIVPKSNNLVLVDRAMTAQFDQMLKNYCRIWRATGAFNHSKLLVIDGRWSYIGSSNLDPRSLRLNFEIDLEVMDEEFAGAIGDRIRNARATALPVRLSELNARPFVVRFVERVLWLASPYL

SEQ ID NO: 98800 - DNA, 1533 bp, Streptococcus pneumoniae R6
  CDS (1)..(1533): transl_table=11
atgaaatataggaaatttcaattattgatgtccaagtatggctttagtctttcgattatgctacttgaactttgtcttgtttttggtctctttctttatttaggacgcatggctcccattttatggattactgtcctcattctactgagtatcatcacaatcatttcgatagtcaaccgtaatacgactcctgagaataaggtaacctggttgttagtagcctttgtgccagtatttggtcccttgctctatctgatgtttggtgaaaggcgattgtccaaaaaagaaatcaaacaactgaagaagctaggctctatgcatttccaagaagcaaatagccagctactaaaagagaaattaaaagaaagtgacaaggcagcttatggagtcatcaagtccttattgagtatggataccaatgctgacatctatgatcaaactgcctctacattttttcctaacggagaagctatgtggaaaaagatggtagaagatcttaaaaaggctgagaaatttattttcttggaatattacattatagaagaaggtttgatgtggaatcgcatactagatatactagagcaaaaggtagctcagggtgtagaggttaagatgctctatgatgatatcggctgtatggctactttaacaggagattatgcacatcgacttcgtcagctgggcatcgaggcccataaattcaataaagttattcctcgtttgacagtggcttataataacagagatcatagaaaaatattgattgttgatggtcagatagcctatactggtggggtcaatctggcagatgagtacattaaccacgtcgagagatttggttattggaaggatagtggaattcgcttagacggactagcagtaaaagctctgacacgcttatttttgaccacttggtacattaatcgaggagaaattagtgattttgatcaatatcatttagaaaatcattctatcccgagtgacggtttaaccattccatacggaagtggacccaagccaatttttcgagcgcaggtagggaaaaaagtttatcagagtttaatcaatcaagcaacagaatcggtctatattacgacaccttatttgattatagattatgatttaacagagacaatcaaaaatgcagctatgagaggggtcgatgttcgaattatcaccccttacataccagataagaagttcattcagttagtcacgagaggagcttatcccgaccttctttctgctggtgttcggatttatgagtatagtccaggttttattcatagtaagcagatgttggtagacgaagattttgcggtggtggggacaatcaatctcgactaccggagcttggtacaccattatgaaaatgcagtcttactctataaaactccttctataagggaaatcgcccgagattttcgaaatatatttgcagattctcaggaagtctatcctcattctatcaaaacgagctggtatcaaaagcttgtaaaagaaatcgcccagctattcgcccctatcttataa

SEQ ID NO: 98801 - protein, 510 aa, Streptococcus pneumoniae R6
MKYRKFQLLMSKYGFSLSIMLLELCLVFGLFLYLGRMAPILWITVLILLSIITIISIVNRNTTPENKVTWLLVAFVPVFGPLLYLMFGERRLSKKEIKQLKKLGSMHFQEANSQLLKEKLKESDKAAYGVIKSLLSMDTNADIYDQTASTFFPNGEAMWKKMVEDLKKAEKFIFLEYYIIEEGLMWNRILDILEQKVAQGVEVKMLYDDIGCMATLTGDYAHRLRQLGIEAHKFNKVIPRLTVAYNNRDHRKILIVDGQIAYTGGVNLADEYINHVERFGYWKDSGIRLDGLAVKALTRLFLTTWYINRGEISDFDQYHLENHSIPSDGLTIPYGSGPKPIFRAQVGKKVYQSLINQATESVYITTPYLIIDYDLTETIKNAAMRGVDVRIITPYIPDKKFIQLVTRGAYPDLLSAGVRIYEYSPGFIHSKQMLVDEDFAVVGTINLDYRSLVHHYENAVLLYKTPSIREIARDFRNIFADSQEVYPHSIKTSWYQKLVKEIAQLFAPIL

SEQ ID NO: 98802 - DNA, 1518 bp, Staphylococcus aureus subsp. aureus Mu50
  CDS (1)..(1518): transl_table=11
atgttttttgtgcctttctttataggagaaaagactatgcgatatacattttcaaatgatttaggaacactttttaccattattttagccattggattcatcattaatttagtattggcttttattattatctttttagaaagaaatagacgtacagcgagttcaacttgggcatggctatttgtactttttgtcttaccattgattggttttattctttacttgttttttggtagaaccgtttcggcacgtaaattgaataaaaacaatggtaacgtgttaacggatttcgatggacttttaaaacaacaaatagaaagctttgataaaggtaattatggtactgataacaaacaagttcaaaaacatcatgatttagtaagtatgcttttgatggatcaagatggttttttaactgaaaataataaagttgatcatttcattgatggaaatgatttatatgatcaagttttaaaagatattaaaaatgcaaaagaatatatccatttagagtactatactttcgctttagatggtttaggtaaaagaattttacatgctttagaagaaaaattgaaacaaggtctagaagtaaaaatattatatgatgatgttggatctaaaaatgttaagatggcaaattttgatcactttaaatcattaggtggcgaagttgaagcattttttgcttctaaattacccttattaaatttccgtatgaataacagaaatcatagaaaaatcatcgtaatcgatggtcaactaggttatgtcggaggatttaacattggtgatgaatatctaggattaggtaaactagggtattggagagatacgcatttacgtatacaaggggatgcggttgatgcactgcagttgcgatttattttagactggaattcgcaagcgcaccgtccacagtttgaatatgatgttaagtatttccctaaaaagaacggaccattgggcaattcaccaattcaaatagctgcaagtggcccagctagtgactggcatcaaattgaatatggttatacaaaaatgattatgagcgctaagaagtcggtatatttgcaatcgccttatttcattccggataactcatatataaatgccattaaaattgcagctaaatcaggtgtagatgttcatctaatgattccatgtaagccagatcatcctttagtttattgggcgacattttcaaatgcctctgacttattatcaagtggtgttaaaatttatacgtatgaaaatggatttatacattctaaaatgtgcttaattgatgatgaaatcgtatcagtgggcacagcaaatatggactttagaagttttgaattaaattttgaagtaaatgcctttgtatatgatgaaaatcttgctaaggatttaagggtggcttatgaacatgatattacaaaatcaaaacaactaaccaaagaatcatatgccaatagaccgctgtctgttaaattcaaagaatcgttagcaaaattagtttcgccaattttataa

SEQ ID NO: 98803 - protein, 505 aa, Staphylococcus aureus subsp. aureus Mu50
MFFVPFFIGEKTMRYTFSNDLGTLFTIILAIGFIINLVLAFIIIFLERNRRTASSTWAWLFVLFVLPLIGFILYLFFGRTVSARKLNKNNGNVLTDFDGLLKQQIESFDKGNYGTDNKQVQKHHDLVSMLLMDQDGFLTENNKVDHFIDGNDLYDQVLKDIKNAKEYIHLEYYTFALDGLGKRILHALEEKLKQGLEVKILYDDVGSKNVKMANFDHFKSLGGEVEAFFASKLPLLNFRMNNRNHRKIIVIDGQLGYVGGFNIGDEYLGLGKLGYWRDTHLRIQGDAVDALQLRFILDWNSQAHRPQFEYDVKYFPKKNGPLGNSPIQIAASGPASDWHQIEYGYTKMIMSAKKSVYLQSPYFIPDNSYINAIKIAAKSGVDVHLMIPCKPDHPLVYWATFSNASDLLSSGVKIYTYENGFIHSKMCLIDDEIVSVGTANMDFRSFELNFEVNAFVYDENLAKDLRVAYEHDITKSKQLTKESYANRPLSVKFKESLAKLVSPIL

SEQ ID NO: 98804 - DNA, 1464 bp, Sinorhizobium meliloti 1021
  CDS (1)..(1464): transl_table=11
atgatcgtgttcatagagagttactggccgcattttctggcgctgctttcggtcgtcctcggcgtcccggcaatcatccatgcggcgatgacgaaagacgatgtgcgggcggccgccggctgggtcggggttgtgctgctctcaccggtcatcggtgcggtcatctacgcggttgccggcatcaatcggatgcgccgctcgtctatcggcttgcagcgctcgctgctgcgctcgaccgagcgggaccctttcgggcgcttcgatgtcacgcatgatcaggtggtggcccgtttcggacagcgtttcgcggcaatgaagatgcttggagaccgcgttgcgcgcttcacgatgtcggcgggaaaccacatcaccatgctcgagggcggcgacgcggtctatgcggcgatgctcgacgagatctcctccgcccgtcgcagcattctcatcgagagctatattttcgaccgcgatcccatcggcatgcgtttcgccgatgccctgatcgccgcagtgaaacgcggcgtcgccgtgcgcgtcctgatcgacgccgtgggtgcgcgctattccgtgccgtccattgtgggctatctgaaggaaggaggcgtgccgaccgccgtcttcaacggcaatatcatcatgggcctgaggctgccctatgccaatctcaggacacaccgcaagatcatggttgtcgacggcgcggtcgctttcgccggcggcatgaacatccgcgcgggctttgccgctgaaatcgcaggcaaggctgcttctttcgacacgcatttccgcgtgaccggacccgttgtcgccgatatctttcaggttgccgcggaagactggcagttttcgagcaaggaggtactgacaggcgacggctggcggctcgccgaccttccggcggagccggacgggcgatcggtgctgatgcgggccgttccctcaggtcctgacaataccaacgagacaaatcacaagatgcttatgggcgccttttcgatggcgcgaaaacatatccggttgatgtcgccctatttcctcccggacaaggaattggtcagcgcgctcgtgacggcggcgaggaagggcgtcgaagtcgacatcgtcgtgccctctgtcaacaatctgacactcgtcgaccgcgcgatgacggcacagttcgaccaggtgctgaaaggtcattgccgcgtctggcgggcaaagggcgccttcaaccattccaagctgatggtcatcgacgatcgctgggcctatgtcggttcgaccaatctcgatccccgctccctgcgcctcaatttcgagttcgacctcgaaatactcgacgaagccttcgcacgcgcaatcggcgaaaaggtctgtgccatacgcgcggccgcggatgaagtgacccttgcagggctccgcgcgcagccgctcgtaaaccgtctggcaaaccgattgctctggctcggatcgccctacctttag

SEQ ID NO: 98805 - protein, 487 aa, Sinorhizobium meliloti 1021
MIVFIESYWPHFLALLSVVLGVPAIIHAAMTKDDVRAAAGWVGVVLLSPVIGAVIYAVAGINRMRRSSIGLQRSLLRSTERDPFGRFDVTHDQVVARFGQRFAAMKMLGDRVARFTMSAGNHITMLEGGDAVYAAMLDEISSARRSILIESYIFDRDPIGMRFADALIAAVKRGVAVRVLIDAVGARYSVPSIVGYLKEGGVPTAVFNGNIIMGLRLPYANLRTHRKIMVVDGAVAFAGGMNIRAGFAAEIAGKAASFDTHFRVTGPVVADIFQVAAEDWQFSSKEVLTGDGWRLADLPAEPDGRSVLMRAVPSGPDNTNETNHKMLMGAFSMARKHIRLMSPYFLPDKELVSALVTAARKGVEVDIVVPSVNNLTLVDRAMTAQFDQVLKGHCRVWRAKGAFNHSKLMVIDDRWAYVGSTNLDPRSLRLNFEFDLEILDEAFARAIGEKVCAIRAAADEVTLAGLRAQPLVNRLANRLLWLGSPYL

SEQ ID NO: 98806 - DNA, 1515 bp, Listeria monocytogenes EGD-e
  CDS (1)..(1515): transl_table=11
atgcgcaaactgattcaatttctgtttatagcagtagttttatttttagtggaatatgttttaatcaatcaagcagctatattattcttagtaacaagtgggattatccaactatgcggggttattatcgccattcgactactcctatttgaccaacggaatactagctcaaaagtcgcctgggttgcggttatttttattttgcctgtactcggaacgattagttaccttgtgttcggtagaaatccagcaactagaaaattcagcacagctcaagtaaaggaaaaaacaaaattaattaatgcgattcatgcaattccaaacaacactaatgaaaaattgccacgactatcaaaaagaatagcgcatttaacgtccatagagccaatcaaggggaataaaatcgaaatattaacaaatggtgaggaaacttttccagtgctcctagacgcgcttagaaaggctgaaaaccacattcacattcaatattacattttcaaaacggatgcgatttctactgaaattcgtgatattttggtggaaaaggcgaaatctggtgttgaggttagatttatgtttgatggtctcggatcaagcaaactgggtaaagcctttttagctcctttgaaagaggctggagttagtattcacgcatttgatccaattgcctccccctggattgtaagaacagccaatttaagaaatcaccgtaaaatcgtggtgattgatggccaaattggctttacaggtgggcttaatattggggaagaatatcgttccaatacacctgattttcgtgtttggcgcgatacacacataaaaataacaggccaagctgtaatcgaactccaagaatccttcctaaacgattgggtatacatggaaaatcaagctggcgccgctgacgggtttattagcgaatctggttcaaaacaatatttttctccagtcgatatgggtgatgaatgggctcaagttatttacggcggaccatatgataaagaaaaatgggttcgggattcgatgcttgatttgattgattccgctaaagaatcagtttggattgtatcaccctatttcgttccagatgaggagtcgcttgcggttattcgccgggttgcgatgagtggtgttgacgtgcgggttattattcctggtaaaggcgatcgcgggatttcattccacggaagtaatgcttatgtaaaaacaatgattgaagcaggcgcgaaaatgtatgcttatgccgatgactcttttgttcatgccaaagcaatgcttgtggacggaacacgtgcggctattggaactgccaattttgacgtgcgtagttttagattgaatcatgaattaatggtattcttatatgatgaaagcgaggctatgcatcatttaaaacgtgacttcaaaaaagattttgaagatagccgactatttacgatgaaagatatggaaaacaaaccattattgactcgtataaaagaagttctatccagtttactatcaccaattttataa

SEQ ID NO: 98807 - protein, 504 aa, Listeria monocytogenes EGD-e
MRKLIQFLFIAVVLFLVEYVLINQAAILFLVTSGIIQLCGVIIAIRLLLFDQRNTSSKVAWVAVIFILPVLGTISYLVFGRNPATRKFSTAQVKEKTKLINAIHAIPNNTNEKLPRLSKRIAHLTSIEPIKGNKIEILTNGEETFPVLLDALRKAENHIHIQYYIFKTDAISTEIRDILVEKAKSGVEVRFMFDGLGSSKLGKAFLAPLKEAGVSIHAFDPIASPWIVRTANLRNHRKIVVIDGQIGFTGGLNIGEEYRSNTPDFRVWRDTHIKITGQAVIELQESFLNDWVYMENQAGAADGFISESGSKQYFSPVDMGDEWAQVIYGGPYDKEKWVRDSMLDLIDSAKESVWIVSPYFVPDEESLAVIRRVAMSGVDVRVIIPGKGDRGISFHGSNAYVKTMIEAGAKMYAYADDSFVHAKAMLVDGTRAAIGTANFDVRSFRLNHELMVFLYDESEAMHHLKRDFKKDFEDSRLFTMKDMENKPLLTRIKEVLSSLLSPIL

SEQ ID NO: 98808 - DNA, 1515 bp, Listeria innocua Clip11262
  CDS (1)..(1515): transl_table=11
atgcgcaaactggtccaatttctgtttatagcagtagttttatttttagtggaatatgttttaatcaaccaagcagctatcttattcttaataacaagtggaatcatccaactatgcggggttattatcgcaattcggctacttctgttcgatcagcggaatactagctcaaaagtcgcttggattgccgttattttcattttgccagtgcttggaacaattagttaccttgtgtttggtagaaatccagcaactagaaaattcagtacagctcaagtgatggaaaaagctaaattaattaatgcgattcatgcaattccaaacaacaccaatgaaaaattaccaaggctttctaaaagaattgcgcatttaacgtccatagagccgattaagggaaataaaattgaaatattaacaaatggtgaggaaacttttccagtgctcctagacgcgcttagaaaggctgaaaaccatattcacattcaatattacatttttaaaacggatgcgatttctacagagattcgtgatattttggtggaaaaagcgaaatccggtgttgaggttaggtttatgtttgacggtcttggatcaagcaaactgagtaaagcctttttagctcctttgaaagaagctggagttagtattcacgcatttgacccaattgcctccccttggattgtaagaacagccaacttaagaaatcaccgtaaaattgttgtgattgacggacaaattggctttacaggtggacttaacattggggaagaatatcgctctaatacaccagattttcgtgtctggcgtgatacacacatgaaaatcacaggacaggctgttatcgaacttcaagaatcttttctaaatgattggatttatatggaaaatcaggctggggctgctgatcaatttattagtgaagctggattacaacaatatttttcaccagttgatgtaggtgatgaatgggcgcaagtgatatacggcggaccatatgataaagaaaaatgggttcgtgattcgatgcttgatttgattgattccgctaaagaatcagtttggattgtatcgccctattttgttccagatgaggaggctcttgcggttattcgccgggttgcaatgagtggtgtcgacgtacgggttattattcctggaaaaggcgatcgcgggatttcattccacggaagtaatgcttatgtaaaaacgatgattgaagcaggcgcgaaaatgtatgcttatgccgatgactcttttgttcatgcaaaagcaatgcttgtggacggaacacgtgcggctattggaactgccaattttgacgtgcgaagttttagattgaatcatgaattaatggtattcttatatgatgaaagtgaggctatgcttcatttaaaacgtgattttaagaaagattttgaagatagccgactatttacgatgaaagatatggaaaataaaccattattgactcgtataaaagaagttctatccagtttactatcaccaattttataa

SEQ ID NO: 98809 - protein, 504 aa, Listeria innocua Clip11262
MRKLVQFLFIAVVLFLVEYVLINQAAILFLITSGIIQLCGVIIAIRLLLFDQRNTSSKVAWIAVIFILPVLGTISYLVFGRNPATRKFSTAQVMEKAKLINAIHAIPNNTNEKLPRLSKRIAHLTSIEPIKGNKIEILTNGEETFPVLLDALRKAENHIHIQYYIFKTDAISTEIRDILVEKAKSGVEVRFMFDGLGSSKLSKAFLAPLKEAGVSIHAFDPIASPWIVRTANLRNHRKIVVIDGQIGFTGGLNIGEEYRSNTPDFRVWRDTHMKITGQAVIELQESFLNDWIYMENQAGAADQFISEAGLQQYFSPVDVGDEWAQVIYGGPYDKEKWVRDSMLDLIDSAKESVWIVSPYFVPDEEALAVIRRVAMSGVDVRVIIPGKGDRGISFHGSNAYVKTMIEAGAKMYAYADDSFVHAKAMLVDGTRAAIGTANFDVRSFRLNHELMVFLYDESEAMLHLKRDFKKDFEDSRLFTMKDMENKPLLTRIKEVLSSLLSPIL

SEQ ID NO: 98810 - DNA, 1443 bp, Nostoc sp. PCC 7120
  CDS (1)..(1443): transl_table=11
atgctgatagacagtagcgtccttgctttttttagcgcagctacagttgttattcatggtttgggaattgcccatgctgcccatgccgtgatggatgtgcgttcttctcgtggggcgatcgcttggagtatttccttaatcacttttccctggctgactattcctttatattggatcttaggcagaactaagtttcatggatattctgaagctatccgctcagtttacgcccaacattatcaatttgttcgtcaaacttatattgagattacaaaatttcaggtggtagtttcggcaaaattggaaccattgcaactattagctgaggccttcattggtattccttttacatctggtaataatgccaaattactaattaatggtcagcaaacttatgcagccatgttgagtgcgatcgcatctgccaatagttatattttgctgcaatcctacattgttgttgatgacaaagctgggaatgagtttaaagatgctctaattgccaaggcaaagcaaggaataagagtttacttaatttatgatgaaattggttctaataaaatctctcgcctttatgttaaatctctgcaaaaatatgatattcaagtgagtgcatttcatactaccagaggcagaggtaatcgttttcaattaaatttccgcaaccatcgcaaaattttagtagttgatgggagaactgcgtttattggtggtttgaatattagtgatgaatatctaggtaaaaatcctcgcctgagtccttggcgtgatacccacatgatgttagaaggccccactgtccaaagtctgcaaggatgttttttgcaagattggtattgggcgactcgtcaagttatcgatgtaaactggcaagtgcaacccaattgggaaagtgactacacagcattggtatttcctacaggccccgcagataagctgaaagcttgtaaactgtttttcgtcagcgctatcaatcaagcacaaactcgtctctggattgctactccctattttgtgccggatgattccactttgacagccttgaaattggcagcactacgcggcgtggatgtgcgaattattttaccaaatcgacccgatcatttacttgtgtacttgtgttccttttcttattacacagagatgaaggcaacgaatattaaattatatcgatataaacatggatttatgcaccagaaggtaatactgattgacaaagaaatggcaggtgtgggaacagttaatctagataatcgctcattctttctcaattttgaagttatgggttttgttgccaattctcagtttgtgaaaagtgtggaggagatgttacaagctgatttaaaggctgctttggctgtggatttttctgattatgagaggaaatatttgtggtttaagttagctgtgagaatatctagtttgttgaaacctttgttgtga

SEQ ID NO: 98811 - protein, 480 aa, Nostoc sp. PCC 7120
MLIDSSVLAFFSAATVVIHGLGIAHAAHAVMDVRSSRGAIAWSISLITFPWLTIPLYWILGRTKFHGYSEAIRSVYAQHYQFVRQTYIEITKFQVVVSAKLEPLQLLAEAFIGIPFTSGNNAKLLINGQQTYAAMLSAIASANSYILLQSYIVVDDKAGNEFKDALIAKAKQGIRVYLIYDEIGSNKISRLYVKSLQKYDIQVSAFHTTRGRGNRFQLNFRNHRKILVVDGRTAFIGGLNISDEYLGKNPRLSPWRDTHMMLEGPTVQSLQGCFLQDWYWATRQVIDVNWQVQPNWESDYTALVFPTGPADKLKACKLFFVSAINQAQTRLWIATPYFVPDDSTLTALKLAALRGVDVRIILPNRPDHLLVYLCSFSYYTEMKATNIKLYRYKHGFMHQKVILIDKEMAGVGTVNLDNRSFFLNFEVMGFVANSQFVKSVEEMLQADLKAALAVDFSDYERKYLWFKLAVRISSLLKPLL

SEQ ID NO: 98812 - DNA, 1470 bp, Ralstonia solanacearum GMI1000
  CDS (1)..(1470): transl_table=11
ttgtgtgcccggccgtgcttctccttcgatccctcgatgccgaccagtaccactgcatttgccgcgttcatcttcctggtgcactgcgtgggcgtgctcgccgcggggcacgccgtgctgacggtgcgcacctcgcagggcgccatcgcatgggccatctcgctcgtcacgctgcccgagttcacgctgatcccctacctgatcttcgggcgcagcacctttgccggctatgtcgatgcccggcgcttccacaatgcccgcctgcgcgagatcacgctctccgacgactggcgccgcctgcgcgaccatgagtcggccgtggtcgcgccgcagcatgcgtgcatgcaggccctgccgcggctgaccggcatgccgtgcctggcccgcaaccgggtacgcctgctggtcaacggggccgagacgttcaaggccatcttcgccgccatcaaagcggcgcggcaggtcctgttcgtgcagttcttcatcgtgcacgacgacgcgctcggccgccggctggccgaggcgctgctggagcgcgcccgcgccggggtgcgcatctacttcctgttcgaccgcatcggcagccatgccctgcccggccactacgtgcggcagctcgaagccggcggcgtgatggtgcggccgttctccacccatgccggcttcgtcaaccgcttccagctcaacttccgcaaccaccgcaagctggtggtggtggacggcgagcgcgcctacgtgggcggccacaacgtcggcaccgaatacctgggcgagcatccgccgctggcgccgtggcgcgacacccacatcgaaatcgtcggtgcggcggtgatggacctgcagctgaccttcgccgaagactggtactgggccgcgcacgaagtgccgcagctgatcgtgccgagggagcggccgggcgaggacatggtctgccaggtggtcgccagcggcccggccgatccgcaggagacgtgctcgctgttctttgtcgaggcgatccagtcggcgcgcaagcggctgtggatcaccacgccgtacttcatccccgacgaggccgtgttcgccgcgctgcggctcgcggtgctgcgcggcgtggacgtgcgcatcctgatcccggcgcggccggaccatcgcgtggtgttccacgcctccacgctgtatgcctaccaggccatccgcgccggggtgaagatctaccgctacctgccgggcttcctgcaccagaaggtggtgctgatcgacgacgaggccgccgccgtgggcagcgccaacctcgacaaccgctcgttccgcctgaacttcgagctgatggtcgtcaccgcggatcaccgcttcgccaatgacgtcgcgcagatgctggaggcggacttcgccgaagcaacgcgcatcggccgcgacgagtacgagcatgcgcacccggcgcggcgcgtggtgatgcatgtggccaagctgttcgcgccgattctgtaa

SEQ ID NO: 98813 - protein, 489 aa, Ralstonia solanacearum GMI1000
MCARPCFSFDPSMPTSTTAFAAFIFLVHCVGVLAAGHAVLTVRTSQGAIAWAISLVTLPEFTLIPYLIFGRSTFAGYVDARRFHNARLREITLSDDWRRLRDHESAVVAPQHACMQALPRLTGMPCLARNRVRLLVNGAETFKAIFAAIKAARQVLFVQFFIVHDDALGRRLAEALLERARAGVRIYFLFDRIGSHALPGHYVRQLEAGGVMVRPFSTHAGFVNRFQLNFRNHRKLVVVDGERAYVGGHNVGTEYLGEHPPLAPWRDTHIEIVGAAVMDLQLTFAEDWYWAAHEVPQLIVPRERPGEDMVCQVVASGPADPQETCSLFFVEAIQSARKRLWITTPYFIPDEAVFAALRLAVLRGVDVRILIPARPDHRVVFHASTLYAYQAIRAGVKIYRYLPGFLHQKVVLIDDEAAAVGSANLDNRSFRLNFELMVVTADHRFANDVAQMLEADFAEATRIGRDEYEHAHPARRVVMHVAKLFAPIL

SEQ ID NO: 98814 - DNA, 1479 bp, Brucella melitensis 16M
  CDS (1)..(1479): transl_table=11
ttgcttaaagtttgctggatgcttgatctcgtttcccattattggccgcacattctgtttgtcctgtcgatcgttctcggagcgattgccgccattcatgcgacgatgaccaaggaggaagtgcgcacggccattggctgggtcggcgtgatcgtgctgtcgcccatcgtgggggcggttgtctatgcgattgcgggcgtcaaccgtatccggcgttcgacactgagctatcagcgcgccaatctcagcaatatcgcgctctaccacctctcgcatttcgacacgacgaacgaccgggtgcgggccgctttcgggcggcagttcggcgcgatgaaaattctgggcgatgcggtgagcctttatgattttaccagcggcaacactattgaaatgctggaagcgggtgatgaagcctatgccgcaatgcttggcgccataggccgggccgagcgcagcattgtgctggaaacctatattttcgaccatgacgccattggtaaaaaatttgccgatgcgcttggcgatgcggtgcagcgcggcgtggaagtgcgggtgctggtggatgcggtgggcgcgcgttattcctttccaagcattgtgaagcttttgaaagaaaagggcgtcaaggtcgctgtgttcaacggcaatatcatcatcggcctgcgtctgccctatgcgaacctgcgcacccaccgcaagatgctgattgtcgatggtcagactgcctttaccggcggcatgaatattcgcgccgggtttgtgagggctatcgcaggcgatgcggttgccttcgatacacatttcaaactcgaagggcctgccattgccgacctcttccatattgcctcggaagactggcgttttgcgaccggcgagcttttgacgggcgaagcctggagcatcgcgccaccggaaaatccacccggaacgggaacgctggtgcgtgtcgtcgggtcagggccggacaagaacctcgaaacgaaccatcgcatgatgatgggggcgttttcgattgcccagcagcatattctcatcatgacgccctatcttttgccggaccgcgaattgataagtgcgctggtgacggcggcacggcgcggcgtatcggtcgatatcgtggtgccgggtgtcaacaatctgaagctggtggaccgcgccatgcgcgcccagtttgatcagcttttgcgggacggctgccgcatctggcgtgctggcggggccttcaatcactcaaagctcatgaccatcgatggcgcctggtcctatgtcggctcgtccaatatcgatccgcgctcgctgcggctcaatttcgaggtcgatcttgaaatcctcgaccgggatgtggcacggcaggtggaagagcgtatcggacgggtgatcgagaaaagccgtgaggtcaaccttgtgcgcctgaagaaccgcccttttctggagcggctgcttgacaggatcatctggctcggctcaccttttctttga

SEQ ID NO: 98815 - protein, 492 aa, Brucella melitensis 16M
MLKVCWMLDLVSHYWPHILFVLSIVLGAIAAIHATMTKEEVRTAIGWVGVIVLSPIVGAVVYAIAGVNRIRRSTLSYQRANLSNIALYHLSHFDTTNDRVRAAFGRQFGAMKILGDAVSLYDFTSGNTIEMLEAGDEAYAAMLGAIGRAERSIVLETYIFDHDAIGKKFADALGDAVQRGVEVRVLVDAVGARYSFPSIVKLLKEKGVKVAVFNGNIIIGLRLPYANLRTHRKMLIVDGQTAFTGGMNIRAGFVRAIAGDAVAFDTHFKLEGPAIADLFHIASEDWRFATGELLTGEAWSIAPPENPPGTGTLVRVVGSGPDKNLETNHRMMMGAFSIAQQHILIMTPYLLPDRELISALVTAARRGVSVDIVVPGVNNLKLVDRAMRAQFDQLLRDGCRIWRAGGAFNHSKLMTIDGAWSYVGSSNIDPRSLRLNFEVDLEILDRDVARQVEERIGRVIEKSREVNLVRLKNRPFLERLLDRIIWLGSPFL

SEQ ID NO: 98816 - DNA, 1443 bp, Clostridium perfringens str. 13
  CDS (1)..(1443): transl_table=11
attataaactatacaacaacatttttatacttggcatttataattaatgtaatcttgtctgtcataattgtggtactagaaagaaaacaaccggaaaaaacaatagcatggttactaatactaactctattgcctcctataggattaatactttatatattcttaggacgtaattggaaaagaaataaacttaatgatagggttaatcctgagattaatgagttaataaatcctattttagatgaatatcctgaaaaacaatatgtacctttaatggagcttttagcttttaacagtgattctcctatctttgttaataatgatataaagatatataaggatggtgttgaaaagtttaaagatttaaaagaggaacttcttaaggctaagcatcatattcatcttgagtactatatagtaaatagtgatgaaataggtaatgaaattaaagatatattgataaagaaagctctagaaggagttaaggttagatttattattgataaagttggttcaagcagcttaaaaagaagctacattaaagatttaaaaaaagcaggaatctcagttattatgtattcatacttcttagcaccccttcttaaagtaataaatactcaaattaactatagaaatcatagaaaaatagttgttatagatggtcaagttggttttttaggtggtattaatataggagatgaatatttaggaagaaacaaaaagtttggttattggagagatactcacataatgattaaaggtgattttgttttagcactacaagcagttttcctagatgacttcataaccatagaaaaagctaataatagttatactttttatgataaagaatttgataaatattttcctgaaaatatagttgctaaggaaagagttttaatgcagttagttaaaagcggacctgattcaacatttcctgcaataatgcaaagcgttttaaaaatgattatgactgcaagggaaaatatttatataactactccttattttgtacctccatcaagcataatagaagctcttagaatagcttctttaagcggggttgatgtaaagattatttttcctgaaaaatcagatcactttatggtaaataaggcatctaaaagttatttagccgaacttatggattgtggaattgaagtttatttttatgataaaagttcttttatacattctaaaacaatgacaatagatggaaaaatatgtactttaggaacagctaatatggacatacgtagttttgaacttaattatgaaataaatactgttatatatgataaggaaataacatgtaagttagatgccttattttttgaagatttacttaagtctagacattttaaaattgaagaatatgaaaaatcaactaagtttgataagtttatagagggatttgctagaattttctcatcattattataa

SEQ ID NO: 98817 - protein, 480 aa, Clostridium perfringens str. 13
MINYTTTFLYLAFIINVILSVIIVVLERKQPEKTIAWLLILTLLPPIGLILYIFLGRNWKRNKLNDRVNPEINELINPILDEYPEKQYVPLMELLAFNSDSPIFVNNDIKIYKDGVEKFKDLKEELLKAKHHIHLEYYIVNSDEIGNEIKDILIKKALEGVKVRFIIDKVGSSSLKRSYIKDLKKAGISVIMYSYFLAPLLKVINTQINYRNHRKIVVIDGQVGFLGGINIGDEYLGRNKKFGYWRDTHIMIKGDFVLALQAVFLDDFITIEKANNSYTFYDKEFDKYFPENIVAKERVLMQLVKSGPDSTFPAIMQSVLKMIMTARENIYITTPYFVPPSSIIEALRIASLSGVDVKIIFPEKSDHFMVNKASKSYLAELMDCGIEVYFYDKSSFIHSKTMTIDGKICTLGTANMDIRSFELNYEINTVIYDKEITCKLDALFFEDLLKSRHFKIEEYEKSTKFDKFIEGFARIFSSLL

SEQ ID NO: 98818 - DNA, 1536 bp, Clostridium perfringens str. 13
  CDS (1)..(1536): transl_table=11
atggaaaagtttctgaaaaaactactaagtagagcatttatagttggatttcttatattcatacagtttgttatacttatgggggcaatatggaaagtaagcgaagatttcatatatgtgtattttctgtttatctttattagtatagtagtatttatttatattgttagtagaaaagataatccatcctataaattagcatgggcagttcctgtattattagttcctgtctttggaggattattttatttaatatttgggggaaataagacaagcaaaaagtttagaaaacaaataaaagcttcttatgatgaaacggcacacttattatatgatgatagaacagttttagaggagctagaaaacttagataaaagcatagctaatcaatcaaggtacatagctgattactctcagtttccagtatataaaaatactacaactgagtatttatctcctggagaggtattttttgaaaggttaaaggaagagttaaaaaaggcaaagcactacatatttatggaatatttcatagtacatgaaggagttatgtggaactctattttagaaatattagaggaaaaggttaaagaaggggtagaggttagattcgtttatgatgatatgggatgcttaggaactttaccatataagtataatgaagttttagaggctaagggaattaaatgtatggtatttaatccttttgtgccccttttatccttaagaatgaataaccgtgatcatagaaaaataactgttatagatgggcatactgggtttactgggggaataaacttagctgatgaatacataaatgaaattgttagatttggacattggaaggatgcctccataatgataaagggggatgctgtttggaatttaacagttatgtttcttcaaatatggaatttctatagtgaaggaaaagagcaatatgaaaaatattacccatattttcatcatgaagatgaatttgaaagtgatggatatgttcagccctatggagatagtcctttagatgatgaaatagtaggggagaatgtatatttaaatattataaataaggcaaaggactatgtttatataaatactccataccttattattgataatgagcttgttacagcgcttactcttgctgctaaaagtggaatagatgttagaatagttactcctcacattgaggacaaatggtatgctcatatagttacaagggcctattatcctcagcttatagaatctggtgttaagatatatgaatatactccaggatttattcactcaaagacctttgtctctgatgatgaaataggaatagtaggtactataaatatggattatagaagtttataccttcactttgaatgtggagtttggttatataaaactaaatcagtaggacagataaaggatgatttcttaaaaactttagaaaaatgtcaaagaataactttagaagattgtgctaaggttaaagttcctactagaattttaagatctataataagagtatttgctccacttatgtaa

SEQ ID NO: 98819 - protein, 511 aa, Clostridium perfringens str. 13
MEKFLKKLLSRAFIVGFLIFIQFVILMGAIWKVSEDFIYVYFLFIFISIVVFIYIVSRKDNPSYKLAWAVPVLLVPVFGGLFYLIFGGNKTSKKFRKQIKASYDETAHLLYDDRTVLEELENLDKSIANQSRYIADYSQFPVYKNTTTEYLSPGEVFFERLKEELKKAKHYIFMEYFIVHEGVMWNSILEILEEKVKEGVEVRFVYDDMGCLGTLPYKYNEVLEAKGIKCMVFNPFVPLLSLRMNNRDHRKITVIDGHTGFTGGINLADEYINEIVRFGHWKDASIMIKGDAVWNLTVMFLQIWNFYSEGKEQYEKYYPYFHHEDEFESDGYVQPYGDSPLDDEIVGENVYLNIINKAKDYVYINTPYLIIDNELVTALTLAAKSGIDVRIVTPHIEDKWYAHIVTRAYYPQLIESGVKIYEYTPGFIHSKTFVSDDEIGIVGTINMDYRSLYLHFECGVWLYKTKSVGQIKDDFLKTLEKCQRITLEDCAKVKVPTRILRSIIRVFAPLM

SEQ ID NO: 98820 - DNA, 1458 bp, Clostridium perfringens str. 13
  CDS (1)..(1458): transl_table=11
atgatttttacttttttctctaatttagttcatattgtaaatttattaactattttttatatgatttttaaagagaatcgttcttctaagagtataatttcttggacattagtattaattatattaccatacataggttttattctatttttaatcttaggaagaaaagttaatactaaagatatttttataatgaaaaaatctgaacttactctctttgataaatatataaaaaaattaaaaagtgctgataattcaaatgatgatttaaaaagagccaagcattctgatatgattaaagctattgaaagtatggagtactcaccttatagaaaagatgtggaaactaaagtattttttgatggtaaggaattatttgatgatattttagaaagcttaaagaaagcacaaaaaagcataaatatagaattttacatatttaaaaatgatgatattggttcaaaagtcttagatattcttaaagaaaaagctaaatctggcgttgaagtaagattattatatgactctgtaggaagtagaactaccaatagaaaaaaacttcagtctgcaattgatgctagtgtaaaagttggtgaattcttcccttccctacttagattaataaacataaacatgaactttagaaaccatcgtaaaataatagttatagataataaagtaggctatgttggtggctttaatgtaggagatgaatatttaggtaaagatcctaagtttggttactggagagatactcatataaaattcatgggtgactcagtaagagacttagatttaagattttgggctgattggagatatgctactaaggaagatattgatttaagccacttaatagattataaaaatgaacaagccccttctacaatggctaattattcaaagtgtggtatgcaaataatatctagtggccctaaccctgataacttttatgaaatcaaattatcatatttagaaatgattcaaaaagctaaaaaatatatttatatacaatcaccatacttaattttagataacagcatatctgatagtttaaaacttgcatctatttctggagttgatgtaagaataatgatacctggtaaaggtgatcacccctttgtttattgggcaaatctaaaatacgctggagatttactaaactttggagtaaaaatatatcattatgacaaaaatgctttccttcactctaaaaccttagttatagatgatgaagtatgttcaataggaactgccaatatggatacaagaagctttgaactaaactttgaagtaattgctatgctatactcagatgaaatagcaaaaatacaacgtaaacagtttgaaaaggacatgcttatttcaaaagaattgactaggaaagactatcttaagagaggaacttctgttaaaattaaagaatcattttcaaagctcttctcagctttactttaa

SEQ ID NO: 98821 - protein, 485 aa, Clostridium perfringens str. 13
MIFTFFSNLVHIVNLLTIFYMIFKENRSSKSIISWTLVLIILPYIGFILFLILGRKVNTKDIFIMKKSELTLFDKYIKKLKSADNSNDDLKRAKHSDMIKAIESMEYSPYRKDVETKVFFDGKELFDDILESLKKAQKSINIEFYIFKNDDIGSKVLDILKEKAKSGVEVRLLYDSVGSRTTNRKKLQSAIDASVKVGEFFPSLLRLININMNFRNHRKIIVIDNKVGYVGGFNVGDEYLGKDPKFGYWRDTHIKFMGDSVRDLDLRFWADWRYATKEDIDLSHLIDYKNEQAPSTMANYSKCGMQIISSGPNPDNFYEIKLSYLEMIQKAKKYIYIQSPYLILDNSISDSLKLASISGVDVRIMIPGKGDHPFVYWANLKYAGDLLNFGVKIYHYDKNAFLHSKTLVIDDEVCSIGTANMDTRSFELNFEVIAMLYSDEIAKIQRKQFEKDMLISKELTRKDYLKRGTSVKIKESFSKLFSALL

SEQ ID NO: 98822 - DNA, 1503 bp, Corynebacterium glutamicum ATCC 13032
  CDS (1)..(1503): transl_table=11
atgatctttcagatcaacctcgaatcttggcaaaccgttggtttgatcatcgactacaccatcaaaatcatcgccattggctacgtacccgaaggacgccgacccagctcctccaccgcgtggctcctggcaattttgctgctcccctacgtcggactcccactgttcctgcttatgggatcgccatacatcaaccggcgacgccaccgcatccaacaagaaatcaacgacctcatcgaagacgtccacgacgacgtccccgacatccccaccggaatggatgtctccgcggaagttgaatctgtcatcaaactcaaccgccgcctcacccgcatgccagcagtgaccggcggaaacaacggcttctactccgactaccgtgaatccctcaaacggatgaccgccgcaatcgacgaagccgaagaatacatctacgtcgagatctacatcatggcctgggattcctacacccaaccattcttcgcagcactcgaacgagcccacaaccgcggcgtcaaagtccgactccttttcgaccacgtcggcagctggaaataccccggctaccaccgcctcaaaaaagaactcaaccgcatgggcttcgcctggtacctcatgctccccctccaaccctggcgacgccgcttccgccgacccgacctgcgcaaccaccgcaaaatgctcatcatcgacggccacaccgcattcatgggctcccaaaatctcatcgccccgagttacctacaaaagaaaaacatcaaactcggccgcgaatggaaagacctcatggtcgaactcaccggccccatcgtctcctccatggaaatgatcttcgccggcgactggtacgtcgaatccaacgaagccctcgacatccgcgaccacgcagaagcccacggctacatcggcaacactcaaaaagactccgccaccaacctcgtgcagctcatcccctccggccctggttacaccacagaacccaacctgcgcatgttcaactccatcgttcaccacgccaaagaacgactcatcttgtgcagcccctacttcatccccgacgaatccctcctcgaagccgtcacctcagcctgctaccgcggagtaaccgtcgaactattcgtctctgaacaagccgaccaattcgccatcgaccacgcccaatcctcctactaccaggcactccttgaagccggcgtgaaaatctaccaattccccaaacccgacgtcctccacaccaagtacatgatcgccgaccccgacgacaccaccggcaacgaagccctcggagtcctcggatcctccaacctcgacatccgcagctttggcctcaactacgaaatctccctgatgatcgccaaaggcaacctcatccacgaactcaacgccctcaccgaccgttaccgcacagtaagtttcaagctcaccttggataagtggaaccagcgcagttggcggcgccgctacgtggacaatgtcatgcgtttgacctcggcgctgcagtag

SEQ ID NO: 98823 - protein, 500 aa, Corynebacterium glutamicum ATCC 13032
MIFQINLESWQTVGLIIDYTIKIIAIGYVPEGRRPSSSTAWLLAILLLPYVGLPLFLLMGSPYINRRRHRIQQEINDLIEDVHDDVPDIPTGMDVSAEVESVIKLNRRLTRMPAVTGGNNGFYSDYRESLKRMTAAIDEAEEYIYVEIYIMAWDSYTQPFFAALERAHNRGVKVRLLFDHVGSWKYPGYHRLKKELNRMGFAWYLMLPLQPWRRRFRRPDLRNHRKMLIIDGHTAFMGSQNLIAPSYLQKKNIKLGREWKDLMVELTGPIVSSMEMIFAGDWYVESNEALDIRDHAEAHGYIGNTQKDSATNLVQLIPSGPGYTTEPNLRMFNSIVHHAKERLILCSPYFIPDESLLEAVTSACYRGVTVELFVSEQADQFAIDHAQSSYYQALLEAGVKIYQFPKPDVLHTKYMIADPDDTTGNEALGVLGSSNLDIRSFGLNYEISLMIAKGNLIHELNALTDRYRTVSFKLTLDKWNQRSWRRRYVDNVMRLTSALQ

SEQ ID NO: 98824 - DNA, 1440 bp, Fusobacterium nucleatum subsp. nucleatum ATCC 25586
  CDS (1)..(1440): transl_table=11
atgcaagatatttctaaaattttattaacattagtacaactttttttacagtatgtttgggtggcaaatttattttttatcattgttattattatgatagagaaaaaaaatccattgtatacaattttatggatatttttattaacgcttgtgccttatgttggattttttatttatttattctttggtttaacttttaagaaaaaaagagttgcaaataaaatttataaaataaaaaaattaaaaagtagaaaagatgtttctaaatctgataatgaagaattaaaaagatggaagggacttataacttatcttgaaatgagtactgataaccatatttcttctaataatgatattcaagtttattttactggtgaagatttttttcctgaattaaaaaaagaaatagctaatgcaaaaaaatttataaatatggagtactttatttttcaatttgatggtataggaaaagaaatagcagatttattaattgaaaaagctaaggaaggagtagaagtaaatttaataatagatggagttaatttggccaattttagattaaaacaatattttaagaatactggagttaatttacatctattttttagaacatatattccaatatttaatatcagattaaattatagaaaccatagaaaagttacaataatagataatagaattgcctttgttggtggaatgaatataggagatgaatatttaggtaaaggaaaaatcggttattggagagatacttcagtaaaaatttatggagatatagtttcatcttttgaaaaagaattttatttttcattaagtatagtaaaaaatgaatttttaaaagatgagaaattttcaaatgaaatttccttaaaatatgaagaagatgaaggtatttatatgcaacttataagttcgggacctaattatgaatttccagctataagagataattatataaaacttattcaagaagctagaaaatctgtatttattcaaacaccttattttgttcctgatgatttattattagatacattgaaatcagctgttttatcaggtatagatgttaaaattatgatacctaataaagctgatcacccatttatttattgggttaatcaatattatgtttgggaacttttaagattaggggcgaatatttatagatatgaaaatggttttatacattctaagactatattagttgatgaagaagtagtttcagttggaacttgtaattttgattatagaagtttttatctaaactttgaaattaatttaaatatctataataaagaagttgctaattcttttaaagcacaatactacaaagatattacaatatccaaaaaattaacatttgctgattttaaaaagagaagtatttttacaaaagtgaaagaatcagtatttagattactatcacctataatgtag

SEQ ID NO: 98825 - protein, 479 aa, Fusobacterium nucleatum subsp. nucleatum ATCC 25586
MQDISKILLTLVQLFLQYVWVANLFFIIVIIMIEKKNPLYTILWIFLLTLVPYVGFFIYLFFGLTFKKKRVANKIYKIKKLKSRKDVSKSDNEELKRWKGLITYLEMSTDNHISSNNDIQVYFTGEDFFPELKKEIANAKKFINMEYFIFQFDGIGKEIADLLIEKAKEGVEVNLIIDGVNLANFRLKQYFKNTGVNLHLFFRTYIPIFNIRLNYRNHRKVTIIDNRIAFVGGMNIGDEYLGKGKIGYWRDTSVKIYGDIVSSFEKEFYFSLSIVKNEFLKDEKFSNEISLKYEEDEGIYMQLISSGPNYEFPAIRDNYIKLIQEARKSVFIQTPYFVPDDLLLDTLKSAVLSGIDVKIMIPNKADHPFIYWVNQYYVWELLRLGANIYRYENGFIHSKTILVDEEVVSVGTCNFDYRSFYLNFEINLNIYNKEVANSFKAQYYKDITISKKLTFADFKKRSIFTKVKESVFRLLSPIM

SEQ ID NO: 98826 - DNA, 1461 bp, Xanthomonas campestris pv. campestris str. ATCC 33913
  CDS (1)..(1461): transl_table=11
atgctcgcacttgcacagggcgcgtgggattggctggccgacattccccacctcaaagcgctcctcttcgccgcctacgtgctgtatctgctgtggatcgtcagctggatcatcctgcagaagcgcgagccggtggccacgctgagctgggtgctgtcgctggccgcgctgccgtatctgggcctgctgatctactactggctgggcccgcaaaaggtcaaacgccagcgtctacgccgcgggcggtcgcgttcgggtatggaaagctacagcagcgtgtgtccgcccgatgccgattgcaccgagctggccaagatcgcccaatccaccaccggcctggccccaagcagcgcgacagaagccttgtggctggtggatggcgcgtccacctatgcggcgatcatcgaggcgatcacacaggcgcgcgaccacatccacctggagtactacattttccagcccgaccgcagcggcatgccgatctgcgaggccttgatggaacgcgcgcgggcgggggtcaaggtgcggctgttgatggatgcagtcggttcctcggcgatgacccggcgcaccctgcgcacgctgcgtgcggccggcgtggagaccgcctggttccatcccacccagctgctcaagccgttcaagcggccgtggttgaacctgcgtacgcaccgcaagttgatcgtcatcgacggccgcatcgcgttcaccggcggcatcaatgtcaccgacgaagagaacgaacaggttcgccccgacgcgtttcgcgacctgcatgtgcgtctgcagggccacgtggtgcgcagcctgcagctggtgttcctggaggactggctctacgccacccgccaggcccagggcgccttccatggccaacaactgtggccggaggatgtgcccacccgcaagcagggcagcatcgatgcgcaggtgctggtgtccggccccgattcgtcctgggaagcgatccaccggctgatggtggccgccatccacgaagccaggcatcgggtctggctggtcacgccgtacttcgtgccgggcgaggccgcgcgcatggcgctcacctctgcggcgctgggcgggctggacgtgcgcctgctgatcccgcgcgtcagcgattcgcgcctggtcacctatgccgcgcgctcgtatttcgatgaactgctggaggccggcgtgcgtatctacgagtacggcccgcgcatgttgcacaccaaggcgctgatcgccgacgacgatgtctgcatcgtcggtagcgccaatttcgacagccgcagcttccggctgaacttcgagctgtcgatgctgttccgcgaccaggcagtagccgccgagctcgccggcatgatcggcaccgacatggcccaggcacaggaagtgcgcttcaacctgcgccggccgttctggcgatcgcgcctgccggaagccttcgcgcggctgctatcgccgctgctctga

SEQ ID NO: 98827 - protein, 486 aa, Xanthomonas campestris pv. campestris str. ATCC 33913
MLALAQGAWDWLADIPHLKALLFAAYVLYLLWIVSWIILQKREPVATLSWVLSLAALPYLGLLIYYWLGPQKVKRQRLRRGRSRSGMESYSSVCPPDADCTELAKIAQSTTGLAPSSATEALWLVDGASTYAAIIEAITQARDHIHLEYYIFQPDRSGMPICEALMERARAGVKVRLLMDAVGSSAMTRRTLRTLRAAGVETAWFHPTQLLKPFKRPWLNLRTHRKLIVIDGRIAFTGGINVTDEENEQVRPDAFRDLHVRLQGHVVRSLQLVFLEDWLYATRQAQGAFHGQQLWPEDVPTRKQGSIDAQVLVSGPDSSWEAIHRLMVAAIHEARHRVWLVTPYFVPGEAARMALTSAALGGLDVRLLIPRVSDSRLVTYAARSYFDELLEAGVRIYEYGPRMLHTKALIADDDVCIVGSANFDSRSFRLNFELSMLFRDQAVAAELAGMIGTDMAQAQEVRFNLRRPFWRSRLPEAFARLLSPLL

SEQ ID NO: 98828 - DNA, 1563 bp, Xanthomonas campestris pv. campestris str. ATCC 33913
  CDS (1)..(1563): transl_table=11
gtgaccaaacgcaagatcttcaagtgggcgggcatcggcgtgctggtgctggcgctgggcagcgtgctgtcgctgtatggctacggccgctttgccgatcgcgagcgcggccctgccagccatgccttgccggtggcggcgcaggcaacgccaatcgaccaggtcgtcgctccgttgcagcaggcgcatgccggcaagaccggcatggtgatcctgtccgacaacatcgatgcgtttgcggtgcgcgcgttgaccgcgcgtgcggccggccgcagcctggatctgcagtactacatctggcatgccgacttcaccggcaacctgttgcacaacgaattgctgcgtgcggccgaccgtggcgtgcgcgtgcgcctgttgctggacgacatgaacatccatggcagcgactcggtgctggccgcgttggacagccatccgctgatcgagatccgcctgttcaaccccacccgtgcacgcgagggcacgctgatgcgcggcgtggaaatggtgctgcgcatgttcagcatcaaccgacgcatgcacaacaaggcgtggattgccgatggccgcatcgcggtggtgggtgggcgcaatgtgggcgacgaatatttcgacgccgcgcgcgacaccaacttcatggacatggacgcggccttgatcggcccgacggtgcgtcagtccgaacaggtgttcgatgcctactggaacagccccaatgcattgccgctggcggcgctggtcaccgccaagccgcaggcgctggagcaactgcgcggcagcctggacgccgggatggcgtcggtgggcgcgcacccgtacgtggagcgcctgcgccaatcgccaagcgtgcatgccttgatgcagggcaatcgcccggtgcattgggtgcagcaggcgcgcatcgtggccgacccgccggagaaggccgaaggtgcgccaccgcaaccggactggatgacgccgatcctgatcggcgagatggccaacgcacgccgcgaactgaaattgatctcaccttatttcgtgcccggcgacgacggcatgcgctggatcggtggcctgcgcaagcgcgatgtacgcgtcagcgtattgaccaattcactggccgccaacgatgtcgtggccgtgcacagcggctatgcggactaccgcattccgctgctgcaacaaggcgtgcgcctgcacgagctcaagccgatggggcgcccggatggcagcctgttcggttccagtggtgcgagcctgcataccaaggccttcgtggtggacgacagcgccggtttcatcggttcgttcaacctggacccgcgggcgatgaatctcaacaccgagatgggcctgctattcgaagaccgcaccgtgaccgcggagctggagcggctatacaaccacaaggtgagcgcgccggtgagctaccgggtgacgttggagcagggcggattgcgctggcacgacgatgccgcgcagccaccggcggtgtggacgcgcgaaccggccgccagtgtgtggcgtcgcggcgcggccaaggtgttgggctggttgccgctggattcgcagttgtaa

SEQ ID NO: 98829 - protein, 520 aa, Xanthomonas campestris pv. campestris str. ATCC 33913
MTKRKIFKWAGIGVLVLALGSVLSLYGYGRFADRERGPASHALPVAAQATPIDQVVAPLQQAHAGKTGMVILSDNIDAFAVRALTARAAGRSLDLQYYIWHADFTGNLLHNELLRAADRGVRVRLLLDDMNIHGSDSVLAALDSHPLIEIRLFNPTRAREGTLMRGVEMVLRMFSINRRMHNKAWIADGRIAVVGGRNVGDEYFDAARDTNFMDMDAALIGPTVRQSEQVFDAYWNSPNALPLAALVTAKPQALEQLRGSLDAGMASVGAHPYVERLRQSPSVHALMQGNRPVHWVQQARIVADPPEKAEGAPPQPDWMTPILIGEMANARRELKLISPYFVPGDDGMRWIGGLRKRDVRVSVLTNSLAANDVVAVHSGYADYRIPLLQQGVRLHELKPMGRPDGSLFGSSGASLHTKAFVVDDSAGFIGSFNLDPRAMNLNTEMGLLFEDRTVTAELERLYNHKVSAPVSYRVTLEQGGLRWHDDAAQPPAVWTREPAASVWRRGAAKVLGWLPLDSQL

SEQ ID NO: 98830 - DNA, 1425 bp, Xanthomonas campestris pv. campestris str. ATCC 33913
  CDS (1)..(1425): transl_table=11
atgccgatgctgcctgactggttgcaagggacctggctgctggcgctggactgggcgatccgcctggccgcgctgctgtggatccccacccgcaccacgcctggggcggcgcgcagctggttgctgctgatcggcttcgtgccggtggtgggcctgccgctgtacctgttgttcggccacccgtggctatcgcggcagcgcgtacaacgccaggccacggcctcgcaggtgatccgtgagcagcagctgccattgcacgccttgcgctggaccccgcagccggacaccagcagcgccgaggtggtgccgttgatcgagcggcagggcgatttcatgcccacgctgggcaatgcggtggaactgttggacgactacgaggcctcgctgcaggcgttgattaccgcgatcgaccaggcgcaggaacgtgtgcatctgctgtattacctgatgttcgacgatgcggtgggcgaggcggtggtggctgcgctggaacgcgcctgcgcacgcggcgtgcgctgccgcttgctgctggatgccatgggcgccaagcgtggcctgcgccgttatcgccagcgcctgcaggccagtggcgtggaggtgctggccttgctgcccggcgggctgcgctggcgccgcagcgggcgcatggacctgcgcaaccaccgcaagattgcggtgatcgacaaccaggtcggctttgtcggctcgcagaacctggccgcacccggcttcatcgccggcgcgcccaatcgcgaactggtcgcgcgcgtacgcgggccggtggtcaaccacctggaagcggtgttcgccagcgactggttcaccgaaaccgggcagcgcctggacgtgtggccggacgcaccggtgtacgacgacaacatcgccacccagttgctgcccagcgggccggcgtatccgttcgagaacgcgcgcgatgcaatcaacgcagtgatccatctggcgcgccgcaaggtggtgctggtcacgccgtatttcgtgccggacgaagccatgctcagtgcgctgcgcattgccgggatgtctggcgtggacgtgcagttgatcctgtccgaacacaacaaccagcggctggcggcgtgggcgcaggaggcctatttcgaagagttgctgcgctgtggagtgaagattgcgctgtaccggccgcactttctgcatgccaagcatctgagcgtggatgaagacattgcgttggtgggctcgatcaacctggacatccgctcgttcgcgctcaatgccgagatcggcatgctctgctacgaccgcaacgtggtgctacgcctgcgcgagatcgagcaggattacctggcgcagtcgcagccggtggacatcgcgcagtggcgccgccgcccggcctggcggcgaagccgcgaaggcatcgcacgcctggcggatgcattgatgtag

SEQ ID NO: 98831 - protein, 474 aa, Xanthomonas campestris pv. campestris str. ATCC 33913
MPMLPDWLQGTWLLALDWAIRLAALLWIPTRTTPGAARSWLLLIGFVPVVGLPLYLLFGHPWLSRQRVQRQATASQVIREQQLPLHALRWTPQPDTSSAEVVPLIERQGDFMPTLGNAVELLDDYEASLQALITAIDQAQERVHLLYYLMFDDAVGEAVVAALERACARGVRCRLLLDAMGAKRGLRRYRQRLQASGVEVLALLPGGLRWRRSGRMDLRNHRKIAVIDNQVGFVGSQNLAAPGFIAGAPNRELVARVRGPVVNHLEAVFASDWFTETGQRLDVWPDAPVYDDNIATQLLPSGPAYPFENARDAINAVIHLARRKVVLVTPYFVPDEAMLSALRIAGMSGVDVQLILSEHNNQRLAAWAQEAYFEELLRCGVKIALYRPHFLHAKHLSVDEDIALVGSINLDIRSFALNAEIGMLCYDRNVVLRLREIEQDYLAQSQPVDIAQWRRRPAWRRSREGIARLADALM

SEQ ID NO: 98832 - DNA, 1461 bp, Xanthomonas axonopodis pv. citri str. 306
  CDS (1)..(1461): transl_table=11
atgctcgcacttgcacagggcgcgtgggagtggctggccaccattccccacctcgaagcgctcctcctcgccgcctatgtgctgtacctgctatggatcgccggctggatcgtgctgcagaagcgcgaaccggtggccacgctgagctgggtgttgtcgctggcggcgctgccgtacctggggctgctgatctactactggctcgggccgcaaaaggtcaaacggcagcggctgcggcgcgggcgctcgcgctcgggcatggagagctacagcagcgtctgcccgccggatgccgattgcaccgagctggccaagatcgcccagtccaccaccgggctagcgcccagcagcgccaccgaagtgcactggctggtggatggcgctgccacgtacgccgccatcatcgaagcgatccggggcgcacgcgaccatatccatctggagtactacatcttccagcccgaccacagcggcaccgcgatctgcgctgcgctgatggaacgtgcccgtgccggggtcaaggtgcggctgctgatggatgcgatcggctcatcggcaatgacccgacgcgccttgcgcacgctgcgcgaggccggggtggaaaccgcctggttccacccctcgcagttgctcaagccattcaagcggccgtggttgaacctgcgcacccaccgcaaggtgatcgtcatcgatggccgcatcggtttcaccggtggcatcaacgtcaccgacgacgagaacgagcaggtgcgcaagcaggcgtatcgcgatctgcacgtgcgcctgcaaggccatgtagtgcgcagtctgcagctggtgttcctggaggattggctctatgccaccagccagggccgcgcagctttccacggccagcagctatggcccgacgatatgcccacccgcgcgcaaggcacggtcgatgcgcaggtgctggtgtcgggtccggattcgtcgtgggaagcgatccaccgtctgatggtcgccgccatccatgaagccaagcaccgcgtgtggctggtgactccatacttcgtgcccggcgaggcggcgcgtatggcgctgacctcggccgcgctcggcgggctggacgtgcgcctgttggtgccgcgggtcagcgattcgcgcctggtcacctacgcggcacgctcgtatttcgacgagctgctggaagccggtgtccgcatctacgagtacgggccgcgcatgctgcacaccaaggcgctgctggccgacgacgatgtctgcatcgtcggcagcgccaatttcgacagccgcagcttccggctgaatttcgagctgtcgatgctgttccgcgaccaggccgtggcggcagagatggccgggctgatcggcaccgatctgcaacaggcgcaggaagtgcaattcgcgcgacaccggccgttatggcgctcgcgcctgcccgaagcgtttgcccggctgctgtcgccgctgctctga

SEQ ID NO: 98833 - protein, 486 aa, Xanthomonas axonopodis pv. citri str. 306
MLALAQGAWEWLATIPHLEALLLAAYVLYLLWIAGWIVLQKREPVATLSWVLSLAALPYLGLLIYYWLGPQKVKRQRLRRGRSRSGMESYSSVCPPDADCTELAKIAQSTTGLAPSSATEVHWLVDGAATYAAIIEAIRGARDHIHLEYYIFQPDHSGTAICAALMERARAGVKVRLLMDAIGSSAMTRRALRTLREAGVETAWFHPSQLLKPFKRPWLNLRTHRKVIVIDGRIGFTGGINVTDDENEQVRKQAYRDLHVRLQGHVVRSLQLVFLEDWLYATSQGRAAFHGQQLWPDDMPTRAQGTVDAQVLVSGPDSSWEAIHRLMVAAIHEAKHRVWLVTPYFVPGEAARMALTSAALGGLDVRLLVPRVSDSRLVTYAARSYFDELLEAGVRIYEYGPRMLHTKALLADDDVCIVGSANFDSRSFRLNFELSMLFRDQAVAAEMAGLIGTDLQQAQEVQFARHRPLWRSRLPEAFARLLSPLL

SEQ ID NO: 98834 - DNA, 1563 bp, Xanthomonas axonopodis pv. citri str. 306
  CDS (1)..(1563): transl_table=11
gtgacaaagcggaaatttttcaaatggttcggcattgcgctgctggtgctggtgctggccagcgcgttatcgctgtacggctacgggcgctttgccgaccgccaacgcgggccggtcagtcatgtgctgcctgccacggcggtcgcgacgcccatcgacaaggtggtggcgccattgcaacaggcgcatgccgatcagaccggcatggtgatcctgccggacaacgtcgatgcatttgcggtacgtgcgctcaccgcgcgtgcggccgggcgcagcctggatctgcagtactacatctggcacgccgatttcaccggcaacctgctgcacaacgagttgctgcgcgcggccgatcgcggcgtacgcgtgcgattgctgctggacgacatgaatatccatggcagcgattcggtgctggccgccctggatagccatccgctgatcgagattcgcctgttcaacccgacccgcgcgcgcgaaggcaccttgatgcgcggcgtggagatggtgctgcgcatgttcagcatcaaccgccgcatgcacaacaaggcctggattgccgatggccgcatcgcggtggtgggtgggcgcaacgtgggcgacgaatatttcgatgcggcgcgcgacaccaatttcatggatatggatgcggcgctgatggggccggcggtgggccaggccgagcaggtattcgatgcgtactggaatagccccaatgccttgccgctgtctgcgctggtcaccgcaaaaccgcaggcactggaggccttgcgtggcagcctggacgccggcatggcatcggtgcgcgcgcatccgtatgtggagcggctcaagcgctccccaagcgtgcgcgaactgatgcagggcgaccgcccggtgcactgggtgtcgcaggcgcgcatcgtttccgacccgccggaaaaagccgaaggtgcgccgccgcaagccgattggatgacgccagtgctgatcggcgaaatggcgcacgcacagcgcgaactgaaagtgatttcgccgtatttcgtgccgggcgacgagggcatgcgctggatcggccatctgcgccagcgcaacgtgcgcgtgagcattctgaccaattcgctggcagccaacgacgtggtggcagtgcacagcggctacgccggctatcgcgtgccgcttctgcagctgggcgtgcgcctgcatgagctcaagccgatgggcaagccggacggcagcctgttcggttccagcggtgccagcttgcataccaaggcgtttgtcgtggacgacagcagcggtttcatcggctcgttcaacctggacccgcgttcgatgaacctcaataccgaaatgggcctgttgttcaacgaccgtgtggtcaccgcggagctggagcggctgtacaaccacaaggtcagtgcgccagtgagttaccgcgtcaccctggaccggggcgaactgcgttggcacgacgatgccgcgcagccgcccgaggtgtggtcgcgcgagccggccgcgagcgtgtggcgacgtggtgcagcagcggtgatgggctggttgccgctggagtcgcagctgtag

SEQ ID NO: 98835 - protein, 520 aa, Xanthomonas axonopodis pv. citri str. 306
MTKRKFFKWFGIALLVLVLASALSLYGYGRFADRQRGPVSHVLPATAVATPIDKVVAPLQQAHADQTGMVILPDNVDAFAVRALTARAAGRSLDLQYYIWHADFTGNLLHNELLRAADRGVRVRLLLDDMNIHGSDSVLAALDSHPLIEIRLFNPTRAREGTLMRGVEMVLRMFSINRRMHNKAWIADGRIAVVGGRNVGDEYFDAARDTNFMDMDAALMGPAVGQAEQVFDAYWNSPNALPLSALVTAKPQALEALRGSLDAGMASVRAHPYVERLKRSPSVRELMQGDRPVHWVSQARIVSDPPEKAEGAPPQADWMTPVLIGEMAHAQRELKVISPYFVPGDEGMRWIGHLRQRNVRVSILTNSLAANDVVAVHSGYAGYRVPLLQLGVRLHELKPMGKPDGSLFGSSGASLHTKAFVVDDSSGFIGSFNLDPRSMNLNTEMGLLFNDRVVTAELERLYNHKVSAPVSYRVTLDRGELRWHDDAAQPPEVWSREPAASVWRRGAAAVMGWLPLESQL

SEQ ID NO: 98836 - DNA, 1416 bp, Xanthomonas axonopodis pv. citri str. 306
  CDS (1)..(1416): transl_table=11
ttgcccgattgggtcacaggcacttggctgctggcactggactgggcgatccgcctggccgcactgctctggattcccgcccgcaccacgccgggtgcggcgcgcagctggctgctgctgatcggcttcgtaccggtggtcggcctgccgctgtatctgttgttcggccacccgtggttgtcgcggctgcgggtggagcgccaagccactgcctcgcaggtgattcgcgaacaacaactgcccttgcatgcgttgcgctggatgccccaggcagacaccagcagtgccgaagtggtgccgctgatcgaacgcgaaggcgatttcatgcccacgctgggcaacgcggtggaattgctcgacgactatgcgcagtcgttgcaggccctgatcgcggcgatcgacgcggccgacaaacgtgtgcacttgctgtactacctgatgttcgacgatgcggtgggcgaggcggtggtcgtggcgctggaacgcgccagcgcgcgcggcgtgcgttgtcgcgtgctgctggatgcggtgggcgccaagcgcggcctgcgtcgctaccgcaagcgcctgcaggacggtggcgtgcaggtgttggcggtattgccgggcggcctgcgctggcgtcgcagcggccgcatggatctgcgcaaccatcgcaagattgcggtgctcgacaaccgggtggcgtttgtcggttcgcagaatctggccgaggccggcttcattgatggcgtgcccaatcgcgaactggtggcacgcgtgcgcgggccggtggtcaatcatctggaagcggtcttcgccagcgactggttcaccgaaaccggagagcggctggacgtgtggcccgatgcaccggtgtgcgaggccaatatcgccacgcaattgctgcccagcgggccggcgtatccgttcgaaaatgcgcgcgatgcgatcaatgcggtgatccatctggcgcggcgcaaggtggtgctggtcacgccgtacttcgtgcccgacgaagccttgctgagcgcattgcgcatcgccccagtctcgggagtggatgtgcagttgatcctgtccgagcacaacaaccaacgcttggccgcgtgggcgcaggaggcctatttcgaagagctgctgcgttgcggggtgaagattgcgctgtatcgcccgcactttctgcatgccaagcacctgagcatggatgaagacatcgcgctggtgggctcgatcaatctggacatccgctcgttcgcgctcaacgccgagatcggcatgctctgctacgacactggcgtggtgcagcggttgcgcgagatcgagcaggactatctggccaacgcgcggcaactgacgttggaacagtggcgccgccgcccggcctggcgccgcagtcgcgagggcattgcgcggctggccgatgcgttgatgtag

SEQ ID NO: 98837 - protein, 471 aa, Xanthomonas axonopodis pv. citri str. 306
MPDWVTGTWLLALDWAIRLAALLWIPARTTPGAARSWLLLIGFVPVVGLPLYLLFGHPWLSRLRVERQATASQVIREQQLPLHALRWMPQADTSSAEVVPLIEREGDFMPTLGNAVELLDDYAQSLQALIAAIDAADKRVHLLYYLMFDDAVGEAVVVALERASARGVRCRVLLDAVGAKRGLRRYRKRLQDGGVQVLAVLPGGLRWRRSGRMDLRNHRKIAVLDNRVAFVGSQNLAEAGFIDGVPNRELVARVRGPVVNHLEAVFASDWFTETGERLDVWPDAPVCEANIATQLLPSGPAYPFENARDAINAVIHLARRKVVLVTPYFVPDEALLSALRIAPVSGVDVQLILSEHNNQRLAAWAQEAYFEELLRCGVKIALYRPHFLHAKHLSMDEDIALVGSINLDIRSFALNAEIGMLCYDTGVVQRLREIEQDYLANARQLTLEQWRRRPAWRRSREGIARLADALM

SEQ ID NO: 98838 - DNA, 1224 bp, Xanthomonas axonopodis pv. citri str. 306
  CDS (1)..(1224): transl_table=11
gtggggctgctgctgctcaacttcgccacgccggagaaaaagctcgagcacatccccaaacacctctacgacgttgccgatccgcaattcaaacgcgagatgtcggtgttgctggggccggccatcctgcccggcaacaggatcgacgtgctcaataacggccgcgagatctttccggccatgctggaggccatccgcagcgcgcagcacaccatcacgttcgaaacctatatctattggtcgggcgagatcggccgagaattcagcgacgccttgtccgagcgcgcgcgcgccggggtggatgtgcgggtcaccatcgactggggcggcagcctgaagatggaccatgcactggtagacaccatgaccgaggccggcgtggacgtgcaccgctaccgcccgctggcctggtacaacctgcaccgcatcaacaaccgcacgcaccgcaagctgctggtgatcgacggccgtatcggcttcaccggcggcgtgggcgtggccgaccagtggatgggcgacgcgcaggatccggaccattggcgcgacacccactaccgcatcgaaggcccggtggtggcgcaggtgcagaccgccttcaacgacaactggatcaagaccaccggccgcgtggtcaatggcgcccggtactacccggcgctggaggcggtcggcgacagcgatgcgcagttgttcgtggcctcgccggccggcggcagcgaaagcatgcacctgatgtatctgatcgccatcgccgccgcatgcagcaccatcgacctggccgcggcgtatttcgtgcccgatgcgctgatcacccgcgcgctgctggaagcgcgcagtcgcggcgtcagcatccgcgtgctgctgcccggcaagcacatcgatgcggtgtcggtgcggctggcctccaaggccagctgggagccactgctgcaggccggcatcgagatccacgaataccagcccaccatgctgcataccaaactgctgatcatcgacggcctgttggtctcggtaggctccaccaatttcgacatccgctcgttccgcctcaacgacgaggccagcctgaatgtctacgaccgcacgctggctgcacgcatgaccgaggtgttcgagcgcgatctgcaacgcgccgagcagtattcgctggagcgctggcgcgcgcggccgttgcggcagaagcttggcgagaaactggtgttcccgttccgctcgcaggtgtga

SEQ ID NO: 98839 - protein, 407 aa, Xanthomonas axonopodis pv. citri str. 306
MGLLLLNFATPEKKLEHIPKHLYDVADPQFKREMSVLLGPAILPGNRIDVLNNGREIFPAMLEAIRSAQHTITFETYIYWSGEIGREFSDALSERARAGVDVRVTIDWGGSLKMDHALVDTMTEAGVDVHRYRPLAWYNLHRINNRTHRKLLVIDGRIGFTGGVGVADQWMGDAQDPDHWRDTHYRIEGPVVAQVQTAFNDNWIKTTGRVVNGARYYPALEAVGDSDAQLFVASPAGGSESMHLMYLIAIAAACSTIDLAAAYFVPDALITRALLEARSRGVSIRVLLPGKHIDAVSVRLASKASWEPLLQAGIEIHEYQPTMLHTKLLIIDGLLVSVGSTNFDIRSFRLNDEASLNVYDRTLAARMTEVFERDLQRAEQYSLERWRARPLRQKLGEKLVFPFRSQV

SEQ ID NO: 98840 - DNA, 1518 bp, Staphylococcus aureus subsp. aureus MW2
  CDS (1)..(1518): transl_table=11
atgttttttgtgcctttctttataggagaaaagactatgcgatatacattttcaaatgatttaggaacactttttaccattattttagccattggattcatcattaatttagtattggcttttattattatctttttagaaagaaatagacgtacagcgagttcaacttgggcatggctatttgtactttttgtcttaccattgattggttttattctttacttgttttttggtagaaccgtttcggcacgtaaattgaataaaaacaatggtaaggtgttaacggatttcgatggacttttaaaacaacaaatagaaagctttgataaaggtaattatggtactgataacaaacaagttcaaaaacatcatgatttagtacgtatgcttttgatggatcaagatggttttttaactgaaaataataaagttgatcatttcattgatggaaatgatttatatgatcaagttttacaagatattaaaaatgctaaagaatacatccatttagagtattatacattcgctctagatggcttgggccaaagaattttaaaagcgttagaagagaaattgaaacaaggtctagaagtgaaaattttatatgatgacgttggttcaaagaaagttaagatggctaattttgatcattttaaatcgttaggtggagaagttgaagcattttttgcttctaaattaccgttattgaatttcagaatgaataacagaaatcatagaaaaatcatcgtaatcgatggtcaactaggttatgtcggaggatttaacattggtgatgaatatctaggattaggtaaactagggtattggagagatacgcatttacgtatacaaggggatgcggttgatgcactgcagttgcgatttattttagactggaattcgcaagcgcaccgtccacagtttgaatatgatgttaagtatttccctaaaaagaacggaccattgggcaattcaccaattcaaatagctgcaagtggtccggctagtgactggcatcaaattgaatatggttatacaaaaatgattatgagcgctaagaagtcggtatatttgcaatcgccttatttcattccggataactcatatataaatgccattaaaattgcagctaaatcaggggtagatgttcatctaatgattccatgtaagccagatcatcctttagtttattgggcgacatattcaaatgcttcagatttactatctagtggcgtaaaaatttacacgtatgaaaatggatttatacattctaaaatgtgtttaatagatgatgaaatggtttcagtcggaactgctaatatggactttagaagttttgaattgaatttcgaagtcaatgcttttgtatatgatgaaaagcttgctaaagatttaagggtggcttatgaacatgatattacaaaatcaaaacaactaaccaaagaatcatatgccaatagaccgctgtctgttaagtttaaagaatcgttagctaaattagtttcgccaattttataa

SEQ ID NO: 98841 - protein, 505 aa, Staphylococcus aureus subsp. aureus MW2
MFFVPFFIGEKTMRYTFSNDLGTLFTIILAIGFIINLVLAFIIIFLERNRRTASSTWAWLFVLFVLPLIGFILYLFFGRTVSARKLNKNNGKVLTDFDGLLKQQIESFDKGNYGTDNKQVQKHHDLVRMLLMDQDGFLTENNKVDHFIDGNDLYDQVLQDIKNAKEYIHLEYYTFALDGLGQRILKALEEKLKQGLEVKILYDDVGSKKVKMANFDHFKSLGGEVEAFFASKLPLLNFRMNNRNHRKIIVIDGQLGYVGGFNIGDEYLGLGKLGYWRDTHLRIQGDAVDALQLRFILDWNSQAHRPQFEYDVKYFPKKNGPLGNSPIQIAASGPASDWHQIEYGYTKMIMSAKKSVYLQSPYFIPDNSYINAIKIAAKSGVDVHLMIPCKPDHPLVYWATYSNASDLLSSGVKIYTYENGFIHSKMCLIDDEMVSVGTANMDFRSFELNFEVNAFVYDEKLAKDLRVAYEHDITKSKQLTKESYANRPLSVKFKESLAKLVSPIL

SEQ ID NO: 98842 - DNA, 1482 bp, Yersinia pestis KIM
  CDS (1)..(1482): transl_table=11
gtgaacaggatttacgcccttatgacgacattttataccgtaatcagttggctttccgtttttggctactggttactcattgccggggtaacattgcgtattctgatgaaacgcagggccgttccttctgctatggcttggttactgattatctacattctgccattggtggggataattgcttacctttcattcggtgaattgcatttgggtaagcggcgtgctgaacgagctaaagccatgtggccatcgaccgctcgctggctgagtgaactcaaggaatgccaacatatctttgctaactctaatagcgaagttgccagcccactgtttcaattatgtgaacggcgtcaaggaataaacggtgttaaaggaaatcaactacaactattaacaacaaccgatgacacactaaaagcgctagtacgagatattgaactcgcccgccacaatatagaaatggtgttttatatttggcaacctggtggtctggtcgatcaggtggctgaatcgttgatggctgcggctcgacgcggcgttcattgccggctgttactcgattcagcgggtagcaagcaatttttccgcagcccttatcccgcaatgatgcgtaatgcaggtattgaggtggttgaggcacttaaagttaatgtatttcgtatgttcttgcgccgaatggatctgcgccaacatcggaaaattgtgttaatcgacaactatgttgcttataccggcagtatgaacatggtagatccccggttcttcaaacaagatgccggggttggtcagtggattgatatgatggcgcgcatggaaggcccggtagccacaaccctaggtattgtttatgcctgtgactgggaaattgaaacaggcaaacgtattttacccccgccccccgacgcgaatattatgccattcgaagaagagactggtcatacgattcaagtcatcgcttctggccctggtttcccagaagaaatgatccaccaggcattattaacagctgtgtatgccgcacgtgaacagttaattatgactacgccatattttgtccccagtgatgacttattacatgccatctgtaccgcggcacaacgcggggttgatgtcagtattattgtcccgcgtgagaatgattcgatgatggttcgctgggccagccgagcattcttcaccgaattgctgaatgcaggcgttaaaatttatcagtttgaaggcggcctattacacagtaaaagtgttctggtcgatggacagctaagtttagtcggcactgttaatctggatatgcgcagtttgtggctgaattttgaaatcacactggtgattgatgatgatggctttggggctgatttagcacaagttcaggatgattatatcgcccgctctgccttattggatggtgaacggtggaacaagcgccctctttggcaccgagtaactgagcgtttattctattttttcagcccattattgtaa

SEQ ID NO: 98843 - protein, 493 aa, Yersinia pestis KIM
MNRIYALMTTFYTVISWLSVFGYWLLIAGVTLRILMKRRAVPSAMAWLLIIYILPLVGIIAYLSFGELHLGKRRAERAKAMWPSTARWLSELKECQHIFANSNSEVASPLFQLCERRQGINGVKGNQLQLLTTTDDTLKALVRDIELARHNIEMVFYIWQPGGLVDQVAESLMAAARRGVHCRLLLDSAGSKQFFRSPYPAMMRNAGIEVVEALKVNVFRMFLRRMDLRQHRKIVLIDNYVAYTGSMNMVDPRFFKQDAGVGQWIDMMARMEGPVATTLGIVYACDWEIETGKRILPPPPDANIMPFEEETGHTIQVIASGPGFPEEMIHQALLTAVYAAREQLIMTTPYFVPSDDLLHAICTAAQRGVDVSIIVPRENDSMMVRWASRAFFTELLNAGVKIYQFEGGLLHSKSVLVDGQLSLVGTVNLDMRSLWLNFEITLVIDDDGFGADLAQVQDDYIARSALLDGERWNKRPLWHRVTERLFYFFSPLL

SEQ ID NO: 98844 - DNA, 1596 bp, Streptococcus agalactiae 2603V/R
  CDS (1)..(1596): transl_table=11
ttgatttggaggggggaaaaacttatcagtaataaagtcaaaattgttcgtttacttaataagagtaagaaaagtttactaaggggtatatttagtcgaacaaccgttatcgctattttattgattttacaattattgtttttactagcctcttactcatggctagagcagtatcgtgtttggttagcaaccgttgagcatatcttaacaattggagcggtcttatatttagttaatagtgaaatggatgctttgtcccgagtaacttggttaatattggtaatgattgcccctttactaggggcgatgttcctaatgtacaccaaatttgactggggttatcgtggtttgaaacaaagattggagacattgattgatgagagtcagatttatctagaggatgatcctgaaactttgaatcagcttaagtcaagtacatccacaacatatcatttggttcaatattttgaaaaagcacatggaaatttcccagtttatcgaaatactgatgtgacatttctaccaacgggagaagcattctttgaaaaaatgaaagaagaactactaaaagctaaaaagtatatctttttagaattctttatcattgacgaaggaataatgtggggagaaatacttagtattttagaacaaaaggtggaagaaggtgttgaagtccgtatcttatatgatggtatgatagaaattacaaaattatcctttgattatacgaaacgacttgagaaaataggaataaaagcaaaagcattttctccgatttctccttttatttcaacttattataactatcgtgaccatcgaaaaattgttgttattgatggagtagtaggcatgactggtggtgtaaacttagccgatgagtatattaatcacattgagttatttgggcattggaaagattcaggtattatgttaaaggggaaagcagtggatagtttcctcctacttttcttacagatgtggtccattactgaggaaaaaatgttagtagcgccttacctcggtgtacacgatgatttagttgaaaatgaaggctatgttattccttatggagattctcctttagacactgataaagtaggggaaaatgtttatatagatattcttaatcatgctagagaatatgtttacatcatgacaccttatttaatattagacagtgaattggaacatgccattcagtttgctgcggaacgtggtgtagatgtacgtattattatgccgggtatcccagataagccaatcccttatgctcttgctaaaacttactatcaagctttaacaaaatcaggtgttaaaatatatgaatacacccttggatttgttcattcaaaaatattccttagtgataatacaaaggctgttgtaggtacgataaatcttgattaccgtagcctgtatcaccattttgaatgtgctgtttatctttataaggtagatgcaatccaagacatttatcgagattatatggatacattaaataaatcaaggttagttagcttgaaagatataaataatattccaaaattccaaaaagtaattggcatagtgacaaaaactattgctcccctgctttag

SEQ ID NO: 98845 - protein, 531 aa, Streptococcus agalactiae 2603V/R
MIWRGEKLISNKVKIVRLLNKSKKSLLRGIFSRTTVIAILLILQLLFLLASYSWLEQYRVWLATVEHILTIGAVLYLVNSEMDALSRVTWLILVMIAPLLGAMFLMYTKFDWGYRGLKQRLETLIDESQIYLEDDPETLNQLKSSTSTTYHLVQYFEKAHGNFPVYRNTDVTFLPTGEAFFEKMKEELLKAKKYIFLEFFIIDEGIMWGEILSILEQKVEEGVEVRILYDGMIEITKLSFDYTKRLEKIGIKAKAFSPISPFISTYYNYRDHRKIVVIDGVVGMTGGVNLADEYINHIELFGHWKDSGIMLKGKAVDSFLLLFLQMWSITEEKMLVAPYLGVHDDLVENEGYVIPYGDSPLDTDKVGENVYIDILNHAREYVYIMTPYLILDSELEHAIQFAAERGVDVRIIMPGIPDKPIPYALAKTYYQALTKSGVKIYEYTLGFVHSKIFLSDNTKAVVGTINLDYRSLYHHFECAVYLYKVDAIQDIYRDYMDTLNKSRLVSLKDINNIPKFQKVIGIVTKTIAPLL

SEQ ID NO: 98846 - DNA, 1461 bp, Brucella suis 1330
  CDS (1)..(1461): transl_table=11
atgcttgatctcgtttcccattattggccgcacattctgtttgtcctgtcgatcgttctcggagcgattgccgccattcatgcgacgatgaccaaggaggaagtgcgcacggccattggctgggtcggcgtgatcgtgctgtcgcccatcgtgggggcggttgtctatgcgattgcgggcgtcaaccgtatccggcgttcgacactgagctatcagcgcgccaatctcagcaatatcgcgctctaccacctctcgcatttcgacacgacgaacgaccgggtgcgggccgctttcgggcggcagttcggcgcgatgaaaattctgggcgatgcggtgagcctttatgattttaccagcggcaacactattgaaatgctggaaacgggtgatgaagcctatgccgcaatgcttggcgccataggccgggccgagcgcagcattgtgctggaaacctatattttcgaccatgacgccattggtaaaaaatttgccgatgcgcttggcgatgcggtgcagcgcggcgtggaagtgcgggtgctggtggatgcggtgggcgcgcgttattcctttccaagcattgtgaagcttttgaaagaaaagggcgtcaaggtcgctgtgttcaacggcaatatcatcatcggcctgcgtctgccctatgcgaacctgcgcacccaccgcaagatgctgattgtcgatggtcagactgcctttaccggcggcatgaatattcgcgccgggtttgtgagggctatcgcaggcgatgcggttgccttcgatacacatttcaaactcgaagggcctgccattgccgacctcttccatattgcctcggaagactggcgttttgcgaccggcgagcttttgacgggcgaagcctggagcatcgcgccaccggaaaatccacccggaacgggaacgctggtgcgtgtcgtcgggtcagggccggacaagaacctcgaaacgaaccatcgcatgatgatgggggcgttttcgattgcccagcagcatattctcatcatgacgccctatcttttgccggaccgcgaattgataagtgcgctggtgacggcggcacggcgcggcgtatcggtcgatatcgtggtgccgggtgtcaacaatctgaagctggtggaccgcgccatgcgcgcccagtttgatcagcttttgcgggacggctgccgcatctggcgtgctggcggggccttcaatcactcaaagctcatgaccatcgatggcgcctggtcctatgtcggctcgtccaatatcgatccgcgctcgctgcggctcaatttcgaggtcgatcttgaaatcctcgaccgggatgtggcacggcaggtggaagagcgtatcggacgggtgatcgagaaaagccgtgaggtcaaccttgtgcgcctgaagaaccgcccttttctggagcggctgcttgacaggatcatctggctcggctcaccttttctttga

SEQ ID NO: 98847 - protein, 486 aa, Brucella suis 1330
MLDLVSHYWPHILFVLSIVLGAIAAIHATMTKEEVRTAIGWVGVIVLSPIVGAVVYAIAGVNRIRRSTLSYQRANLSNIALYHLSHFDTTNDRVRAAFGRQFGAMKILGDAVSLYDFTSGNTIEMLETGDEAYAAMLGAIGRAERSIVLETYIFDHDAIGKKFADALGDAVQRGVEVRVLVDAVGARYSFPSIVKLLKEKGVKVAVFNGNIIIGLRLPYANLRTHRKMLIVDGQTAFTGGMNIRAGFVRAIAGDAVAFDTHFKLEGPAIADLFHIASEDWRFATGELLTGEAWSIAPPENPPGTGTLVRVVGSGPDKNLETNHRMMMGAFSIAQQHILIMTPYLLPDRELISALVTAARRGVSVDIVVPGVNNLKLVDRAMRAQFDQLLRDGCRIWRAGGAFNHSKLMTIDGAWSYVGSSNIDPRSLRLNFEVDLEILDRDVARQVEERIGRVIEKSREVNLVRLKNRPFLERLLDRIIWLGSPFL

SEQ ID NO: 98848 - DNA, 1596 bp, Streptococcus agalactiae NEM316
  CDS (1)..(1596): transl_table=11
ttgatttggaggggggaaaaacttatcagtaataaagtcaaaattgttcgtttacttaataagagtaagaaaagtttactaaggggtatatttagtcgaacaaccgttatcgctattttattgattttacaattattgtttttactagcctcttactcatggctagagcagtatcgtgtttggttagcaaccgttgagcatatcttaacaattggagcggtcttatatttagttaatagtgaaatggatgctttgtcccgagtaacttggttaatattggtaatgattgcccctttactaggggcgatgttcctaatgtacaccaaatttgactggggttatcgtggtttgaaacaaagattggagacattgattgatgagagtcagatttatctagaggatgatcctgaaactttgaatcagcttaagtcaagtacatccacaacatatcatttggttcaatattttgaaaaagcacatggaaatttcccagtttatcgaaatactgatgtgacatttctaccaacgggagaagcattctttgaaaaaatgaaagaagaactactaaaagctaaaaagtatatctttttagaattctttatcattgacgaaggaataatgtggggagaaatacttagtattttagaacaaaaggtggaagaaggtgttgaagtccgtatcttatatgatggtatgatagaaattacaaaattatcctttgattatacgaaacgacttgagaaaataggaataaaagcaaaagcattttctccgatttctccttttatttcaacttattataactatcgtgaccatcgaaaaattgttgttattgatggagtagtaggcatgactggtggtgtaaacttagccgatgagtatattaatcacattgagttatttgggcattggaaagattcaggtattatgttaaaggggaaagcagtggatagtttcctcctacttttcttacagatgtggtccattactgaggaaaaaatgttagtagcgccttacctcggtgtacacgatgatttagttgaaaatgaaggctatgttattccttatggagattctcctttagacactgataaagtaggggaaaatgtttatatagatattcttaatcatgctagagaatatgtttacatcatgacaccttatttaatattagacagtgaattggaacatgccattcagtttgctgcggaacgtggtgtagatgtacgtattattatgccgggtatcccagataagccaatcccttatgctcttgctaaaacttactatcaagctttaacaaaatcaggtgttaaaatatatgaatacacccctggatttgttcattcaaaaatattccttagtgataatacaaaggctgttgtaggtacgataaatcttgattaccgtagcctgtatcaccattttgaatgtgctgtttatctttataaggtagatgcaatccaagacatttatcgagattatatggatacattaaataaatcaaggttagttagcttgaaagatataaataatattccaaaattccaaaaagtaattggcatagtgacaaaaactattgctcccctgctttag

SEQ ID NO: 98849 - protein, 531 aa, Streptococcus agalactiae NEM316
MIWRGEKLISNKVKIVRLLNKSKKSLLRGIFSRTTVIAILLILQLLFLLASYSWLEQYRVWLATVEHILTIGAVLYLVNSEMDALSRVTWLILVMIAPLLGAMFLMYTKFDWGYRGLKQRLETLIDESQIYLEDDPETLNQLKSSTSTTYHLVQYFEKAHGNFPVYRNTDVTFLPTGEAFFEKMKEELLKAKKYIFLEFFIIDEGIMWGEILSILEQKVEEGVEVRILYDGMIEITKLSFDYTKRLEKIGIKAKAFSPISPFISTYYNYRDHRKIVVIDGVVGMTGGVNLADEYINHIELFGHWKDSGIMLKGKAVDSFLLLFLQMWSITEEKMLVAPYLGVHDDLVENEGYVIPYGDSPLDTDKVGENVYIDILNHAREYVYIMTPYLILDSELEHAIQFAAERGVDVRIIMPGIPDKPIPYALAKTYYQALTKSGVKIYEYTPGFVHSKIFLSDNTKAVVGTINLDYRSLYHHFECAVYLYKVDAIQDIYRDYMDTLNKSRLVSLKDINNIPKFQKVIGIVTKTIAPLL

SEQ ID NO: 98850 - DNA, 1503 bp, Corynebacterium efficiens YS-314
  CDS (1)..(1503): transl_table=11
atgagcatatccatcgacctggaagtctggcagaccatcggtctgatcgtggactacacgatcaagatcatcgccatcggttatgtccccgagggccgccgccccagcacctccaccgcctggctgctggccattctcctcatccccttcctgggcctgccgctgttcctgctcatggggtcgccctatatcaataaacggcgacaccgcatccagcaggagatcaatgatctcatcgaggacgtccacgatgatgtccccgactatcccgacggggtcagtgtccacccggagctcgaatccgtcatccgcctgaaccggcgcctgaccaacatgcccgccgtgatcggtgtcaaccacggggtgcactccgactatgacgccaccatcaaacgcatgaccgcggccgtggatgaggcacaggactacatctacgtcgagatctacatcatggcctgggatgacacgaccaagcccttcttcgaggccctggaacgcgccgagaaacgcggggtgaaggtgcgtctgctcttcgaccacgtgggcagctggaaataccccggctaccgcaaactgaagaagaacctcaccgccatgggcatcgagtggtacctcatgctgcccctgcagccgtggcgccgacgcttccgccgacccgacctgcgcaaccaccgcaagatgctcatcatcgacggacacctcggtttcatggggtccctcaacatgatcgatgccagctacctgcagcgcaagaacatcaagatcggccgcaaatgggtggacctcatggtggaactctccggccccatcgtgtcctccatggagatggtcttcgccggtgactggtacgtcgaatccaatgaggccctggagatccgcgaccacgaggaggcccacaccaccatccccgacaccgcccagaactcccagaagaacctggtgcagctggtgccgtccggccccgggtacaacaccgaacccaacctgcggatgttcaactccatcgtgcaccacgcgaaatcacggctggtgctgtgcagcccctatttcatccccgatgaatccctcctggaagccgtcacctccgcctgctaccggggtgtgcaggtggaactgttcgtctccgaggaggccgaccagttcatggtcaaccatgcccagtcctcctactaccaggcgctgctggaggccggggtgaaaatctacatgtaccccaagcccttcgtcctgcacaccaaatatgtcctcgcggatcccgaccactccgccgacggtgtgccggtgggcgtggtcggatcctccaacctggatatgcgcagtttcggcctgaactatgagatctccatgatggtggccaagggcgatctgatcaacgatctcaacgacctgaccgagcactacaaggacatctgcctccggctcaccctggaccagtggaaccagcgcagctggggaaggcgttatctggacaatgtcatgcggctgacctcggcgctgcagtag

SEQ ID NO: 98851 - protein, 500 aa, Corynebacterium efficiens YS-314
MSISIDLEVWQTIGLIVDYTIKIIAIGYVPEGRRPSTSTAWLLAILLIPFLGLPLFLLMGSPYINKRRHRIQQEINDLIEDVHDDVPDYPDGVSVHPELESVIRLNRRLTNMPAVIGVNHGVHSDYDATIKRMTAAVDEAQDYIYVEIYIMAWDDTTKPFFEALERAEKRGVKVRLLFDHVGSWKYPGYRKLKKNLTAMGIEWYLMLPLQPWRRRFRRPDLRNHRKMLIIDGHLGFMGSLNMIDASYLQRKNIKIGRKWVDLMVELSGPIVSSMEMVFAGDWYVESNEALEIRDHEEAHTTIPDTAQNSQKNLVQLVPSGPGYNTEPNLRMFNSIVHHAKSRLVLCSPYFIPDESLLEAVTSACYRGVQVELFVSEEADQFMVNHAQSSYYQALLEAGVKIYMYPKPFVLHTKYVLADPDHSADGVPVGVVGSSNLDMRSFGLNYEISMMVAKGDLINDLNDLTEHYKDICLRLTLDQWNQRSWGRRYLDNVMRLTSALQ

SEQ ID NO: 98852 - DNA, 1557 bp, Mycoplasma penetrans HF-2
  CDS (1)..(1557): transl_table=4
atggatagaaaaaagattttttttattaccttaacatcaactgttttaatgtttgtattttttggtttacttatattttttatattagatacattaaacaataatacaaacccaaactattggtttatcttactatttgcagtttactttgttaacaatttaacttctttttatcttcttaataacaaaagaaggattgaaaatgtgaaagtttgttgaatgtttgtaattaatttactccctgtaattggaatatttgctttttatatatttgggattattccttttaaaatagaaaattcaaatgaaattaaaatatcatcacatcactttaatgaaaatgaaaattactcattcacacattcttttttggcaaaacaggaaagtgataaacattcagattttaaattcatttttaattacatgaattcaccaatctatgaaaataataaaatcacaattcttgaccaatctgatttattcaaagaaacaattgatatcatcagagaagcaaaagaatttattcacattcagttttatatcatttctgattgtttatggttctatctattaatgaatgaactagtaagaaaagcaagtcagggtgtaaaaatcaaattcatgtatgattgagctggaagccataaaagatttaataaatcaaatttaaacttcttagaaagacatggaattgaagttgaacaatttaaccctcaaacttttaacaaatatacttcaatcacaaattttagaagtcatagaaaattagtggttgtagataacaaattttgtattacaggtggttcaaatattggtgatgaatatttaaacttaaaaaaatcatatgataactgaaaagatttaaatttcttaattgaaggtgaagttgttaatacattaaacttaagattctgtaatgactgaattaactacactaactataaaaagaaaaagaattttgattcaaagttttatcaaaactataaaatccacaaagcagaaaataaagatatttgccaagctataagctcatctccagaatttgatttgtatgtttatcaacaaatactaatgtcaaaaatttcatcagcccaaaaaactatttgaatctatactccctatttattaattcctaatgaaattataaataatctaatttttgctagccataaaggtgttgatgtaagaattatggttcctcattttccagatgataaaaagtttattcttacaagcaatagatcatcatatgaaagatttatgaaagcaggtatacaaatttttgaatactatgggtttatgcattcaaaagcagtaataatagatgatgaccaatgtctgataggaagtaataatctagactatagaagtttagtgattaactttgaaactgctatttctattatttcaaaagactttaatcatcaaatgaaagaaatctttttaaaagaccaaaaaaactctagattaatatcattacactacttacatagtaagtttaatttaagacaaaaaatgtataatagcataatcaatatcattaaacctttactttaa

SEQ ID NO: 98853 - protein, 518 aa, Mycoplasma penetrans HF-2
MDRKKIFFITLTSTVLMFVFFGLLIFFILDTLNNNTNPNYWFILLFAVYFVNNLTSFYLLNNKRRIENVKVCWMFVINLLPVIGIFAFYIFGIIPFKIENSNEIKISSHHFNENENYSFTHSFLAKQESDKHSDFKFIFNYMNSPIYENNKITILDQSDLFKETIDIIREAKEFIHIQFYIISDCLWFYLLMNELVRKASQGVKIKFMYDWAGSHKRFNKSNLNFLERHGIEVEQFNPQTFNKYTSITNFRSHRKLVVVDNKFCITGGSNIGDEYLNLKKSYDNWKDLNFLIEGEVVNTLNLRFCNDWINYTNYKKKKNFDSKFYQNYKIHKAENKDICQAISSSPEFDLYVYQQILMSKISSAQKTIWIYTPYLLIPNEIINNLIFASHKGVDVRIMVPHFPDDKKFILTSNRSSYERFMKAGIQIFEYYGFMHSKAVIIDDDQCLIGSNNLDYRSLVINFETAISIISKDFNHQMKEIFLKDQKNSRLISLHYLHSKFNLRQKMYNSIINIIKPLL

SEQ ID NO: 98854 - DNA, 1455 bp, Vibrio vulnificus CMCP6
  CDS (1)..(1455): transl_table=11
atggacaagttctaccattttctcaccctcgcagggatcggactttattgggtcctgattgctggtgtgacgttccgtgtcgtgttaaagcgtcgtgccgtgagcgtttcgctcgcatggctaatgatcatttacattctccctgtgctgggcgtcgcctgctattttctgtttggtgagctaaatctaggccgcaaacgagccgagcgtgccaaagagatgtttgcaccctttgccacttggttctcgcaactgaatgactgccaagcccatgcgccagagtcgatgggacgccacatctatcgtattgacgaattgtgtaatactcggctgggcttacccgcactcagcggcaacacgctctctctgcaacgttcgcctgaagagattcttcattccgtcattcaagatatcgaaaacgcgcaaagtagtattcgcatggtgttttatatctggcatcccggaggcttagcggattctgtcgcttcagcgcttatccaagccgccaaacgaggtgtggatgtcaaactgttgctggattcagcggggagtccacgatttttccgtagccattggcgtcagatgatggtgaacgcaggcattcacgtggtacaagcgctagaagtgagcccatggcgtatttttctacgtcgtctcgatttaagacaacaccgaaaaatcatcgttatcgacgatgagattgcctacacaggttcaatgaatttggtcgaccctgcctacttcaaacaaagcagcggcgttgggcaatgggtggatatcatggtgcgtttgactggtccaacggtgaacgtgctttccgccattcattgctgggattgggaagtcgaaactggacatcgccaattacccagactgcctgaatgcccgttagactcgacgcaataccaaaaccccattcaagtggttccatcgggccccggcatgccagagaacttgatttctcaagtgttgattctcgccatcaaccaagcgaaccactcggtcacgattaccacaccttactttgtgccaagcatcaatctgctcgacacattaaaaatgaccgctcaacgtggcattgatgtacaactgatcatcccacataaaaatgactccctcatggtgcaatgggcttcccgttccttttacagcgagcttatggaagcgggcgtgaagatcttcgaattttacggtggattgctgcacactaaatccgttgtcatcgaccaagagttttgtctcgtcgggacggtcaacatcgacatgcgcagtttgtggctcaattttgaagtcacactggcggtagatgatgagcatttcacccaacaaatgcaccaattgcaacaaaactacaaatcgcgcgctcatcctgttcatctgagcgaatggaacaaacgctcgctttactcgcgctttttagagcgactctactacctctttaatcctttgctgtga

SEQ ID NO: 98855 - protein, 484 aa, Vibrio vulnificus CMCP6
MDKFYHFLTLAGIGLYWVLIAGVTFRVVLKRRAVSVSLAWLMIIYILPVLGVACYFLFGELNLGRKRAERAKEMFAPFATWFSQLNDCQAHAPESMGRHIYRIDELCNTRLGLPALSGNTLSLQRSPEEILHSVIQDIENAQSSIRMVFYIWHPGGLADSVASALIQAAKRGVDVKLLLDSAGSPRFFRSHWRQMMVNAGIHVVQALEVSPWRIFLRRLDLRQHRKIIVIDDEIAYTGSMNLVDPAYFKQSSGVGQWVDIMVRLTGPTVNVLSAIHCWDWEVETGHRQLPRLPECPLDSTQYQNPIQVVPSGPGMPENLISQVLILAINQANHSVTITTPYFVPSINLLDTLKMTAQRGIDVQLIIPHKNDSLMVQWASRSFYSELMEAGVKIFEFYGGLLHTKSVVIDQEFCLVGTVNIDMRSLWLNFEVTLAVDDEHFTQQMHQLQQNYKSRAHPVHLSEWNKRSLYSRFLERLYYLFNPLL

SEQ ID NO: 98856 - DNA, 1485 bp, Staphylococcus epidermidis ATCC 12228
  CDS (1)..(1485): transl_table=11
atgatagaagtctttactatggcacttcatcaatctaatattataattaatattttattagttagtgcctttttattaaatttagtttttgcattcattattattttcatggagaggcgtacagcaaattctatatgggcgtggttattggttttagtttttctacctttagtaggattcatattgtatttattattaggtcgccaaatacagagagaacatatatttaaactcgccaaagaggataaagttggtcttgaaatgattgttgacgagcaattagaggcattgaaaaagcaagacttttctaagggtaatcatcaaattgttaaatttaaagaaatggtacaaatgttactttataataatgctgcttttttaacaactgataatgatctaacaatttatacagatggtcatcagaagttcgatgatttaattaatgatattagacacgcacaatcatatattcacatccaatactacattattcatagtgataatctcggaaagcaattgttacatgaattagaaaaaaaagctgaagaaggtatagaagttaaaatgctatacgatgatatgggctcaagagatttacgaaagaaagatctaaaaaagtttcgtcaaaaaggcggtcacgctgaatctttctttccatcaaaattaccacttattaatttaagaatgaataatagaaaccacagaaaaatagtagtcattgacggtacgattggatatgttggtggttttaatgtaggagatgaatatataggtaaatctaagaaatttggttattggagggacacacacttacgtattaaaggtgacgcggtaaatgcccttcaacttagattcatcttagattggaactcacaatcaactcgtgacaatttaacttatgaatctcgatattttcctgatgttgactctggtggtacgataggcatacaaattgcttcaagtgggcctgatgaagattgggaacaaattaaatatggttatttaaaaatgatttcatcagccaaagaatctatatacattcaatcaccatacttcattcccgatcaagcttttttagattcgattaaaattgcagcgcttggtggtgtggatgttaacatcatggttcctaacaaacgtgatcatccctttgtttattgggctacgcttaaaaacgtagcgtctttacttgaagctggcgttaatgtctatcattatgataatggttttctacattcaaaaacacttgtcattgatgatgaggtagcaagtgtaggaactgccaatatggataatcgaagctttacattaaactttgaggtcaatgcttttatttatgatgaaggcgtagcacgatcattaaaacaagctttcattaatgatatgaaattatctaacaagctcacttctgaagaatatgctaaacgaaatctgctagttaaattcaaagaagggatttcacaactactttctccaattttataa

SEQ ID NO: 98857 - protein, 494 aa, Staphylococcus epidermidis ATCC 12228
MIEVFTMALHQSNIIINILLVSAFLLNLVFAFIIIFMERRTANSIWAWLLVLVFLPLVGFILYLLLGRQIQREHIFKLAKEDKVGLEMIVDEQLEALKKQDFSKGNHQIVKFKEMVQMLLYNNAAFLTTDNDLTIYTDGHQKFDDLINDIRHAQSYIHIQYYIIHSDNLGKQLLHELEKKAEEGIEVKMLYDDMGSRDLRKKDLKKFRQKGGHAESFFPSKLPLINLRMNNRNHRKIVVIDGTIGYVGGFNVGDEYIGKSKKFGYWRDTHLRIKGDAVNALQLRFILDWNSQSTRDNLTYESRYFPDVDSGGTIGIQIASSGPDEDWEQIKYGYLKMISSAKESIYIQSPYFIPDQAFLDSIKIAALGGVDVNIMVPNKRDHPFVYWATLKNVASLLEAGVNVYHYDNGFLHSKTLVIDDEVASVGTANMDNRSFTLNFEVNAFIYDEGVARSLKQAFINDMKLSNKLTSEEYAKRNLLVKFKEGISQLLSPIL

SEQ ID NO: 98858 - DNA, 1404 bp, Xylella fastidiosa Temecula1
  CDS (1)..(1404): transl_table=11
atggaagggacttggctgtttgcattggattgggtgatccgtttggttgcgttgctttggatcccggcacgaaccacccctagtgctgcgcgcagctggttgttactgattggtttcgtccctgtgtttggcttgccactttacttggtgtttggccatccttggctgtcacgtaagcgtgtgttgcgtcaggcgttggcttctcatgtgatccgtgagtggcagcgtgggttgggtgcattgcgctggcagcctcaggagaatggcgtcgctgcggaattggtacctttggtggagcatcagggcgattttatgccaacacgtggtaacgccttggatctattggatgattaccaagcttcgctgcatttgttgatcaatgatattgattccgcgtgcgaacgtgtgcacttgctgtattacttgatgttcgatgatgcggtgggtgatgcggttgtggctgcattacagcgtgctgcggcgcgtggcgtttcttgccgattgctgctggatgcagtcggtgctaaacgcggtctacgtgcctatcagcagtgccttcgtgcccatggtgtggaggtgcacgctatgttgcctggtgggttgcgctggcgtcgcagtgggcgtatggatttgcgcaaccaccgtaagattgctgtgatcgacaatcgggtcgcttatatcggttcgcagaatttggcatgtccagattttgtgccgcatttccccaaccgtgaattggtcgcacgcgtgtgcggccctgcggtaagtcatctggaggcggtgtttctcagtgattggtttgttgaaactggtcaacgtttggggatgcgtccagatgttcccatatgtgagcaaaatgttgcggcccagctagtggccagcggtccggcttacccgtacgagaatgcgcgtgatgcggtgaatacaatgatccatttggcacggcggcgtattgtcttgacgacgccgtacttcgtgcctgatgaggccacactcagtgcgttgcgtattgcaggcacatctggagtagacgtgcagttgatcctgtccgagagtaataaccagtttctgatggcctgggctcaggaggcgtactttgaggagctgttgcgcgcaggaatcaaaattgcgttgtatcgtccccatttcctgcatgccaagcatctgagtgtggatgatgatattgcgttgttcggatcgattaatttggacatccgctcgttcgcgcttaacgctgagattggcatgatttgttacgactcacgtattgtgactcagttacgtgaggtggagagtgattatctggccaatgcgcgccagcttaatttggttgagtggcagcaacgtcccgcttggcgtcgtagccgtgagggtattgcacgcttggcagatgctctgatgtag

SEQ ID NO: 98859 - protein, 467 aa, Xylella fastidiosa Temecula1
MEGTWLFALDWVIRLVALLWIPARTTPSAARSWLLLIGFVPVFGLPLYLVFGHPWLSRKRVLRQALASHVIREWQRGLGALRWQPQENGVAAELVPLVEHQGDFMPTRGNALDLLDDYQASLHLLINDIDSACERVHLLYYLMFDDAVGDAVVAALQRAAARGVSCRLLLDAVGAKRGLRAYQQCLRAHGVEVHAMLPGGLRWRRSGRMDLRNHRKIAVIDNRVAYIGSQNLACPDFVPHFPNRELVARVCGPAVSHLEAVFLSDWFVETGQRLGMRPDVPICEQNVAAQLVASGPAYPYENARDAVNTMIHLARRRIVLTTPYFVPDEATLSALRIAGTSGVDVQLILSESNNQFLMAWAQEAYFEELLRAGIKIALYRPHFLHAKHLSVDDDIALFGSINLDIRSFALNAEIGMICYDSRIVTQLREVESDYLANARQLNLVEWQQRPAWRRSREGIARLADALM

SEQ ID NO: 98860 - DNA, 1437 bp, Clostridium tetani E88
  CDS (1)..(1437): transl_table=11
atgaaaattagtttcacatcctttttgtccatattcttctttataaatattataataattacattagttataatattagaaagaaaaagaccagaaaaaaccattgcatggcttttaataataactctattaccacctataggtatttttttatatgtatttttaggccgaaattggaaaattcataaattaaataatgatttttctcctaaaattagagaacttatctatagatctatggataaaatagatgatcctgattatgtaccccttattcatttaatagctgaaaatagtgaatctcctttatttctaaataattcaatagaaatatttaaagatggtacagaaaaatttcaagctttgaaaagagaaatattaaatgctaaacatcatatacatttagaatattacatcgtaaaaaatgacataataggtaatgaaataaaaaatttgttaatagaaaagtctttagaaggtgtcgaagtacgatttattttggatagagtaggatccataaagcttggtaaagaattcattaatgatatgattaaaaatggtattgatgtagttcagtactcatattttcttgctcctttactaaagaaaataaatactcaagttaactatagaaaccatagaaaacttgtcattatagacggtgaagttggatttattggtggtattaatattggagacgaatatttaggaaaaggcgaattaggatattggcgagatactcacataatggtcaaaggagactttgtattaggactccaagccgtgtttatagatgacttttggacaataaaaaaagcaaataatgatagtattttaataaatacagactttcattcctactttcctaaggttaatcaatctgggaaaaaattaatgcagctagctaaaagtggccctaattctccatattcatcaattatgcaaggaatattaaaaatgatatatatggctactgatcatatatacatcacaacaccatattttgttccttccgaaagtattatggaagctttaaaaatagcttgtttgagtggaatagatgtaagaattttatttcctggtcaatatgatcattttacagtatactctgcttcgagaacttatttagctgaactcctaaagtctggagccaaagttcatttttatgacgaaaattcctttgttcacgcaaaaattattactgtagatggaaaggtgtctactataggtactgctaatatggatattagaagttttgatttaaattatgaaataaatgctataatatatgatgaagaaacaactattaagttagaagaaatgttttttgaagatcttaaccatagtaaaaatgtaacagaacaggatttcaatgaaacctctaactttatgaagtttatagaagctataactaggttgttttcttctctgctataa

SEQ ID NO: 98861 - protein, 478 aa, Clostridium tetani E88
MKISFTSFLSIFFFINIIIITLVIILERKRPEKTIAWLLIITLLPPIGIFLYVFLGRNWKIHKLNNDFSPKIRELIYRSMDKIDDPDYVPLIHLIAENSESPLFLNNSIEIFKDGTEKFQALKREILNAKHHIHLEYYIVKNDIIGNEIKNLLIEKSLEGVEVRFILDRVGSIKLGKEFINDMIKNGIDVVQYSYFLAPLLKKINTQVNYRNHRKLVIIDGEVGFIGGINIGDEYLGKGELGYWRDTHIMVKGDFVLGLQAVFIDDFWTIKKANNDSILINTDFHSYFPKVNQSGKKLMQLAKSGPNSPYSSIMQGILKMIYMATDHIYITTPYFVPSESIMEALKIACLSGIDVRILFPGQYDHFTVYSASRTYLAELLKSGAKVHFYDENSFVHAKIITVDGKVSTIGTANMDIRSFDLNYEINAIIYDEETTIKLEEMFFEDLNHSKNVTEQDFNETSNFMKFIEAITRLFSSLL

SEQ ID NO: 98862 - DNA, 1458 bp, Lactobacillus plantarum WCFS1
  CDS (1)..(1458): transl_table=11
gtgcctccattgcaatatattcagccaattttctatacaattatcgttttaaacgcggccgcggcgttcgttaccgtgttccgggatcgtaatcgggacatcgcggccacttgggcttggctactcgtgttgatttggttgccgattattgggtttatcgcgtacgcctttgtcggtcgtaagttaccgaaaaaccggttatttcggttacgtaaagagacgcaaattagactcgaacagatgattcagcggcaacgtgaagccctgggaacggaattgatgcccgcagatgcggtcactagctcggttcgtgggatggtcagtttattcttgaattccgatggcgcgttactaagccgtaaaaaccgggtcaagatttatacggatggacatgagaagttccatgcgatgttccaagatattgaagcagctaagaatcatattcatattgaatattacacattttataatgaccagattggaaatgaattattacaccttttagaacggaaagcagcccaaggcgtcgacgttcgtgtcttgtatgatccgtgggggtcgatgggcacgttccgcagcttctttaagcatttagaagaacttggtgggcatgcccgaccgttcttgggtgctcattcagcgattttggacttccgtctcaacttccgtgatcaccgtaagatcgtggtaacggatggccgggtcggctacgtcggtggttttaacgttggtgaccagtaccttggtcgtagtaagaagtttggttactggcgtgatacccatttgcggatcgtcggttcaggagtttttgaattgcaggaacgtttcattcgtgattggaacgccaccgatgcggaacatcgaatcgtgccagacgttaatatgttcccagtcattcgcgttaaagggaatacttcgttacagatcgtctccagtggtccggacagtgatgcgcaacagattaaattgggttatattaaaatgattatgacagctcaacaccgtttatggattcagtcgccatacctaattccggacgattccgtattagatgcgattaaaatcgctgcgatgtcaggggttgacgtccgcattatggtgccggacaaacctgatcatgcctttgtttaccgggcaactcagtactatgcccgggagctggcagatgctggtgtaaaaatctattattataataatggttttattcatgccaagaccatcgtgattgatggtcaggtggcgtcagtgggctcagctaatatggacttccggagctttaagctcaactttgaagtgaacgcctttttatatgatgctgatttagcacaagaattggaacggattttcttagaagatcaaaaaatcagtagtttgattaccgttcaagactttaaaaatcaatcattctggttgaagttcaagcagacattttcacggttgttatcaccaattttataa

SEQ ID NO: 98863 - protein, 485 aa, Lactobacillus plantarum WCFS1
MPPLQYIQPIFYTIIVLNAAAAFVTVFRDRNRDIAATWAWLLVLIWLPIIGFIAYAFVGRKLPKNRLFRLRKETQIRLEQMIQRQREALGTELMPADAVTSSVRGMVSLFLNSDGALLSRKNRVKIYTDGHEKFHAMFQDIEAAKNHIHIEYYTFYNDQIGNELLHLLERKAAQGVDVRVLYDPWGSMGTFRSFFKHLEELGGHARPFLGAHSAILDFRLNFRDHRKIVVTDGRVGYVGGFNVGDQYLGRSKKFGYWRDTHLRIVGSGVFELQERFIRDWNATDAEHRIVPDVNMFPVIRVKGNTSLQIVSSGPDSDAQQIKLGYIKMIMTAQHRLWIQSPYLIPDDSVLDAIKIAAMSGVDVRIMVPDKPDHAFVYRATQYYARELADAGVKIYYYNNGFIHAKTIVIDGQVASVGSANMDFRSFKLNFEVNAFLYDADLAQELERIFLEDQKISSLITVQDFKNQSFWLKFKQTFSRLLSPIL

SEQ ID NO: 98864 - DNA, 1497 bp, Tropheryma whipplei str. Twist
  CDS (1)..(1497): transl_table=11
gtgaagccctatttgtttatattggcggccctgctattggccgaccttgtcatccgtattggctgcctttttgttgttcctcgcaatagacgtcctaattctgccaacgcctggcttctcacaatattctttctgccgtttattggatggtttctttttttgataataggcagctacaagctcccaaaatcaagaagagaaaaacaggctcttataaaccagcttgttgcaaatgcactgtcagatcatgcagtattggacaatgtagatctgcaatggctaccatctctggtaaaactaaacagaaatcttggatctatgccgatggttgcgggaactcgtgtacatattcttactgatacaagtgtgattatggagcagatggtatctgccattgattcagctaaaagcagtgtacacgttgagttctacatcttttcgctggatgaatttacgcagggctttttcacaagccttgaaaatgcgaccgcccgcggggtaaaggttcgggttttatatgatcacatcgcaactttgcgcgtccctggatatctgaatatgaagtctcgccttaagcgcaatgggattgaattttatccgatgcttccgattcagcccttcaagttgaaatatcagaggcctgacctgcgcaatcatcgaaaattgcttgtaattgatgatgcaattgcatttgttggatcgctaaacattattgatcctttttataacacgaggggtcgcaagaaaatgttttggcaagatgcgatgctgcgccttgaaggacccgttataagcgggataagcgcggtttttgtctctgattggtacgcagaaacaggccagctcctgagagactacagaattgtaaaaacttcatccggcgattccttcacagaaaaccgcacacaatcaaacagtgttgataggagttgcccgagtacaaataacgttttatgtcaagtagttccttctggtcctggatttgagggggaaaataacctccaattgtttctaatgctcctttatgcatcgcaaaaacgggttgcaattacatcaccgtacttcgtgccggacgaggcaatgactttagcaatcgcgtcggcgactaaaaggggggttagtgtcgaactgtttttatctgaaaaccatgaccaaaaaattgtttaccacgctcagtgttcgtactacgaacagctattgagaagcggcgtaaagatttggctataccgtgcaccaaatttcttacacagcaaatatgtaactgttgatgatgatgttgccgtttttggatcaagcaattttgatatgcgctctttcaatctgaatatggaaatgtcactgttgctctacagcaaggaatttgttgcaaaactgcaggcggttgaacaggaaaaccgagcaaatagctccctgctcaccctcgatgaatggatgcaccgcgggaaaatggaccgcttgaaagataatctagctagacttacatccgccctgcaatag

SEQ ID NO: 98865 - protein, 498 aa, Tropheryma whipplei str. Twist
MKPYLFILAALLLADLVIRIGCLFVVPRNRRPNSANAWLLTIFFLPFIGWFLFLIIGSYKLPKSRREKQALINQLVANALSDHAVLDNVDLQWLPSLVKLNRNLGSMPMVAGTRVHILTDTSVIMEQMVSAIDSAKSSVHVEFYIFSLDEFTQGFFTSLENATARGVKVRVLYDHIATLRVPGYLNMKSRLKRNGIEFYPMLPIQPFKLKYQRPDLRNHRKLLVIDDAIAFVGSLNIIDPFYNTRGRKKMFWQDAMLRLEGPVISGISAVFVSDWYAETGQLLRDYRIVKTSSGDSFTENRTQSNSVDRSCPSTNNVLCQVVPSGPGFEGENNLQLFLMLLYASQKRVAITSPYFVPDEAMTLAIASATKRGVSVELFLSENHDQKIVYHAQCSYYEQLLRSGVKIWLYRAPNFLHSKYVTVDDDVAVFGSSNFDMRSFNLNMEMSLLLYSKEFVAKLQAVEQENRANSSLLTLDEWMHRGKMDRLKDNLARLTSALQ

SEQ ID NO: 98866 - DNA, 1497 bp, Tropheryma whipplei TW08/27
  CDS (1)..(1497): transl_table=11
gtgaagccctatttgtttattttggcggccctgctattggccgaccttgtcatccgtattggctgcctttttgttgttcctcgcaatagacgtcctaattctgccaacgcctggcttctcacaatattctttctgccgtttattggatggtttctttttttgataataggcagctacaagctcccaaaatcaagaagagaaaaacaggctcttataaaccagcttgttgcaaatgcactgtcagatcatgcagtattggacaatgtagatctgcaatggctaccatctctggtaaaactaaacagaaatcttggatctatgccgatggttgcgggaactcgtgtacatattcttactgatacaagtgtgattatggagcagatggtatctgccattgattcagctaaaagcagtgtacacgttgagttctacatcttttcgctggatgaatttacgcagggctttttcacaagccttgaaaatgcgaccgcccgcggggtaaaggttcgggttttatatgatcacatcgcaactttgcgcgtccctggatatctgaatatgaagtctcgccttaagcgcaatgggattgaattttatccgatgcttccgattcagcccttcaagttgaaatatcagaggcctgacctgcgcaatcatcgaaaattgcttgtaattgatgatgcaattgcatttgttggatcgctaaacattattgatcctttttataacacgaggggtcgcaagaaaatgttttggcaagatgcgatgctgcgccttgaaggacccgttataagcgggataagcgcggtttttgtctctgattggtacgcagaaacaggccagctcctgagagactacagaattgtaaaaacttcatccggcgattccttcacagaaaaccgcacacaatcaaacagtgttgataggagttgcccgagtacaaataacgttttatgtcaagtagttccttctggtcctggatttgagggggaaaataacctccaattgtttctaatgctcctttatgcatcgcaaaaacgggttgcaattacatcaccgtacttcgtgccggacgaggcaatgactttagcaatcgtgtcggcgactaaaaggggggttagtgtcgaactgtttttatctgaaaaccatgaccaaaaaattgtttaccacgctcagtgttcgtactacgaacagctattgagaagcggcgtaaagatttggctataccgtgcaccaaatttcttacacagcaaatatgtaactgttgatgatgatgttgccgtttttggatcaagcaattttgatatgcgctctttcaatctgaatatggaaatgtcactgttgctctacagcaaggaatttgttgcaaaactgcaggcggttgaacaggaaaaccgagcaaatagctccctgctcaccctcgatgaatggatgcaccgcgggaaaatggaccgcttgaaagataatctagctagacttacatccgccctgcaatag

SEQ ID NO: 98867 - protein, 498 aa, Tropheryma whipplei TW08/27
MKPYLFILAALLLADLVIRIGCLFVVPRNRRPNSANAWLLTIFFLPFIGWFLFLIIGSYKLPKSRREKQALINQLVANALSDHAVLDNVDLQWLPSLVKLNRNLGSMPMVAGTRVHILTDTSVIMEQMVSAIDSAKSSVHVEFYIFSLDEFTQGFFTSLENATARGVKVRVLYDHIATLRVPGYLNMKSRLKRNGIEFYPMLPIQPFKLKYQRPDLRNHRKLLVIDDAIAFVGSLNIIDPFYNTRGRKKMFWQDAMLRLEGPVISGISAVFVSDWYAETGQLLRDYRIVKTSSGDSFTENRTQSNSVDRSCPSTNNVLCQVVPSGPGFEGENNLQLFLMLLYASQKRVAITSPYFVPDEAMTLAIVSATKRGVSVELFLSENHDQKIVYHAQCSYYEQLLRSGVKIWLYRAPNFLHSKYVTVDDDVAVFGSSNFDMRSFNLNMEMSLLLYSKEFVAKLQAVEQENRANSSLLTLDEWMHRGKMDRLKDNLARLTSALQ

SEQ ID NO: 98868 - DNA, 1455 bp, Vibrio parahaemolyticus RIMD 2210633
  CDS (1)..(1455): transl_table=11
atggacaagttctatcattttcttactcttactggcattggactgtattggttcttagttgctggtgttactttacgcgttgttttgaagcgtcgtgcggtgagcgtgtctttagcttggctaatgatcatctatatccttcccgtgcttggcgtcgcgtgctatttcctatttggtgagctgaacttaggcagaaaacgagctgaacgagcaaaagagatgtttaccccttttgccaagtggtttagtcaactcaatgattgccacgcgcacatgcctgaaaccatgggtcgccatatctaccgcatcgatgaactgtgtaacaaccgtcttgggctacctgctctgagcgggaatactctgtccttgcaacaatctcctgatgaaattctgcactccatcatcgaagacatcgagaatgccaaaacgagcattcgaatggtgttctacatttggcacccaggcggcttggccgattcggtagcatccgctcttatccaagcatctaaacgtggtgtggatgtgaagctgctattggactctgcgggtagcccacgcttcttcagaagtccttggtacaaaatgatgaaagattcgggtatcgaggttattcaggcgctcgaagtgaagatgtggcgtatgttcttacgtcgtcttgatcttcgccagcaccgtaaaatcatcgtcattgatgatgaaatcgcttatacagggtcaatgaaccttgtcgatcctgcatactttaaacagagcagcggcgttgggcgttggatcgatatcatggtgcgagttacagggccaaccgtaaacgtgttaagtgcgattcactgctgggactgggaagtagaaacgggcgaacgttatctgccgaagttgccggagtgcaaaattgacaacagcaaataccaacatccgattcaggtggttccatctggccccggcatgccagagtatttgatttatcaagtgcttactttggcaattaaccaagccaatcgttcggtacgaatcacaacaccgtattttgtacctaataccgacttgcttgagacgttaaaaatgacggcgcagcgcggtattgatgttgagctgatcataccgcacaaaaatgactcacttatggttcagtgggcatcgcgcgctttctacagcgaacttttggccgctggcgtgaaaatttacgagttctatggtggcttgctgcacaccaaatcggtcgttatcgacgaccagttctgtttggttggtacggtgaatatggacatgcgcagcctgtggctgaactttgaagtcactctggctgtcgacgatgaagagttcaccaagcaattgtcatggttgcaagatggttatatcaagcaatctcatcctgtcgttttggacgagtgggaaaaacgtagcctttattctcgtttccttgagcgtgtgttctacctcttcaacccattgctctaa

SEQ ID NO: 98869 - protein, 484 aa, Vibrio parahaemolyticus RIMD 2210633
MDKFYHFLTLTGIGLYWFLVAGVTLRVVLKRRAVSVSLAWLMIIYILPVLGVACYFLFGELNLGRKRAERAKEMFTPFAKWFSQLNDCHAHMPETMGRHIYRIDELCNNRLGLPALSGNTLSLQQSPDEILHSIIEDIENAKTSIRMVFYIWHPGGLADSVASALIQASKRGVDVKLLLDSAGSPRFFRSPWYKMMKDSGIEVIQALEVKMWRMFLRRLDLRQHRKIIVIDDEIAYTGSMNLVDPAYFKQSSGVGRWIDIMVRVTGPTVNVLSAIHCWDWEVETGERYLPKLPECKIDNSKYQHPIQVVPSGPGMPEYLIYQVLTLAINQANRSVRITTPYFVPNTDLLETLKMTAQRGIDVELIIPHKNDSLMVQWASRAFYSELLAAGVKIYEFYGGLLHTKSVVIDDQFCLVGTVNMDMRSLWLNFEVTLAVDDEEFTKQLSWLQDGYIKQSHPVVLDEWEKRSLYSRFLERVFYLFNPLL

SEQ ID NO: 98870 - DNA, 1578 bp, Streptococcus pyogenes SSI-1
  CDS (1)..(1578): transl_table=11
atgattatcaaaaagaaagcaaaagtaaaatatttgctccataaagggaaacatggatttttaagaggaatttttagtagaacaacaatcattgtattattaattattttgcaattagttttcttatttcaatcttatgcctggatggagcagtaccgtgtttggataacgattcttgaaagtgtctttgctattactattgttttatatttagttaatagtgatatggatgctatttcaagaatgacgtggttaattttgattatgattgctccattactagggtcactgtttttaatttatacaaaattggattggggttacagagggctaaaacaaagaataaatcatcttgtagatctgtctgcaccttaccttagcgatgatgacgctatattagaggtattaaaggatagcacatcaaccacatatcatttagtacagtacttagaaagaagtcgtggcaactttccgatttataataatacaagggtaacttacttcccaacaggtgaaactttttttgatagtttaaaagaacagttattcttagctaaaaagtacatttttcttgaattttttattattgcagaaggccaaatgtggggagaaatccttagtattctagaaaaaaaagtcagtgaaggtgtagaagttagggtgttgtttgatggcatgaacgaactatcaacgctatcatcagattacgccaagagattagaacaaatagggattaaagctaaatcatttttaccgatttcaccctttatctctacctattacaattatcgagatcaccgaaaaattgtcgttattgatggggaggtatcattcactggaggtattaatctagcagatgagtacattaatgaagtagagcgttttggccgctggaaagatgctggtttaatgcttgagggtgaagcaacagacagctttttaattttgtttttacaaatgtggtctatcacagaaaaagaactgattattgatccttatctttcagatcattctttaaaacttccttcagatggctatgttattccctacggtgattccccgcttgatactgataaaataggtaaaaatgtttatatagacattttaaatcatgctaaagagtacgtttatatcatgacaccttaccttattttagatagcgagatggaacacgctttacgatttgcatcggaacgtggagtagatatccgaattattatgccaggagtgccagataagggggtaccatatgccttagctaaaacctattataaagctttgatgacttctggagtaaaaatttatgagtatcaaccagggttcgttcattcaaaggtatttatctctgataatacaaaagcagttgtcggaacaattaacttagactatcgtagcctttatcatcattttgaatgtgcaacttatttatatcgtgtgtcagttattgctgatattgtgaatgactttaatgaagctcaaaagcaatcactattgatgacatcagatcatttgaagcaacgtccttggtatcaaaaattgataggattattagtacgaacaattgcccctctcttgtaa

SEQ ID NO: 98871 - protein, 525 aa, Streptococcus pyogenes SSI-1
MIIKKKAKVKYLLHKGKHGFLRGIFSRTTIIVLLIILQLVFLFQSYAWMEQYRVWITILESVFAITIVLYLVNSDMDAISRMTWLILIMIAPLLGSLFLIYTKLDWGYRGLKQRINHLVDLSAPYLSDDDAILEVLKDSTSTTYHLVQYLERSRGNFPIYNNTRVTYFPTGETFFDSLKEQLFLAKKYIFLEFFIIAEGQMWGEILSILEKKVSEGVEVRVLFDGMNELSTLSSDYAKRLEQIGIKAKSFLPISPFISTYYNYRDHRKIVVIDGEVSFTGGINLADEYINEVERFGRWKDAGLMLEGEATDSFLILFLQMWSITEKELIIDPYLSDHSLKLPSDGYVIPYGDSPLDTDKIGKNVYIDILNHAKEYVYIMTPYLILDSEMEHALRFASERGVDIRIIMPGVPDKGVPYALAKTYYKALMTSGVKIYEYQPGFVHSKVFISDNTKAVVGTINLDYRSLYHHFECATYLYRVSVIADIVNDFNEAQKQSLLMTSDHLKQRPWYQKLIGLLVRTIAPLL

SEQ ID NO: 98872 - DNA, 1425 bp, Bacteroides thetaiotaomicron VPI-5482
  CDS (1)..(1425): transl_table=11
atgaggtggatatggtattgtacattgttagcgtatatcgcattcctattagggctgatttacactattataattgattacgacgacaaaaatcctgtgaagacgatctgctggattctagttgttatattcttaccattactgggtatatctgcctattatattgtaggacgtaatgtaagcaaaaagcgttcaaaatttcagttttggagagaagaattcaacaggcaccaacaatccgtttctaccaacgtggaaacagagccaatacatcccgatcattataaagaactaaaatcactcatattgaatctggaacagtcaccagtattcggaggtaacaaagtaactgtctatccgggtggtaaaagtaagttttacagtcttttcgaagatatcgactgtgccgaatcgcatattcatatcttctattatgctattggcgacgaccatatcggcaacgaattaaaagagaagattatcaataaggtaaaacaaggcatcaaagtacgactgctttacgacggactgggatgcaataaaacgaacagaaaatatttcaagcaaatgatagaagcaggcgtggaagtgaaaacgttcctcccgcttagttttccccgcttcctgcgaagtgtcaattaccgcaatcataaaaagatagtcatcatcgacggcagaatcgcctataccggtggcatcaatgtaaaagacgtatacatagacggacttctctggggaaaatggaatgacatacacttcaaggttgaaggttccggagcttcggggctgcaatctgtgtttctggcagactggtattatgcttccggacaatatctgtcttcaccggagtattatcccaatgtcgaagtcttcggagaagtaccaattcaagtagtcaacgcggaaccgttgggaatgcattccaatgtaatggaagccatgtttacagctataacgcgggcgaaaaagaatgtatatatcgagactccctacttcataccgacggaatgtctgcttcaggcaatacagaccgcatcaatgagcggaatagacgttcgccttgtcatgcctaaaagatcagacaatgattttgtgcaatatgcctctaactcatatgtggagaaactattaagaaataaagtcagagtctatcaatatgtcaatggatttacacattcaaagttgatgattgtcgatgatgaactggtggtagtcggttcagccaatatggatataagaagccttgaacttcttttcgagaccaatctgttcatttacgacaagaaagttgctcagaccgtcagagacatttatcacaccgatatgaataatagtaaagaactaaatctacgcgactggctccaacgcaaccgttcggttaaatttcgcgaagcgtgtttccggttgttttctccggtatattag

SEQ ID NO: 98873 - protein, 474 aa, Bacteroides thetaiotaomicron VPI-5482
MRWIWYCTLLAYIAFLLGLIYTIIIDYDDKNPVKTICWILVVIFLPLLGISAYYIVGRNVSKKRSKFQFWREEFNRHQQSVSTNVETEPIHPDHYKELKSLILNLEQSPVFGGNKVTVYPGGKSKFYSLFEDIDCAESHIHIFYYAIGDDHIGNELKEKIINKVKQGIKVRLLYDGLGCNKTNRKYFKQMIEAGVEVKTFLPLSFPRFLRSVNYRNHKKIVIIDGRIAYTGGINVKDVYIDGLLWGKWNDIHFKVEGSGASGLQSVFLADWYYASGQYLSSPEYYPNVEVFGEVPIQVVNAEPLGMHSNVMEAMFTAITRAKKNVYIETPYFIPTECLLQAIQTASMSGIDVRLVMPKRSDNDFVQYASNSYVEKLLRNKVRVYQYVNGFTHSKLMIVDDELVVVGSANMDIRSLELLFETNLFIYDKKVAQTVRDIYHTDMNNSKELNLRDWLQRNRSVKFREACFRLFSPVY

SEQ ID NO: 98874 - DNA, 1440 bp, Bacteroides thetaiotaomicron VPI-5482
  CDS (1)..(1440): transl_table=11
atgattgactggaacatactagttagccagatagctacggttgcttttgatatcgtttattttggagccattatcagtacgattgtcgttatcattcttgataaccggaatccggtgaagactatggcatggatactcatattacttttcctcccaattgtcggtcttgttttttatttcttctttggtcggagtcagcgtcgggaacgtatcatcggtcaaaaaagttatgaccgccttttgaagaaacctatggcggaatacatggcgcaagactgttcggatgtacctgaagaatatgcccgccttatccaacttttccagcataccaatcaagcttttccatttgagggaaaccgtattgctgtctatacggaaggctataccaaattgcaatcattgcttcgtgagctccaaaaggcgaaacaacacattcatatagaatactatatctttgaagatgatgctataggacgtttggtaagggatgtactaatcgaaaaagcatctcagggggttgaagtaagagtaatttatgatgatgtggggtgctggcatgtacctaaccgctttttcgaggaaatgcgtaatgcaggtattgaagtcaggagtttcttgaaagtacgcttccctttgtttacaagcagggtcaattatcgtaaccacagaaaaatagtcgtgatagacggacgtatcggttttgtgggaggtatgaacctggcagaacgttatatgcgtggtttctcatgggggatttggcgtgacacccatattctgatagaaggaaaggctgtgcatggtctgcaaacggcctttttgctcgactggtatttcgttgaccgtacattgattacagcttcacgttatttcccaaagatagaatcttgtggaagttcattagttcaggtggttaccagtgaacccattggcccctggaaagaaatcatgcaggggctgactatggcgatcaatggagcgaagaagtatttctatatgcaaaccccttatttcctgccgacagagcaagtacttgccgctatgcagacagctgcactggcaggagtagatgtgcgtttgatgttgccggaacgtgccgacaaccgaatcactcatttgggatcgcattcttacctggcagatgtgatgcaggcaggtgtcaaagtctatttttataagaaagggtttctgcactccaaactgatggtttctgatgatatgctctctacagtagggtctaccaatgttgacttccgtagttttgagcataattttgaagtaaatgcctttatgtatgatgtggaaacggctcttgaaatgaaggagatattccttcaggatcagcgggaaagtacacagatctttctgaaaaactgggtgaaacgttcgtggaggaggagggcagcagagtctgtcgttcgtttgttggctccgctgctttaa

SEQ ID NO: 98875 - protein, 479 aa, Bacteroides thetaiotaomicron VPI-5482
MIDWNILVSQIATVAFDIVYFGAIISTIVVIILDNRNPVKTMAWILILLFLPIVGLVFYFFFGRSQRRERIIGQKSYDRLLKKPMAEYMAQDCSDVPEEYARLIQLFQHTNQAFPFEGNRIAVYTEGYTKLQSLLRELQKAKQHIHIEYYIFEDDAIGRLVRDVLIEKASQGVEVRVIYDDVGCWHVPNRFFEEMRNAGIEVRSFLKVRFPLFTSRVNYRNHRKIVVIDGRIGFVGGMNLAERYMRGFSWGIWRDTHILIEGKAVHGLQTAFLLDWYFVDRTLITASRYFPKIESCGSSLVQVVTSEPIGPWKEIMQGLTMAINGAKKYFYMQTPYFLPTEQVLAAMQTAALAGVDVRLMLPERADNRITHLGSHSYLADVMQAGVKVYFYKKGFLHSKLMVSDDMLSTVGSTNVDFRSFEHNFEVNAFMYDVETALEMKEIFLQDQRESTQIFLKNWVKRSWRRRAAESVVRLLAPLL

SEQ ID NO: 98876 - DNA, 1446 bp, Enterococcus faecalis V583
  CDS (1)..(1446): transl_table=11
ttgattcttagcgtcttaacagttatttattttattaatgcaattattgcgggaattaccattttgttaaaacctcgagatgtagcagcaatttgggcatggctactcgtactgattgctctacccgtttttggttttttcttatatttattctttggtcgaggtttaaccgacaaaaagaaattttatttgcaacaaagtgatttacgggaattagagaatttccagaatttccaagaagaaagttttgaactttatagtcaaaagatgccgacggaggagcaacaacagtttacagactttttttcctcgttaaataggatgcctctgactaagaaaaatgatgttgaaatttttacggatggtacggaaaaattcaatgcgttgatggcggatataaaaaaagctcagcactccattcatattgaatattatgcctttgtaacggatcatatcggcaccaaaattttgaacttattagaagaaaaggcggctgaaggggttgaagtgcggttgctttacgatgcctttggctcaaagggcaccaaggttcatcatttgaatgaattgaaaaaaaacggtggttttgtccaaacgtttattacttctcaaaaagcacttttgaagtttcgtttgaattatcatgatcaccggaaaattgttgttattgacggaaaagtaggctacattggcggctttaatgttgccgatcaatatgccggaacgactaaaaagtttggctattggcgggatacacatttacggattcaagggccagcagcctcattactgcaaatgcgttttttaatggattggaacgtctcttcccccgagaaaaatcgtgtggcgtatcaattggattatttctttaaacttgaagcattggtgccagaggcaaatacatccattcagatgattgccagtggtcctaacagtgaccgtgaacaaattaaattggcctttattaaattgattacttctgccaagaaaagagtctggattcaaacgccgtatttagttcctgatgatagtgtcttggctgctttaaaggttgctgcggcttcaggagtagatgttaaaattatgattccagataagcccgaccatccgtttatttatcgagcaacacagtattacggccgcttattgatgaaagaaaatattgaaattttaatttataacggtggtttcttacatgcgaaaacaatgatcatggatgatgaagtctgcacagttggttcagccaatcaagatatccgaagttacaaattaaactttgaagcaaatgctgtgttatatgataaaaaaatcattgatcaattagaagcaattttcttagaagatcgaaaaaaatgtacaacaatgactccagaagttgttcgcgacatgtcaaaatggttgatttttaaacaacaaatttcacgattattttcaccaattctttaa

SEQ ID NO: 98877 - protein, 481 aa, Enterococcus faecalis V583
MILSVLTVIYFINAIIAGITILLKPRDVAAIWAWLLVLIALPVFGFFLYLFFGRGLTDKKKFYLQQSDLRELENFQNFQEESFELYSQKMPTEEQQQFTDFFSSLNRMPLTKKNDVEIFTDGTEKFNALMADIKKAQHSIHIEYYAFVTDHIGTKILNLLEEKAAEGVEVRLLYDAFGSKGTKVHHLNELKKNGGFVQTFITSQKALLKFRLNYHDHRKIVVIDGKVGYIGGFNVADQYAGTTKKFGYWRDTHLRIQGPAASLLQMRFLMDWNVSSPEKNRVAYQLDYFFKLEALVPEANTSIQMIASGPNSDREQIKLAFIKLITSAKKRVWIQTPYLVPDDSVLAALKVAAASGVDVKIMIPDKPDHPFIYRATQYYGRLLMKENIEILIYNGGFLHAKTMIMDDEVCTVGSANQDIRSYKLNFEANAVLYDKKIIDQLEAIFLEDRKKCTTMTPEVVRDMSKWLIFKQQISRLFSPIL

SEQ ID NO: 98878 - DNA, 1461 bp, Enterococcus faecalis V583
  CDS (1)..(1461): transl_table=11
atgaaaatttttgtttggattttgttatttttattagtaattaacgttattgctgccttaattactgtttttagaaaacctcgtagtatttccagcgttttagcatggatgatgacgttgattttcttgcctggtatcggctttattatttacttattctgtgggcgaggtatcgatggacaagaagtttttaaattgtctgatgatgaaaaacaaatggttcaacgaattaaagaaaaagtggacgttgataacaaaaaagcagggcgcgataaacgttatgatttactttatgatgcgaaagttttaaatcgttatttccggaatatggacgcatcaccgttggccaaaagaaatagtttgcaattattcacagatggccaagaaaaattccaagcattatttgaagatattcgtgcagcgaaagaaaccgttcatgtggagtattatgcgttttttaatgacacaattggcaatcaatttttagatgtattaatcgaaaagttgcatgaaggcgtggaagtttacttaatttacgatccttggggttcacccggcgcaaataaaaagttttttgctcgttacgttgacgctggaggaaaagtagctccctttattacttctcgtgatatgatccgtaaaacacgtctaaattatcacttgcatcgaaaaattgttgtcatcgatgggaaaattggctggaccggcgggttcaatgttggggatcaatatttgaatgtcaccgaaaaatttggttactggcgagatacccatattcgtttggtcgggacggccgtattttcattgcaagagatatttatcatggattggaatgcttcagtcaaatatcctgaagaacgtatgacgtatcatgaaaaatattttaaattaccagaagatcatgaagtggagcatttgtccttacaagttgtttcagatggtcctgattcagaagaagaaattttgaaaagcgggtttgttcggatgattttctctgcagaaaagagtgtctggattcaaacaccgtatttaatccctgatgatagtatgattaatgcgttgttagtggcggttcgttcaggtgtcgacgtgcgaattatgattccttgtatgcctgaccatccctttatttaccgcgcgacacaatattacgcaaattacttacacaaacgcggcattaaaatttatatttatgatagtgggtttattcatgcaaaaacaatggtgattgatgatgaattagctatggttgggacaacaaaccaagatattcgcagttattcattgaattttgaggtaagtacgtttatttacaatcccgacattgcgtggatgttagcgcaagtctttgaagaagatatagaaaaaagtgtcttactaaccgacgagataattaaaaaacaagggtactggctacgattcaagcaaaacttttcacgcttgttgtccccagtcttgtaa

SEQ ID NO: 98879 - protein, 486 aa, Enterococcus faecalis V583
MKIFVWILLFLLVINVIAALITVFRKPRSISSVLAWMMTLIFLPGIGFIIYLFCGRGIDGQEVFKLSDDEKQMVQRIKEKVDVDNKKAGRDKRYDLLYDAKVLNRYFRNMDASPLAKRNSLQLFTDGQEKFQALFEDIRAAKETVHVEYYAFFNDTIGNQFLDVLIEKLHEGVEVYLIYDPWGSPGANKKFFARYVDAGGKVAPFITSRDMIRKTRLNYHLHRKIVVIDGKIGWTGGFNVGDQYLNVTEKFGYWRDTHIRLVGTAVFSLQEIFIMDWNASVKYPEERMTYHEKYFKLPEDHEVEHLSLQVVSDGPDSEEEILKSGFVRMIFSAEKSVWIQTPYLIPDDSMINALLVAVRSGVDVRIMIPCMPDHPFIYRATQYYANYLHKRGIKIYIYDSGFIHAKTMVIDDELAMVGTTNQDIRSYSLNFEVSTFIYNPDIAWMLAQVFEEDIEKSVLLTDEIIKKQGYWLRFKQNFSRLLSPVL

SEQ ID NO: 98880 - DNA, 1176 bp, Coxiella burnetii RSA 493
  CDS (1)..(1176): transl_table=11
gtgattaaaaaaaaaggtattatggaaagtcgtccgctgccgacaaactattgcgaacgcctcttcacagacggacagaagcacttcgatgagctgctattggatatcgaagaggcgaaacattccatcgatctggaaacttacttattccacaacgatgcgttaggacaacgggtggcggttaaactcgctgaagccgccgagcgcggtgttaaagttcgaatcatggtggatggcgccggcagtcccttgtggagcaccaatttcgcccgtcttcttgaaagtgcgggcgcacgaactaaggtttttcatccctttccgtggcagctttgggattggagccgctctatcattaaattaccctttctaataaggtggatttaccttattttaaaaataaatttccgcaaccatcgaaaagtctgcattatcgataaaaagatcgcttatattggcagtcttaacattagcaaacaccatctttctaaagccgaaggaggcgacgcatggcgagatacgtcggtgcgtctttctggaattaacttggacgaacttattaaagcgtttgatgccgcttggtatcaccgtaccattaaagagcgtttacgggaaatttttcgtcaaattcgcaaagaccccttgattcgtctgaattattcacggcaccgtcgacgcattttccataaagatctgttgcgcaaaatggcgaattgccaccaccgaatttggatcaccaacgcttactttgtgccagataattttttattaaaaagacttcaagaagcggctcacgccggtattgatgtccgtattttgctgccgcgtaaatcagatgttcccataatgccttgggcctcgtcgacgttttattataatctcttaaatgccggtgtcaggatttttgaatatttacccagcatgttgcatgcaaaatcgctaattattgatgattggatgctggttggctccagtaatttaaatcatcgcagcctcattcatgatttagaagctgatgttaatattacgtctcccgaagccaaaaaaatgttggaggggcaatttctcgaagaccttaaaaattctcgggaagtttctttagacagttggcaaacgctgcgccctcgacgccaacgcattttaggtcgtttggttctttatattaagtactggatataa

SEQ ID NO: 98881 - protein, 391 aa, Coxiella burnetii RSA 493
MIKKKGIMESRPLPTNYCERLFTDGQKHFDELLLDIEEAKHSIDLETYLFHNDALGQRVAVKLAEAAERGVKVRIMVDGAGSPLWSTNFARLLESAGARTKVFHPFPWQLWDWSRSIIKLPFLIRWIYLILKINFRNHRKVCIIDKKIAYIGSLNISKHHLSKAEGGDAWRDTSVRLSGINLDELIKAFDAAWYHRTIKERLREIFRQIRKDPLIRLNYSRHRRRIFHKDLLRKMANCHHRIWITNAYFVPDNFLLKRLQEAAHAGIDVRILLPRKSDVPIMPWASSTFYYNLLNAGVRIFEYLPSMLHAKSLIIDDWMLVGSSNLNHRSLIHDLEADVNITSPEAKKMLEGQFLEDLKNSREVSLDSWQTLRPRRQRILGRLVLYIKYWI

SEQ ID NO: 98882 - DNA, 1116 bp, Bacillus cereus ATCC 14579
  CDS (1)..(1116): transl_table=11
atggggaaggaaatggctagtgaatatgaattaggacaagttcgattaggtgaatttcaattatatacgaacggtgaagagttatatagaaaattatttgaggatataaacgatgcagaaaagtatatatatatccatttttatattgtaggaaaagatgaaataagccaagagtttttacagttattagagaaaaaagcatctagcggagtagaagtgaaattgtcagtcgatcggataggtggatataagctgaagaaaaaggtaattagccgattaaaggaaaacggtgtgaagtttacatttagtaaaaaaccgaaactgaaaaatgtgttctattctttgcatcaacggaatcatagacgtattgttacgatagatggaaaggtatcatacgtcggtggttttaatatcggaaaggagtaccttggacaaaatccaaagtttgggccatggcgtgattatcacgtgcgcatccatggtgagggtgcagcggatatggaaagaaagttcgccgaagattggaaagaagatacaggagaaaaaatgcctatacatgaaagtatacctacattagggaatgtgaaatatcaatatttattttcaaatggaaaaggcttatgggaaaagtatggggcacttttaaaaaaggctaaaaagtctttaattatcgctacaccatattttgtaccaagtaaagaaatggtgaaagagttaaaagctgcattaaatcgtggtgttaatgtgaaaattctcgtgccatttaaaagtgatgccatattgttaaaacaagctgcctatccatatttgaaagatatgttacatgctggagcggagatttatcaatatcgaaatggattttttcatgggaaagtaacaattattgatggagaaattgttgatattgggacagcgaattttgataatagaagtttttatttaaattgtgagtctaactgtatcatatatgataaaacagttgttgatgaagtatggagtcgattacaggtagactttcataaatcaaaacgattttctgaagaagattttgagaaaattagtagatgggattggtttttagcgagaatagcgaatgttttagcatcatatttatag

SEQ ID NO: 98883 - protein, 371 aa, Bacillus cereus ATCC 14579
MGKEMASEYELGQVRLGEFQLYTNGEELYRKLFEDINDAEKYIYIHFYIVGKDEISQEFLQLLEKKASSGVEVKLSVDRIGGYKLKKKVISRLKENGVKFTFSKKPKLKNVFYSLHQRNHRRIVTIDGKVSYVGGFNIGKEYLGQNPKFGPWRDYHVRIHGEGAADMERKFAEDWKEDTGEKMPIHESIPTLGNVKYQYLFSNGKGLWEKYGALLKKAKKSLIIATPYFVPSKEMVKELKAALNRGVNVKILVPFKSDAILLKQAAYPYLKDMLHAGAEIYQYRNGFFHGKVTIIDGEIVDIGTANFDNRSFYLNCESNCIIYDKTVVDEVWSRLQVDFHKSKRFSEEDFEKISRWDWFLARIANVLASYL

SEQ ID NO: 98884 - DNA, 1104 bp, Bacillus anthracis str. Ames
  CDS (1)..(1104): transl_table=11
atggctagtgaatatgaattaggacaagttcgattgggtgaatttcaactgtatacgaacggtgaagaattatatacgaaattatttgaggatatacgcaatgcagaaaagtacatatatatccatttttatattgtaggtaaagacgaaataagcaaagagtttttgcagttgctcgagaaaaaggcatcaggtggagtagaagtgaaattgtcagtcgatcgaataggtggatataagctgaagaaaaagataattcgtcaactaaaaagcaatggtgtccagtttacatttagtaaaaaacctaaactgaaacatatattctactcgttgcatcaacggaaccatagacgcattgttacgatagatggaaaagtatcatacgtcggcggctttaacattggaaaggaataccttggacaaaatccgaaatttggtccgtggcgtgattatcatgtacgagtcaaggggaatggtgccacggatatggaaagaaaattctctgctgactggaaagaagatactggagaaaaaatgcctgtacatgaaagtttacctgcaatagggaatgtaaagtatcaatatttattttcagaaggaaaaggtttatgggaaaaatatggagcgcttataaagcaggctaaaacgtctttaattattgctacaccatattttgtaccaagtaaagaaatgataaaagcgttaaaagatgcattaaaccgtggtgtcaatgtaaaaattctcgtaccatttaaaagtgatgcagtattgttaaaacaagctgcctatccgtatttgaaagacatgttacatgctggagcagagatttatcaatatcagaatggtttttttcatgggaaagtaacaatcattgatggggaaagtgttgatattggtaccgcaaactttgataatagaagtttttatttaaatatggaatccaattgtgttatctatgataagggagtaacagcggacgtatggagtcgattaaaagaagactttcataaatcaaaaagattttcggaagaagattttgagaaaattagtaaatgggattggtttttagcaagaatagcaaatgttatagcatcatatttatag

SEQ ID NO: 98885 - protein, 367 aa, Bacillus anthracis str. Ames
MASEYELGQVRLGEFQLYTNGEELYTKLFEDIRNAEKYIYIHFYIVGKDEISKEFLQLLEKKASGGVEVKLSVDRIGGYKLKKKIIRQLKSNGVQFTFSKKPKLKHIFYSLHQRNHRRIVTIDGKVSYVGGFNIGKEYLGQNPKFGPWRDYHVRVKGNGATDMERKFSADWKEDTGEKMPVHESLPAIGNVKYQYLFSEGKGLWEKYGALIKQAKTSLIIATPYFVPSKEMIKALKDALNRGVNVKILVPFKSDAVLLKQAAYPYLKDMLHAGAEIYQYQNGFFHGKVTIIDGESVDIGTANFDNRSFYLNMESNCVIYDKGVTADVWSRLKEDFHKSKRFSEEDFEKISKWDWFLARIANVIASYL

SEQ ID NO: 98886 - DNA, 1386 bp, Rhodopirellula baltica SH 1
  CDS (1)..(1386): transl_table=11
atgatttggattgtcgcctacatcagcagcgtgctgggagcattcctgacaatcgttgcgatgacagtgattcgccacgaagaacgccacaacgtcggtcgactcggctggctaggactcgtcttgctctcaccaccgattggtttggtgctcttcctatggctgggtggccgaaaaatctccgctgaacattcacagcgcaaattggtcgatttgccagcagcggcggatggcagcgatcgctcacggtccggcttggaacgcatgctcgaaaagcgaggtctgcggtctccgacggttggaaaccaagtccgattgcttcaccgtaccaccgatgtcctcgatgcctatttggagctgatcgacgaagcgaaagaagtcttgtacgtgatgaccttcatcatggatgaacgaaaaagcacccagcgaatcgtggagcgtctctgcgcccgtgctcgggaaggcgtccaggtgagactactttgtgacggatttggctcgttcctcatgtccgacgaacaactcgaacaaattcgcgaagcaggcggtcgtgcgatgcgattcaagccgatgtcgcaactcagtcggctggcctatttgaatttccgcaaccaccgcaaacttgccgtcgccgatggacggcgtgcaatcttgggcggagccaacttggtcgaggaagaacttgacatcaacgaagacgacgaaagctgggtcgacatgagcatcctcatcgaaggccctgcggcggctcagttgcaagcggtcttttgcagcgattggaactttgtcgccgaagaggaactgccacccgtcgactatgagtgtcccaatccacctaaacatcccgaaaacacccgcatgacggtgatgccgatcggccccgacggccccgaggagatcctggaagacttttggaattacgccatcaatcgtgccgaagaacgcgtgtggatctgcacgccttacttcgttccgaccgcgcaatcgatgaggtgtttggaatccgcatgtcgacgtggcattgatgtccgcatcctagtccctgacgacagcgaccttgctccggttgattacgcacgcatcgattacatggacgacctgcaatacctcggtgccaagctctaccgttatcaagacagcatggtgcacgcgaaactcggcatcgtggatgacttcaccgccgtggttggttctgccaactttgacgtccgatccttctttctcaactacgaactgtcggtggtcattcacgatcaacccaccatccaaaagttcagcgactggtacgaatcactcctgccaaattgcgaactcggattgcccgagcacacggcatggcgttcaacgctggggctttgcgcgaggctgtttgcatcagagctgtag

SEQ ID NO: 98887 - protein, 461 aa, Rhodopirellula baltica SH 1
MIWIVAYISSVLGAFLTIVAMTVIRHEERHNVGRLGWLGLVLLSPPIGLVLFLWLGGRKISAEHSQRKLVDLPAAADGSDRSRSGLERMLEKRGLRSPTVGNQVRLLHRTTDVLDAYLELIDEAKEVLYVMTFIMDERKSTQRIVERLCARAREGVQVRLLCDGFGSFLMSDEQLEQIREAGGRAMRFKPMSQLSRLAYLNFRNHRKLAVADGRRAILGGANLVEEELDINEDDESWVDMSILIEGPAAAQLQAVFCSDWNFVAEEELPPVDYECPNPPKHPENTRMTVMPIGPDGPEEILEDFWNYAINRAEERVWICTPYFVPTAQSMRCLESACRRGIDVRILVPDDSDLAPVDYARIDYMDDLQYLGAKLYRYQDSMVHAKLGIVDDFTAVVGSANFDVRSFFLNYELSVVIHDQPTIQKFSDWYESLLPNCELGLPEHTAWRSTLGLCARLFASEL

SEQ ID NO: 98888 - DNA, 1476 bp, Rhodopirellula baltica SH 1
  CDS (1)..(1476): transl_table=11
atgatggatctcggacaatactttcaaattcatatcgatgcggtttcgatcgggttggtcgcgcacgtcaccatagaagccatcaccatcattcgcgtgatgacgcggccccatcgcgaaccggcgtctcgtgtcgcttgggtcaccatcattgcagcggtgccgtttttaggtgtgctgctgtatgtgttgtttggcgaaaccaacatcggtcgtcgccgaatggaacgcatgaagcaagtgatcaaacgcttgccgacgatgccagagatcaatcctgaggaatctcggaacacattggccaacgtcccaatccgataccagcatttgtttcgaatgggtgaatcaatcaatggattcgaagcgatcggtggcaactccggaacgttgatgcaagattctaactccgccgtcgactccatgatcgccgacatcgatcgagcaaccgaccatgtgcatttgctcttctacatttggttgcccgacaacaacggattgaagatggtggaggcactcaaacgagcggcgaagcgaggcgttacttgccgagcgatggcggatgacttggggtcacggacaatcattcgatcgactcattggaaggagatgcaggaagccggcgttcatctttcgagaactttgccaattggcaacttgatgctacgtgcacttcgcggacgcatcgaccttcgcaatcaccgaaaaatcctggtgatcgatggatcggtcacgtactgcggaagccagaactgcgccgatcccgaattccgcgtcaaacccaagtacgctccctgggtcgacgctgtgattcgtttcgaaggaccggtggtcagacagaaccaagaactctttgtcgctgattggatggccggtaccgatgacgacctgaccgatctgctcgaccgaccgcttcccaacaccgggcctggtttttcagcgcaagtcattggaacgggaccaaccgttcgcgattctgccatgcccgaggttttcgaaacgttgttccacacggcgagacgcaaactgacaatttcaacgccgtactacgtgcccaacgaatccatgcaacaagctctctgcgccgcggcatggcgaggcgtcgaaacaaccatcatcctgcccgccaacaatgattcgcgaattgttgggggagccagccgaagctactacgcgggactgctagaagccggcgtccgaatctacgaatacaccggtgggttgttgcataccaagtctgtgactctggatgacgaagtcactctgatcggttccgccaacatggatcgccgcagctttgatctgaactacgaaaacaacattttgtttcatgacccgcaactgaccgctgatgtcttcgcgagacaacgcgtctatatcgaacgctccaacgagatcacggcacagcaggtttccgactggtcgcttccccggcgactgtggaacaacgtgctggcgacactcggcccgattctttag

SEQ ID NO: 98889 - protein, 491 aa, Rhodopirellula baltica SH 1
MMDLGQYFQIHIDAVSIGLVAHVTIEAITIIRVMTRPHREPASRVAWVTIIAAVPFLGVLLYVLFGETNIGRRRMERMKQVIKRLPTMPEINPEESRNTLANVPIRYQHLFRMGESINGFEAIGGNSGTLMQDSNSAVDSMIADIDRATDHVHLLFYIWLPDNNGLKMVEALKRAAKRGVTCRAMADDLGSRTIIRSTHWKEMQEAGVHLSRTLPIGNLMLRALRGRIDLRNHRKILVIDGSVTYCGSQNCADPEFRVKPKYAPWVDAVIRFEGPVVRQNQELFVADWMAGTDDDLTDLLDRPLPNTGPGFSAQVIGTGPTVRDSAMPEVFETLFHTARRKLTISTPYYVPNESMQQALCAAAWRGVETTIILPANNDSRIVGGASRSYYAGLLEAGVRIYEYTGGLLHTKSVTLDDEVTLIGSANMDRRSFDLNYENNILFHDPQLTADVFARQRVYIERSNEITAQQVSDWSLPRRLWNNVLATLGPIL

SEQ ID NO: 98890 - DNA, 1476 bp, Candidatus Blochmannia floridanus
  CDS (1)..(1476): transl_table=11
atgacgctaacgatttacagtatactgaattatacttttatatgtagttactggatattaaccattataataataattcgagtgttaataaaacgtcgaactgtatcatcctttatggcgtggttattaacaatctatattgtaccattcatgggaattattctatacttattatgcggagaatctaatcttggtaaaaaacgatcacttagaagtaagatagcacaatccactagcattcgtcgtatacaagaactcaaaaaccataaacatatattctcaaataaaaacagtaaaattgcttcttctttatttaaactatgtgaacttcgacaaggaataggagcattaaaaggtaaccaaatacaattattcaaaaaaatcgataatactcttgcatctttaataaaagatatagatttagccaaacacaatatcgatatggtattttatatttgggaacctggtggactagtagatcatattgtaactaaattaattatcgctgctcaacgaggtgtaaaatgccgtttaatactagattctgttggatgtataaatttttttaatagttcatatccaaaaatactaaaaaaagctggaataaacattgccgaagcactacatattaatttattacgaatattcttcaggcgtatggatttaagacagcaccgtaaaatgatattgattgacaatcatattgcttatactggtagtatgaatatggtcgatccgaaattatttaaacaaaatattggagttggtcaatggattgatatcatgattcgtatagatggccccgcaaccacagttatgagaataatttttgaatttgattgggaaatagaaacaggggaacatattgttcctgtattatctagttctcaacatttaatgcaacaaaaaactaccttaatatcaactggtcacaccattcaaattattccttcggggccaggttttccagaaggaataattcatcaagtactcattacatcattatataaagctcgtaaacaattaattatcacaacaccatatttagtacccagtgatgatttattatatgctatttgtgcagcagctcaaagaggagtaaaagtacatatcattattccaaaaaacaacgattctgtattagttaattgggcaagtcgagctttttttagtgaattattagacgctggagtattgattcatcgatttcaaaaaggattattacatgtaaaaagtatactaattgatcatcaactcagtttaataggtaccgtaaatttagatgttcgtagtatatggttaaattttgaaattactttattaatcgatagtaaactttttaataaagatttagaaaaaatacaattagactatattgcccattcaaaactaattgatgcacaaaaatggtcaaaacgaccttattggaaacgcattattgaacgtttattttatttcttcagtcctttattataa

SEQ ID NO: 98891 - protein, 491 aa, Candidatus Blochmannia floridanus
MTLTIYSILNYTFICSYWILTIIIIIRVLIKRRTVSSFMAWLLTIYIVPFMGIILYLLCGESNLGKKRSLRSKIAQSTSIRRIQELKNHKHIFSNKNSKIASSLFKLCELRQGIGALKGNQIQLFKKIDNTLASLIKDIDLAKHNIDMVFYIWEPGGLVDHIVTKLIIAAQRGVKCRLILDSVGCINFFNSSYPKILKKAGINIAEALHINLLRIFFRRMDLRQHRKMILIDNHIAYTGSMNMVDPKLFKQNIGVGQWIDIMIRIDGPATTVMRIIFEFDWEIETGEHIVPVLSSSQHLMQQKTTLISTGHTIQIIPSGPGFPEGIIHQVLITSLYKARKQLIITTPYLVPSDDLLYAICAAAQRGVKVHIIIPKNNDSVLVNWASRAFFSELLDAGVLIHRFQKGLLHVKSILIDHQLSLIGTVNLDVRSIWLNFEITLLIDSKLFNKDLEKIQLDYIAHSKLIDAQKWSKRPYWKRIIERLFYFFSPLL

SEQ ID NO: 98892 - DNA, 1458 bp, Bordetella pertussis Tohama I
  CDS (1)..(1458): transl_table=11
atggacccattggaacaattgctgcgcgactattggccgcatatcgtctttgcgatcagcgtggtcgccggcaccggcgccgccgtgcatgccgccatgaccaaacaggatgtgcgcgccgccatcgcctgggtcggggtcgccctgttctcgccgctctttggcgccctgctctatttcgtcgccggcatcaaccgcatccgccgttcgctggtgtcgcagcagcacgacgacgccatgctggcctacacgggccatcccgacgcccaggtcgaggacgtggtcccctgcagcggtccgcaattcgcctcgctgcgcgtgctgggcgaccaggtcagccgcttccgcctgctgggcggcaaccaggtgcggccgctggccggcggcgacgaggcctatcccgccatgatgcaggcgatacgcgaggcgcgcgtctcgatcgccatgcaaagctatatcttcgactgcgatccgatcggccgcgaaatggcgcaggccctggtcgaggcgcagcagcgcggcgtgcaggtgcgcgtgctcatcgatgccatcggcagcaagtactcccgtccgccgatcgttcgtacgctggtgcgcggcggcgtgcgcaccgcgcgcttcatgaccaacccgctgggcgtcatgcgcatgccctacgccaacctgcgcagccaccgcaagatcctggtggtcgacggacatgtcggcttcaccgggggcatgaacatccgcgccgccttcgtgacggccctggccggcaaggccgccaacggcgatacccacttccgcctggaaggtccggtggtggcgcaactgatggcggttttcgcgcacgactggaatttcacgacccgcgaatccctggaaggcccgacctggttcccgccggctcccgaacgcgcgccgggctcggtgccgatgcgctgcgtggcctcggggccggacagcgccctgggcagcacgcacaagatgctgctgggcgcgctggcggtggcgcagcgccatgtgcggatccaatccccctatttcctgcctgaccagacgctgatcggcgcactggggaccgccgcgcgccgcggcatcaaggtcgatatcgtgattccgggctcgaacaacctgcgcctggtcaactacgccatgagcgcacaactggaccaggtcatccgcacgggctgccgcgtatggcgctcggccggcgccttcgaccactcgaagctgctgacggtggacgatgcctggtcctatgtgggctcgtccaacatggacccgcgcagcctgcgcctgaacttcgagctggacaccgaaatctacgatcgtgagctggccggctggatcgggcagcgcatcgacgcgcagatccgccacgcgcggcaggaaacactgcaggccctgaacgcgcagccgttcatcaagcgcctgcgcaacaaggtgatctggctggctacgccatatctctag

SEQ ID NO: 98893 - protein, 485 aa, Bordetella pertussis Tohama I
MDPLEQLLRDYWPHIVFAISVVAGTGAAVHAAMTKQDVRAAIAWVGVALFSPLFGALLYFVAGINRIRRSLVSQQHDDAMLAYTGHPDAQVEDVVPCSGPQFASLRVLGDQVSRFRLLGGNQVRPLAGGDEAYPAMMQAIREARVSIAMQSYIFDCDPIGREMAQALVEAQQRGVQVRVLIDAIGSKYSRPPIVRTLVRGGVRTARFMTNPLGVMRMPYANLRSHRKILVVDGHVGFTGGMNIRAAFVTALAGKAANGDTHFRLEGPVVAQLMAVFAHDWNFTTRESLEGPTWFPPAPERAPGSVPMRCVASGPDSALGSTHKMLLGALAVAQRHVRIQSPYFLPDQTLIGALGTAARRGIKVDIVIPGSNNLRLVNYAMSAQLDQVIRTGCRVWRSAGAFDHSKLLTVDDAWSYVGSSNMDPRSLRLNFELDTEIYDRELAGWIGQRIDAQIRHARQETLQALNAQPFIKRLRNKVIWLATPYL

SEQ ID NO: 98894 - DNA, 1545 bp, Bordetella bronchiseptica RB50
  CDS (1)..(1545): transl_table=11
ttgttgctatccttgcgcatccgtacccacataccggacccgccgctggcggccccggctgccacgcaagcctttctcccggacgccatggacccattggaacaattgctgcgcgactattggccgcatatcgtctttgcgatcagcgtggtcgccggcaccggcgccgccgtgcatgccgccatgaccaaacaggatgtgcgcgccgccatcgcctgggtcggggtcgccctgttctcgccgctctttggcgccctgctctatttcgtcgccggcatcaaccgcatccgccgctcgctggtgtcgcagcagcacgacgacgccatgctggcctacacgggccatcccgacgcccaggtcgaggacgtggtcccctgcagcggtccgcaattcgcctcgctgcgcgtgctgggcgaccaggtcagccgcttccgcctgctgggcggcaaccaggtgcggccgctggccggcggcgacgaggcctatcccgccatgatgcaggcgatacgcgaggcgcgcgtctcgatcgccatgcaaagctatatcttcgactgcgatccgatcggccgcgaaatggcgcaggccctggtcgaggcgcagcagcgcggcgtgcaggtgcgcgtgctcatcgatgccatcggcagcaagtactcccgtccgccgatcattcgtacgctggtgcgcggcggcgtgcgcaccgcgcgcttcatgaccaacccgctgggcgtcatgcgcatgccctacgcgaacctgcgcagccaccgcaagatcctggtggtcgacggacatgtcggcttcaccgggggcatgaacatccgcgccgccttcgtgacggccctggccggcaaggccgccaacggagatacccacttccgcctggaaggtccggtggtggcgcaactgatggcggttttcgcgcacgactggaatttcacgacccgcgaatccctggaaggcccgacctggttcccgccggctcccgaacgcgcgccgggctcggtgccgatgcgctgcgtggcctcggggccggacagcgccctgggcagcacgcacaagatgctgctgggcgcgctggcggtggcgcagcgccatgtgcggatccaatccccctatttcctgcctgaccagacgctgatcggcgcactggggaccgccgcacgccgcggcatcagggtcgatatcgtgattccgggctcgaacaacctgcgcctggtcaactacgccatgagcgcacaactggaccaggtcatccgcacggggtgccgcgtatggcgctcggccggcgccttcgaccactcgaagctgctgacggtggacgatgcctggtcctatgtgggctcgtccaacatggacccgcgcagcctgcgcctgaacttcgagctggacaccgaaatctacgatcgtgaactggccggctggatcgggcagcgcatcgacgcgcagatccgccacgcacggcaggaaacactgcaggccctgaacgcgcagccgttcatcaagcgcctgcgcaacaaggtgatctggctggccacgccatatctctag

SEQ ID NO: 98895 - protein, 514 aa, Bordetella bronchiseptica RB50
MLLSLRIRTHIPDPPLAAPAATQAFLPDAMDPLEQLLRDYWPHIVFAISVVAGTGAAVHAAMTKQDVRAAIAWVGVALFSPLFGALLYFVAGINRIRRSLVSQQHDDAMLAYTGHPDAQVEDVVPCSGPQFASLRVLGDQVSRFRLLGGNQVRPLAGGDEAYPAMMQAIREARVSIAMQSYIFDCDPIGREMAQALVEAQQRGVQVRVLIDAIGSKYSRPPIIRTLVRGGVRTARFMTNPLGVMRMPYANLRSHRKILVVDGHVGFTGGMNIRAAFVTALAGKAANGDTHFRLEGPVVAQLMAVFAHDWNFTTRESLEGPTWFPPAPERAPGSVPMRCVASGPDSALGSTHKMLLGALAVAQRHVRIQSPYFLPDQTLIGALGTAARRGIRVDIVIPGSNNLRLVNYAMSAQLDQVIRTGCRVWRSAGAFDHSKLLTVDDAWSYVGSSNMDPRSLRLNFELDTEIYDRELAGWIGQRIDAQIRHARQETLQALNAQPFIKRLRNKVIWLATPYL

SEQ ID NO: 98896 - DNA, 1422 bp, Porphyromonas gingivalis W83
  CDS (1)..(1422): transl_table=11
atgattgcactcttaataatcgtatacatgctgatgacggctgccgtcagtgctgtcattatcagcgagaatcgcaatccactgaaggctacttcgtggattctggtcgtctcttttgtacccgtcttggggcttattgtctatatctttttcggacaggatcagcgcagacggcgtattgtcagccgccgtatatacaagcgcatcatgctgaagcctcactatctgtccatccccgaagcacagttggaagccatgaacaatatccagctgaatcccatcatgaagctgatcaacaacaactcggacagccccgtcatgctcagctcgccgccggatatattcacggcagggaaggatatgttcgactgcttctttcgcgacatagaggctgcccgccaccatgtgcatattcagttctacgtcatagaggatgaccatctgggcagtcgcctgtccgatctgcttatacgcaaggtgcaagagggcgtgaaggtgagggtcatattcgatcatgtgggttcgtgggctacgggccgtggctactggaaacgactgcgccgagccggagtggaagcctatccttttatgccggtcttcttccccatactgtccagccgcgtaaactaccgcaatcaccggaaggtagccgttatagatggtaaaataggctatttgggcggtatgaatgtggccgatcgctattactcgggcaacaggctcggtctgtggcgcgatactcacttccgtatgatgggcaatgtggtggccggtttgcagagcagtttcctgctggactggtatgtcgtatcgcgacgagtcatcaatctctccggctactatcccgatctgccgatacccgtatccgacgagggtgtgaagatacagctcgtacgctccggccccgtggggcaatggcgtaccatcgagcaggccaccatctactgtatcgagcgtgcctgcgaacatgtctatatcgagactccttacttccttccgaccgaaggactgaataatgctctcatcacggcagctttggccggcatcgatgtacacctgctggtgcccaaacgaagcgatgcccgtctgccacaagtggcggccttctcctatgtggaggatctcttgcaggccggtgtacatgtacacctctataccaacggctttctccattccaagctgataatggtggatagtcaggtggcttcgatcggctctacgaatatggacttccgcagcttggaaaataacttcgaattcaatggtatcatctatgacgagcctactgtccaccgattggaagccatcttcttcgaggacttgttgcagagcgaaccgctcgatctcaaacgctggcgaaagagaagccggataaaaaaattcagcgaatcctttgttcgccttttctctcctctgctctaa

SEQ ID NO: 98897 - protein, 473 aa, Porphyromonas gingivalis W83
MIALLIIVYMLMTAAVSAVIISENRNPLKATSWILVVSFVPVLGLIVYIFFGQDQRRRRIVSRRIYKRIMLKPHYLSIPEAQLEAMNNIQLNPIMKLINNNSDSPVMLSSPPDIFTAGKDMFDCFFRDIEAARHHVHIQFYVIEDDHLGSRLSDLLIRKVQEGVKVRVIFDHVGSWATGRGYWKRLRRAGVEAYPFMPVFFPILSSRVNYRNHRKVAVIDGKIGYLGGMNVADRYYSGNRLGLWRDTHFRMMGNVVAGLQSSFLLDWYVVSRRVINLSGYYPDLPIPVSDEGVKIQLVRSGPVGQWRTIEQATIYCIERACEHVYIETPYFLPTEGLNNALITAALAGIDVHLLVPKRSDARLPQVAAFSYVEDLLQAGVHVHLYTNGFLHSKLIMVDSQVASIGSTNMDFRSLENNFEFNGIIYDEPTVHRLEAIFFEDLLQSEPLDLKRWRKRSRIKKFSESFVRLFSPLL

SEQ ID NO: 98898 - DNA, 1443 bp, Gloeobacter violaceus PCC 7421
  CDS (1)..(1443): transl_table=11
atgctcgctcaggaggcgacactttttagcctgctggtccttgctgtccatgggctggggattgccaacgccgcccatgccgtgatgcatgtgcgctcatctcggggggcagtggcctggagcattgggctgattacttttccgtggctcgccatcccgctgtactgggtctttgggcgcaaccgctttttgggctacgccgaggccatccgtaccgcctacgagcagcaccaccgccgcatcgacagagcctacgacggcctgctggagcatcgagcacagcttcctgcgcgcttggccccggtggaacaactgggcgaacaactcgccagtctgccgtttttgaccggcaacaccgcccggttgctcatcgacggccgcgaaacgtacgacgcgatgctctcggccattgccggggccgagcactatgtgttgttgcagtcgtacatcgtcgaggcggatcgctcgggtgaagtgttcaaacaggcgctcatcgagcgggtcggggccggagtgcgggtgtatgtgctctacgacgaaatcggcagcaaccacctgccccgttcctacatcgacgatttgcgccgccacggcgtcgaggtgagtgcctttcacagcaccaagggttggaagaaccggctgcagatcaactttcgcaaccacacgaagatcctggtggtggatggtcgggtcgcctgcgtgggcggactcaacatcggcgatgcatatcttggagagggcaaaaacccgcagctgcgcccctggcgagacacccatttgcgcctcaccggtcccgccgtccagtgtttgcagttgattttcctgcgcgactggtactgggcgacgggcgaatcgccgccggtcgaatggcgggtgcacgccgagcgggaagcgggggcggcggccctggtgctgcgcaccggtccggcggacagcttgcccgcctgcacgctgttttttgtggatctgatccagcaggcccgcgagcgcctgtggcttgccagtccttacttcgtgcccccggaaccggtgttgcttgccttgcaactggcggcgatgcggggagtcgatgtgcgcataatgctcccggagcatccggatcacctgctggtctatctgtgtgccttttcgttctacgacgacctggcccgcaccgacatcaagctctaccgctaccagaaaggtttcatgcaccagaaggtgatcctggtggaccgcgaaattgccggggtcggcaccgccaacctcgacaaccgctcgttcaccctcaacttcgaggtaatgaactacattgtggatcccgattttgtgaaaagcgtcgaagcgatgctgatggcggatctggacgtctgccgccaggtcgattaccgggaataccgccgcaaacctttgtggtttcgcctcgcggtgcgcatttcccgtctcctggcaccggtgctgtag

SEQ ID NO: 98899 - protein, 480 aa, Gloeobacter violaceus PCC 7421
MLAQEATLFSLLVLAVHGLGIANAAHAVMHVRSSRGAVAWSIGLITFPWLAIPLYWVFGRNRFLGYAEAIRTAYEQHHRRIDRAYDGLLEHRAQLPARLAPVEQLGEQLASLPFLTGNTARLLIDGRETYDAMLSAIAGAEHYVLLQSYIVEADRSGEVFKQALIERVGAGVRVYVLYDEIGSNHLPRSYIDDLRRHGVEVSAFHSTKGWKNRLQINFRNHTKILVVDGRVACVGGLNIGDAYLGEGKNPQLRPWRDTHLRLTGPAVQCLQLIFLRDWYWATGESPPVEWRVHAEREAGAAALVLRTGPADSLPACTLFFVDLIQQARERLWLASPYFVPPEPVLLALQLAAMRGVDVRIMLPEHPDHLLVYLCAFSFYDDLARTDIKLYRYQKGFMHQKVILVDREIAGVGTANLDNRSFTLNFEVMNYIVDPDFVKSVEAMLMADLDVCRQVDYREYRRKPLWFRLAVRISRLLAPVL

SEQ ID NO: 98900 - DNA, 1470 bp, Photorhabdus luminescens subsp. laumondii TTO1
  CDS (1)..(1470): transl_table=11
ttgccgaatatgacaaccttttattccgtcctaagttggcttgctattttcttttattggctgattgttgccagtatcactttacgcattctgataaaacgccggccggtcacttctgctatgacctggctgctgattatctatatcctacccttagttggaatcatcgcttacctgtcatttggtgagctgcatttgggaaaacgcagagttgaacaagcaaaagccatgtggccttcaacaaccgtatggcttgaagaattgcgcaaatctcgccatatcttcgcgacagaaaatagcgaagtcgcgacaccactattccagctttgcgaacgacggcaagggctggcgggtgttaaaggtaacaagatccaactactgaaaacctatgaccattcactaaaaaccattatcaaagatattgagaatgccaaacacagtattgatatggtgttttacatctggcaaaccggcggcttggttgagcaagtgacggatgctcttatggccgcagcacaccgaggagtcagatgccgtattatggtggattcagccggtagctggttatattgccgtagccaatacccggatatcatgcgccaggcgggaattgaatttgttgaagctttgcaagtcaatatattccgtctatttctacgccgtatggatctgcgccagcatcgtaaaattatcttgatagacgattatatctcttatgccggcagtatgaatatggtcgatccacgcttttttaaacaagatgccggtgttgggcaatggatcgatatcatggtacgaatggaaggaccggttactacaaccatgggggttatttacgcttgtgactgggaaatggaaacaggtcaacgtatctttccgccatcaccagataacaatatcatgccatttgaacaggccagtggacacacaactcaggttattgcatccggccccggattccctgaggagttgattcaacaatctttaatgacggctattttctctgcccgtaagcaactgattttaactaccccttattttgttcccagtgatgacctgacaaatgctatttgcaccgccgctttacgaggggttgaggttattattatcgttccacgcagaaataatttctttttagttcgttgggcaagccgggcattttttgctgaactattaaacgccggtgttaagatttatcaatttgaagatggattgctacatactaaaagcgttttagttgatggccaactcagcatggtgggttccgttaatctcgatatgcgtagcctgtggctaaatttcgaaattaccgtggtgattgatgatgaaaactttggtaatgatctgacgctggtgcaatacgattatatcgcccattctacattgctggaaactcatgagtgggaacaacgccctttgtggcatcggattattgagcgtatttgttacttctttagcccgctactgtga

SEQ ID NO: 98901 - protein, 489 aa, Photorhabdus luminescens subsp. laumondii TTO1
MPNMTTFYSVLSWLAIFFYWLIVASITLRILIKRRPVTSAMTWLLIIYILPLVGIIAYLSFGELHLGKRRVEQAKAMWPSTTVWLEELRKSRHIFATENSEVATPLFQLCERRQGLAGVKGNKIQLLKTYDHSLKTIIKDIENAKHSIDMVFYIWQTGGLVEQVTDALMAAAHRGVRCRIMVDSAGSWLYCRSQYPDIMRQAGIEFVEALQVNIFRLFLRRMDLRQHRKIILIDDYISYAGSMNMVDPRFFKQDAGVGQWIDIMVRMEGPVTTTMGVIYACDWEMETGQRIFPPSPDNNIMPFEQASGHTTQVIASGPGFPEELIQQSLMTAIFSARKQLILTTPYFVPSDDLTNAICTAALRGVEVIIIVPRRNNFFLVRWASRAFFAELLNAGVKIYQFEDGLLHTKSVLVDGQLSMVGSVNLDMRSLWLNFEITVVIDDENFGNDLTLVQYDYIAHSTLLETHEWEQRPLWHRIIERICYFFSPLL

SEQ ID NO: 98902 - DNA, 1434 bp, Corynebacterium diphtheriae NCTC 13129
  CDS (1)..(1434): transl_table=11
ttgatagattggcaaacagctggcctgatcatcgactacgccatcaaaatcgtagccatcggattcgtccccgaaggccgtcgtccctccagctccaccgcatggctcctcgccattttgctgctcccctttgtaggcctacccctcttcttgctgatgggcagcccctacatcaaccgccgccgtcacgacgtccaacgccgcgccttccaaatgatcagggaacgccaatcccacgtacccgactacccgccagacaccgtccaaagccctgagctgacctccatgatccgcatgaaccgtcggctcaccgccatgacggccaccaccggatcagtaaaactacactccgattacgaagaaaccatccaagcgatggccgatgccgtagaccaagcccgcgattacgtccacgtacagatctacatcgttgcttgggacgacaccaccgacgtattcttccgagcacttgaacgcgcagtccaacgaggcgtagaagtccgcctcctcttcgaccaagtaggcagctggaaatacccaggctaccgccgcctcggcaaacgcctcaccgccatcggagtggacttccacctcatgctgcccctgcagcccttccgctggcgcttccgccgacccgacctgcgcaatcaccgcaagctactcattatcgacggccaacgcggcttcctcggctcccaaaacatgattgccccccactacaccccacgcaatcgcgccaaaggccgtcactgggttgacgtgatggtcgagctcgaaggccccatcgtggcctccatgaacaccgtctttgttgtcgactggtcccaagaaagccacatcgtcccagaattcgaagtacccccagccgaccacggcgacgttatgcaaatcgtcccctccggcccaggttttagcaccgaaccaaacctccggctgttcaacgagatgatccaccacgccaaaaaccagctgatcatgtgcagcccttacttcattcccgacgaatccatgctcgaagcagtcacctccgcctgctaccgcggagtacgcgtagaactcctcgtcagcgaacaagccgaccaatttgttgttgatcacgctcagtccagctattatcagacgcttctcgaagccggcgtacacatctaccgctaccacgcccccgccgtgctccacagcaagttcctcatcgcagacccccacggcgtggccgtctccgtgatgggttcctccaacatggacatgcgcagcttcggcctcaactacgaagtctccctcatgacactccaaggccaactcacccacctgctttacgagctagccgaaacctacaaagaaaactccaccgaactcaccctcgaagaatggaaccagcgcggaatcgtccgccgctacgtagacaacatcatgaaactgacctcagcgctgcaataa

SEQ ID NO: 98903 - protein, 477 aa, Corynebacterium diphtheriae NCTC 13129
MIDWQTAGLIIDYAIKIVAIGFVPEGRRPSSSTAWLLAILLLPFVGLPLFLLMGSPYINRRRHDVQRRAFQMIRERQSHVPDYPPDTVQSPELTSMIRMNRRLTAMTATTGSVKLHSDYEETIQAMADAVDQARDYVHVQIYIVAWDDTTDVFFRALERAVQRGVEVRLLFDQVGSWKYPGYRRLGKRLTAIGVDFHLMLPLQPFRWRFRRPDLRNHRKLLIIDGQRGFLGSQNMIAPHYTPRNRAKGRHWVDVMVELEGPIVASMNTVFVVDWSQESHIVPEFEVPPADHGDVMQIVPSGPGFSTEPNLRLFNEMIHHAKNQLIMCSPYFIPDESMLEAVTSACYRGVRVELLVSEQADQFVVDHAQSSYYQTLLEAGVHIYRYHAPAVLHSKFLIADPHGVAVSVMGSSNMDMRSFGLNYEVSLMTLQGQLTHLLYELAETYKENSTELTLEEWNQRGIVRRYVDNIMKLTSALQ

SEQ ID NO: 98904 - DNA, 1191 bp, Geobacter sulfurreducens PCA
  CDS (1)..(1191): transl_table=11
atgtccatcgttcgccgcaaaatgattatgggcactccccgcgccccccgctttctgagggtcttcaggcggaacgccgaggcagcccattcccggggaaacagggtgaaactgttcacctcgggggctgatttctttccggccatgctcggcgcctttgccgaggcgcgccaccatatccacgccgagttctatattgtgcgcgacgacgccacgggcgcggcctttgccgaagcactgctggccgccgctgcccgcggggtggaagtctcccttatctatgactacattggttgcttcgacacaccttccgcctatttccgccggctggaacagggcggagttcgctgcctcgccttcaatcctccccccttcaaggggggaatcgcttggttcgacaagcgggatcaccgcaagatggctgtggtcgacggggaaaccgcgttcacgggcggagtcaatgtcggcgacgagtattcggggttcggctttccccatgaacggtggagggatgtgggcatcaggatcgacggaccggcggtcatagatctgtcgcggctctttcgggggttctggcttgctgagaaggggagttcctcaccggcttggcatcaggagcgcctgcccgtggccgcggtcggtgatgccgacgtaatggtcatcagtgacggcccttaccatgcccgttcctttatccgcaatgccttccgtatcgccatggccggcgcgggcgagtcgatccggatcatgaatccttacttcgtgccgggaccgcgggtggttcggtctctgctgcgggccgtccggcggggcgtcagagtccagatcatacttcccgccaagaacgatgtgcccatcgtgcgtctcgtgagccgcagctactatacccccctcctgcgggagggaatcgaactcttcgagcgccaggggccggttctccacgccaaggtcatgctcattgacgacgcctggggggtcgtcggctcggcaaatctcgaccagcgcagttttcaccgcaactatgaggtgaataccatcgttgccagccacgagttcggcagccaggtggcggaaatgttcgccgaggaccttgccggatcgcgacgtgtggtccttgaggaacacgagcagcggggctggcatgtacgcttgctggagcgtctctgcggatcggtgagctggtttctgtag

SEQ ID NO: 98905 - protein, 396 aa, Geobacter sulfurreducens PCA
MSIVRRKMIMGTPRAPRFLRVFRRNAEAAHSRGNRVKLFTSGADFFPAMLGAFAEARHHIHAEFYIVRDDATGAAFAEALLAAAARGVEVSLIYDYIGCFDTPSAYFRRLEQGGVRCLAFNPPPFKGGIAWFDKRDHRKMAVVDGETAFTGGVNVGDEYSGFGFPHERWRDVGIRIDGPAVIDLSRLFRGFWLAEKGSSSPAWHQERLPVAAVGDADVMVISDGPYHARSFIRNAFRIAMAGAGESIRIMNPYFVPGPRVVRSLLRAVRRGVRVQIILPAKNDVPIVRLVSRSYYTPLLREGIELFERQGPVLHAKVMLIDDAWGVVGSANLDQRSFHRNYEVNTIVASHEFGSQVAEMFAEDLAGSRRVVLEEHEQRGWHVRLLERLCGSVSWFL

SEQ ID NO: 98906 - DNA, 1443 bp, Geobacter sulfurreducens PCA
  CDS (1)..(1443): transl_table=11
gtgatttcatacttggatgacgtatttttatttgtgtgcgcaggaatcgcgattgccctttcggtgggctctgccggtcatgcccttgtcatgaagcgagacccccggtcagcactcgggtggatcgttgtctgcctcacggtcccgctgttcggtcccattttctactggagcatgggggtaaaccgcatcttccgccgggcccgcaagtggcaggaaacagggcgccgtctggctgggggagagcacttccgctcagcccaggagcatgaaagtgcgccgactcctccggcgggggccgaatacctctccgagctgcgccatctggccgatcgggtggtgggagcccctctggtccagggaaaccgtataatccccctggatggtggcgaaggggcgtaccccgccatgctggaagccatcgcccatgcccgatcctcggtccacctttctacctatatcttcgattccgacagcaccggccgccggttcatcactacgctggccgccgccgcggcgcgtggtgtcatcgtgcgggtgatcgtcgacggcgtcggtgaaaagtattcatggccccgtgccaggactctcatggaggggacgggaatcagggttgagcggttcctgccgttgcgacaggggatctacatgaatctgcgcaaccaccgcaaagtcttggtggtggacggccagctggcatttacgggggggatgaatatcggggaccggcatgtggctgaaaaggcgggtgacgccgtgtcgcgggatgttcacttctcggtggcgggtccggtggtggcggggcttcagcaggtcttccttgaggattggcacttcgtcaccggcgaacttcttgatgacacccggtatttccctccgatccagccggccggtcatgccctggcccgtcccatcggcgacgggcccgacaaggaataccatacgctccattggatcatcatgggagccctgtcgtgcgccactcggacggttcagatcatgacaccgtacttcatccccgaccgctcacttgtttcggccctggtcactacggcgttgcggggggtggaggtcaccctcgttttgcctgagaagaacaatcttccctttgtccactgggccaccagggcctatctctgggagcttatccagcagggaatcagagtgttttaccagccgcccccttttgcccacaccaagcttttcatcgtcgacggcctctggagcatgatcggctcggccaacctggatccccgcagccttcggctcaacttcgagctcaatctggaggtttacgatcgggagttggccggaaccctttcccgtcacttcgccgtaaccgttgcccgctcgcgacaggtgagcctgaccgagatggacggccgcccactccctgaaaaagtgcgggacgccacggccaagctcttttctccctatctgtag

SEQ ID NO: 98907 - protein, 480 aa, Geobacter sulfurreducens PCA
MISYLDDVFLFVCAGIAIALSVGSAGHALVMKRDPRSALGWIVVCLTVPLFGPIFYWSMGVNRIFRRARKWQETGRRLAGGEHFRSAQEHESAPTPPAGAEYLSELRHLADRVVGAPLVQGNRIIPLDGGEGAYPAMLEAIAHARSSVHLSTYIFDSDSTGRRFITTLAAAAARGVIVRVIVDGVGEKYSWPRARTLMEGTGIRVERFLPLRQGIYMNLRNHRKVLVVDGQLAFTGGMNIGDRHVAEKAGDAVSRDVHFSVAGPVVAGLQQVFLEDWHFVTGELLDDTRYFPPIQPAGHALARPIGDGPDKEYHTLHWIIMGALSCATRTVQIMTPYFIPDRSLVSALVTTALRGVEVTLVLPEKNNLPFVHWATRAYLWELIQQGIRVFYQPPPFAHTKLFIVDGLWSMIGSANLDPRSLRLNFELNLEVYDRELAGTLSRHFAVTVARSRQVSLTEMDGRPLPEKVRDATAKLFSPYL

SEQ ID NO: 98908 - DNA, 1470 bp, Lactobacillus johnsonii NCC 533
  CDS (1)..(1470): transl_table=11
ttgggagggatacttattttttcgaatgaattttgggcacttctttgggctgtcaacacaatcttagccttctatgttgtattccaccgaaaaagatctgtcgctacctcttgggcatggttaattattttactaatttttccaattttaggctttattttatatggttttattggacgtggattatcacaagaaaatctttttgccattaacaatcaaaaacacattggtttaaataaagtaaataagatgatcccgcgtgttcctaaatccgctgggccaacagatacttctaaagaagccaaaattttaattgattactttaactttaagcacgattcccccctttctaaaaacaacaaaatcagtttttatactgatggcgaaaagaagtttgaagctctttttaaagacatcgaacaagctcaagaaacagttaatgttgaatattattccttcatgaatgatgatttaggtaataaatttcttaatttattaattaaaaaagctcgcgaaggtgttaaggtaagacttatctatgatccttggggttctcctggagcttcaaagacttggtttaaacctttaactgatttgggcggtgaagttgtagcctttatcacagctcaaaacatgattaaaaagtatcggatgaattatcaccttcaccgtaaaattgtcgttatagacgggcgaatatcttggacgggcggctttaatgtcggagaccaatatgtcagcaaaagcaaaaaatttggctactggcgtgatactcatcttagaatcgtcggctccgcgtccctgctgttgcaggagcgttttgtaatggattggaatgcttcaattactgataaaaatcagacaatttcatttaatgaaaaactatttccaaaaattgaagaaaatcagctaacagaagatgatgttgcaactcaaattgtttcagatggtcctgatacttctacgccatatttacgtaatggcatgattagaatgatgatgatggctagaaaaacactctggattcaaacaccctatcttgttccagacgatccaatgattgccacttgggttattgcggctcattcaggcgttgacgtgcgtatcatgattccttcaatgcctgatcatccctttatttaccgcgctacacagtggtatgcaaattacctgctccatgagggaataaagatctatgtttatgataatggttttattcatgcaaaaaccgtcatggttgatgatcgcttcgctgcagctggatcaatgaatcaagactttaggtcatatagcttaaactttgagactgatgcagtcttctacgataaaaatattacccgggaattaaatcatatttttgaaaaagatttagctaaatgtacagaattgactttagaaattaccgataactggtcgcgttatcttcgatttaaacaagctttttctagattactttctcccattctataa

SEQ ID NO: 98909 - protein, 489 aa, Lactobacillus johnsonii NCC 533
MGGILIFSNEFWALLWAVNTILAFYVVFHRKRSVATSWAWLIILLIFPILGFILYGFIGRGLSQENLFAINNQKHIGLNKVNKMIPRVPKSAGPTDTSKEAKILIDYFNFKHDSPLSKNNKISFYTDGEKKFEALFKDIEQAQETVNVEYYSFMNDDLGNKFLNLLIKKAREGVKVRLIYDPWGSPGASKTWFKPLTDLGGEVVAFITAQNMIKKYRMNYHLHRKIVVIDGRISWTGGFNVGDQYVSKSKKFGYWRDTHLRIVGSASLLLQERFVMDWNASITDKNQTISFNEKLFPKIEENQLTEDDVATQIVSDGPDTSTPYLRNGMIRMMMMARKTLWIQTPYLVPDDPMIATWVIAAHSGVDVRIMIPSMPDHPFIYRATQWYANYLLHEGIKIYVYDNGFIHAKTVMVDDRFAAAGSMNQDFRSYSLNFETDAVFYDKNITRELNHIFEKDLAKCTELTLEITDNWSRYLRFKQAFSRLLSPIL

SEQ ID NO: 98910 - DNA, 1488 bp, Lactobacillus johnsonii NCC 533
  CDS (1)..(1488): transl_table=11
atgattttaacttgggatataattagaagaataatcgaaatcctttggttaattaatgtcggtctagcaatttggacagtttttcgtagtcatcgtgatattgcttctacttgggcatggctcttgattttgtctatcttgccttatgttggttttgttttatatttatttactggtcggcaattatcacatgatgatatcttttcaattgaaactgaacagaaaaaaattcgtgatcattttcttaatgaacaaaatagactattaagaatccatgacttgctaccaagtaaagcccagaatccacgcgcaagacgcttagtagaactgaatctaaataatgatgatgcccttttaacttttaataacgaagtcgagacttttatcgacggacaagctttatttccaaatcttataaaaaatattgatgaagcaaagagaaccattaatgtagaattttatacattttatgatgatcaattaggaaatcaggtcttacaatctttagaaaaagcagccagtcgaggcgttaaagttagagttttatatgatgcaagcggctctcgtggtacacgaccatctttttttaaagaacttcgtcaactaggtggagaagctcaacctttcatttcaacagctggaaaccgtctttttactactcctcgcgctaactatcatttacacagaaaactggtaatcatcgacaatgaaattggatatattggcggcttcaatattggtgatcaatatattgatcgaagtaagaaatttggacactggcgtgatacccaccttcgcgtagtaggacaagcagctttattaatggaaattcgctttgcaatggattggaatactagttgccgtaaatctcatcttccaaaatataatattgataacttaattgaaacatttgaattaaaaatagttcaatctaaagacttggtcccaatgcaaattgtttcatcgggaccagataatagtcactttggtattcggcgagcttatgaagaaataattgctcaagcacaaaattatgtctacattcaaactccctacttaatcccgggtgattcaatcctggaagctttaattattgcagcaaaaagtggagttgatgtacgaattatgatcccttctatgcccgatcatccctttgtctaccgagcaactgaatactacgcaaagtacctagttaatcaaggagttaaagtttataaatacgataatggatttattcatgcgaaaactatggttagcggttctaatattgcttcagtcggatcggcaaatcaagattttcgtagttatcaattaaactttgaagtaaatgcttttacatatagcgcagctctcaccaaggaattaaaagaaatttttgaagaagatttaaaagagtcaactttactcacaaaagagtactttgacaaacaatctcattggcgtaaatttaaacaatacttttcaagattattatcaccaattttataa

SEQ ID NO: 98911 - protein, 495 aa, Lactobacillus johnsonii NCC 533
MILTWDIIRRIIEILWLINVGLAIWTVFRSHRDIASTWAWLLILSILPYVGFVLYLFTGRQLSHDDIFSIETEQKKIRDHFLNEQNRLLRIHDLLPSKAQNPRARRLVELNLNNDDALLTFNNEVETFIDGQALFPNLIKNIDEAKRTINVEFYTFYDDQLGNQVLQSLEKAASRGVKVRVLYDASGSRGTRPSFFKELRQLGGEAQPFISTAGNRLFTTPRANYHLHRKLVIIDNEIGYIGGFNIGDQYIDRSKKFGHWRDTHLRVVGQAALLMEIRFAMDWNTSCRKSHLPKYNIDNLIETFELKIVQSKDLVPMQIVSSGPDNSHFGIRRAYEEIIAQAQNYVYIQTPYLIPGDSILEALIIAAKSGVDVRIMIPSMPDHPFVYRATEYYAKYLVNQGVKVYKYDNGFIHAKTMVSGSNIASVGSANQDFRSYQLNFEVNAFTYSAALTKELKEIFEEDLKESTLLTKEYFDKQSHWRKFKQYFSRLLSPIL

SEQ ID NO: 98912 - DNA, 1143 bp, Bdellovibrio bacteriovorus HD100
  CDS (1)..(1143): transl_table=11
atggagtcatggagccaagttcaaatttttcactcaggtgacgactttttctcaagtctcattctagatataagacaggctcgtcgtagcgtcaccattgaatcgtacatctttgctgaagataagctgactcagtcgattttgcatgaattgacaaatgcgcgccagcgcggctgcaccgtcaaaatcgtcgtcgatggcttcggctcctacacttcaatcccttatctggaccgcttttgcacggacaacggcctggagcttcgggtttttcatccgctgcctcacccgctgatttgggcgcaccagtttgtgatgaaatattcctggcgcgggtctttgatatttaaacgcatcaatcgccgcacccaccgcaagattgcgatcatcgatgaaaaacgcgcctatctgggcagcatgaatttcactcaggaacactgtgtgagttatgtcggcgaaaaagcctggcgggacaccggcgtgtgggtggaaggcgaacccgtcaaacgcctggtgctggcttttcagatctcgtacctgcgcaccttcatgaagggccttttaacgtgggtgggccgctggcgcatgaatgaggacgttgcccacaatgtgcttcgcctgaacaccacccagcgcacacgaaaaaaactttatcgcgatctgcttcgccggatcagtcatgccgaaaatcgcatctatttgaccacagcctatttcctgccacgcagatccttgctgcgggcgttgctgaaggccgcccagcgcggagtcgacgttcagctgctgattcccggaaaatccgacgttccgatggtcaaatgggcggctttttatattgtccgccttttgattcaacggcagatcccgatctttgagtatcagaagtcgattttgcacgccaagacgatgatcatcgacaacgaggcgttcgtaggctctttcaacctgaatcatcgcagtattctgcatgatcttgaggtcgaagtgattctgcaggaaccctccatggtgcagaatatgctggagcaatggcatcaagacatcgccaactccaaacctgcctcagaaaaggattttgccaccccttcttggctaacccacatcctgtataagatcgccttccgattgcgttatatgctctag

SEQ ID NO: 98913 - protein, 380 aa, Bdellovibrio bacteriovorus HD100
MESWSQVQIFHSGDDFFSSLILDIRQARRSVTIESYIFAEDKLTQSILHELTNARQRGCTVKIVVDGFGSYTSIPYLDRFCTDNGLELRVFHPLPHPLIWAHQFVMKYSWRGSLIFKRINRRTHRKIAIIDEKRAYLGSMNFTQEHCVSYVGEKAWRDTGVWVEGEPVKRLVLAFQISYLRTFMKGLLTWVGRWRMNEDVAHNVLRLNTTQRTRKKLYRDLLRRISHAENRIYLTTAYFLPRRSLLRALLKAAQRGVDVQLLIPGKSDVPMVKWAAFYIVRLLIQRQIPIFEYQKSILHAKTMIIDNEAFVGSFNLNHRSILHDLEVEVILQEPSMVQNMLEQWHQDIANSKPASEKDFATPSWLTHILYKIAFRLRYML

SEQ ID NO: 98914 - DNA, 1530 bp, Mycoplasma mycoides subsp. mycoides SC str. PG1
  CDS (1)..(1530): transl_table=4
atgaaaaagcccattgttacagttttatctttagtttttatgtttggtttaacaatatttggtttgttgttattaaacatttatttttttacttgacctttaattggatttggaatttttcatttacttgcaattatttgagcttttatagtattagctgataaaaaaagaagatttgaaacaagaattagatgattttgttttattgtttgtattcctataattggagttttatcttacttattttttggtagatcttataagtataaaattacaaaaaactacaagtttttagagattaaaaataaacatttagaaaatgaattagaacaaatcgatcaaattttaactaatcaaattcctcaatttaaacgtgcatttaaaacagcttctatttcacaaactagtaatatttttttaaatactaaagttgagtttttagaaaatggtaatcaattattcttaaatttgtttaaagatattaaaaatgctaaacactatattctattaaatttttatatttttaaagatggtaagttattagatgaattaactaatttattaattagaaaattaaaagaaaatgttaaagtttatataatttatgattttgctggaagttatacattatttgaagaagcaaaaattaagttattagaatatgggtgtcaaattgtttgttatgcaccaattagatttccatttattaaatgaacagcaaattatagagatcatagaaaagatatagtaattgataataaaattggttatattggtggaattaatattggtgatgaatatattaatttagataataagtttggttattgaaatgattgttctttaaaaattacaggtaatgctgtaagtgaaattcaacgtatttttataagtgattttgatttttataaaccaagctttaaaaaaatttcaattaaacaagatttagatttaaacaatatttatccagttaaatgtaaagatcaattagttcaaattgtttcaagtgggccaaatcatgaagaacctttacatttatctatttttattaatttaattaattcagctcaaaaaagaatttgaatctcaactccatattttattcctcctcaagaaattagaactgctttaattaatgctgctaattcaaaattagatgtaagaattttaattccaggtttaactgataaagcttttttattagatcaaacaaagcaatgaactagagaattatataaagctggagttaaaatttattctattaataatgtttttaatcataataaaacttatttatttgatgatgaaattacatttattggatcaacaaatcttgattttagagctttatttgcagatcaacaaacaatgggattaatttattctaaatcattaaataaaactatttcaaataaatttgaacaagattttaaaaacagttatttatatgatcatttaccaaataaaaacattaactgatttagaaaaatagtaattaaaatttataacattattcaacctttattataa

SEQ ID NO: 98915 - protein, 509 aa, Mycoplasma mycoides subsp. mycoides SC str. PG1
MKKPIVTVLSLVFMFGLTIFGLLLLNIYFFTWPLIGFGIFHLLAIIWAFIVLADKKRRFETRIRWFCFIVCIPIIGVLSYLFFGRSYKYKITKNYKFLEIKNKHLENELEQIDQILTNQIPQFKRAFKTASISQTSNIFLNTKVEFLENGNQLFLNLFKDIKNAKHYILLNFYIFKDGKLLDELTNLLIRKLKENVKVYIIYDFAGSYTLFEEAKIKLLEYGCQIVCYAPIRFPFIKWTANYRDHRKDIVIDNKIGYIGGINIGDEYINLDNKFGYWNDCSLKITGNAVSEIQRIFISDFDFYKPSFKKISIKQDLDLNNIYPVKCKDQLVQIVSSGPNHEEPLHLSIFINLINSAQKRIWISTPYFIPPQEIRTALINAANSKLDVRILIPGLTDKAFLLDQTKQWTRELYKAGVKIYSINNVFNHNKTYLFDDEITFIGSTNLDFRALFADQQTMGLIYSKSLNKTISNKFEQDFKNSYLYDHLPNKNINWFRKIVIKIYNIIQPLL

SEQ ID NO: 98916 - DNA, 1530 bp, Bacillus cereus ATCC 10987
  CDS (1)..(1530): transl_table=11
atgaagaaacctattgtccaattactattaatatttacaattgtatctatcgttcttttcctattaaatacatcgtatatttcgttatatacatttgtcggcgttctctggtccatcacaattgtaggaatttcattcgttatttttatcgaaaataggtctcctcaaagtaccttagcttggtttttagtattagcacttcttcccgttgtaggtgtacttttatactctattttcgggcgtagccgttggagaagaaaaaagcatctccatcgttcagaagaacaaagaaaattattccgtgaaatattagaaggaagacgactagagttatcactcaaagtcccattaagtgaacgctctacccatttaacagaagttgtacaaaaatttggaggcgggcctgccgcagatagaacaactacaaaacttttaacaaacggagatcaaacattttcagaaattttgcaagctatcgagcaagcaaaacatcacatacatattcaatactatatttataaatctgatgagattggtacaaaagtccgggatgctttaataaacaaagcaaaagctggtgttattgtacgcttcctttatgatggattaggaagtaatacgttaagaagacgctttttaaaacctatgaaagaagctgggattgaaattgttgaatttgaccctattttttcagcttggttacttgaaacagttaattatcgtaaccaccgtaaaatcgtcattgtcgatggagaaattggttttactggaggacttaatgtcggtgatgaatatcttggccgttcaaaaaagtttcccgtttggcgtgatagtcatttaaaaatcgaaggaaaagcgttatataaattacaagcaatttttctagaggactggctctatgcatctagtggtttgaaaacctattcctgggatcaatttatgaatagacaatacttcccaggtaaagaagtttcaagtgcagaaggtgctgtgcaaattgtagcaagcgggccaagctcagatgataagagcattcgtaatacgttattagctattatgggctctgcaaaaaaatctatttggattgctacaccatattttattccagatcaagaaactttaacattattacgtttaagtgcaatatctggcatagatgtacgcattttatatcctggtaaaagtgatagtattattagtgatcaagcatcccaatcctacttcactccacttttaaaagctggtgcctccatctatagttataaagatggctttatgcatgcaaaacttgtacttgttgatgataaaattgcaacaatcggaacagcaaatatggatgtacgaagctttgaattgaattacgaaattattagcgtactgtatgaatcaaaaactgttcatgatattaaacgtgattttgaagaagactttaagcattccactgaaattaaatggaacgctttccaaaaaagaagtatcaaaaaacgaatattagagtcttttatgaggctcatttctcctttactataa

SEQ ID NO: 98917 - protein, 509 aa, Bacillus cereus ATCC 10987
MKKPIVQLLLIFTIVSIVLFLLNTSYISLYTFVGVLWSITIVGISFVIFIENRSPQSTLAWFLVLALLPVVGVLLYSIFGRSRWRRKKHLHRSEEQRKLFREILEGRRLELSLKVPLSERSTHLTEVVQKFGGGPAADRTTTKLLTNGDQTFSEILQAIEQAKHHIHIQYYIYKSDEIGTKVRDALINKAKAGVIVRFLYDGLGSNTLRRRFLKPMKEAGIEIVEFDPIFSAWLLETVNYRNHRKIVIVDGEIGFTGGLNVGDEYLGRSKKFPVWRDSHLKIEGKALYKLQAIFLEDWLYASSGLKTYSWDQFMNRQYFPGKEVSSAEGAVQIVASGPSSDDKSIRNTLLAIMGSAKKSIWIATPYFIPDQETLTLLRLSAISGIDVRILYPGKSDSIISDQASQSYFTPLLKAGASIYSYKDGFMHAKLVLVDDKIATIGTANMDVRSFELNYEIISVLYESKTVHDIKRDFEEDFKHSTEIKWNAFQKRSIKKRILESFMRLISPLL

SEQ ID NO: 98918 - DNA, 1212 bp, Bacillus cereus ATCC 10987
  CDS (1)..(1212): transl_table=11
atgattaaaaaaatattgcgagttacttctattattgttgctattgttgtttttattttaatttgcatgcatatcgatgttaccttaggtagaaaaatggaagtcgggaaaaacatgccgacagagtatgcacctcattatagtgactttcaattatatgtagaagggaagtcattttataaacagttatttactgatataagagaggcgaagagatctatttatacgtacttttttattttgtcagatgataaaagtagccatacttttttaaacttattaaaagaaagggcaaaagaaggagtaaatgtctatttatcggttgatcgcattaatgatttatcatttgaaagaaagaagataaatgaattgcgggaaagtggtgtacattttacatatagtagaaaacctgaattaccattcgggttttattcacttcaccatcgtaatcatcgccgtattacgacgattgatggagtgattggttatacgggtggttttaatataggggatgagtacttaggaaaagataagcgatttggatattggcgtgactatcatgtgcgacttaaaggagagggcgcaaaagatttagaagaacaattcgctttagattggaaacgagatacgaaagaaaagataaaaagaagtacgaataaagcgagtaaagggaatacattacatacgatggctagttacaatggacatcacgtcgctgaaaaatatatagaattaataaaagaagcaaagcattcaattgtcattacaacaccttactttatagccaaaaataaagaagtaatgaatgctttaatggaagcacaaaaacgtggagttactgtaaaaatactttggtcatataaaccagatattcctcttattaaagaggcggcgtatccgtatattcgccaagctgttaataatggaattaaagtatatggttataaaaaagggatgtttcatggcaaattaatgcttattgataatgaactaactgttattggtacgacaaattttacttcgcgaagtttcaatataaatgatgaaatgaatttgtatattcatggtggttcaattgtaggacaagttaatgaggcgttaacggaggattttcataattcaaaagaaatgacgaaagaattttttgagaagttatcgttttgggagcgttgtaaggaaaagttggggggattggctgatttttatttctaa

SEQ ID NO: 98919 - protein, 403 aa, Bacillus cereus ATCC 10987
MIKKILRVTSIIVAIVVFILICMHIDVTLGRKMEVGKNMPTEYAPHYSDFQLYVEGKSFYKQLFTDIREAKRSIYTYFFILSDDKSSHTFLNLLKERAKEGVNVYLSVDRINDLSFERKKINELRESGVHFTYSRKPELPFGFYSLHHRNHRRITTIDGVIGYTGGFNIGDEYLGKDKRFGYWRDYHVRLKGEGAKDLEEQFALDWKRDTKEKIKRSTNKASKGNTLHTMASYNGHHVAEKYIELIKEAKHSIVITTPYFIAKNKEVMNALMEAQKRGVTVKILWSYKPDIPLIKEAAYPYIRQAVNNGIKVYGYKKGMFHGKLMLIDNELTVIGTTNFTSRSFNINDEMNLYIHGGSIVGQVNEALTEDFHNSKEMTKEFFEKLSFWERCKEKLGGLADFYF

SEQ ID NO: 98920 - DNA, 1185 bp, Bacillus cereus ATCC 10987
  CDS (1)..(1185): transl_table=11
atgaaacactttttcgttgtaatcctttgtgtaataggtgtattcatttggatgaacatcgatgtggaaatggggaaaaaaatggctagtgaatatgaagtaggacaagttcgattaggtgaatttcaactgtatacgaacggtgaagagttatatacgaatttatttgaggatatacgtaatgcggagaagtacatatatatccatttttatattgtaggtaaagatgaaataagcaaagagtttttgcagttgctcgagaaaaaggcatctagcggagtagaagtgaaattgtcagtcgatcgaataggtggatataagctgaagaaaaagacaattcgtcaactacaaagcaacggtgtccagtttacgtttagtaaaaaacctaaattgaaacatttattctattcgttgcatcagcgaaaccatagacgaattgttacgatagacggaaaagtatcatatatcggcggctttaacattggaaaggaataccttggacaagatccgaaatttggcccgtggcgtgattatcatgtgcgagtcattgggaatggtgccacggatatggaaagacaatttgctgctgactggaaagaagatacaggagaaaaaatgcctgtacatgaaagtctacctgcaattgggaatgtaaaatatcaatatttattttcagatggaaaagggttatgggaaaaatatggagcgcttttaaagcaggctaaaaagtctttaattattgctacaccatattttgtaccaagtaaagaaatgatgaaagagttaaaaggtgcattaaaccgcggtgtcaatgtgaaaattctcgtaccatttaaaagtgatgcagtattgttaaaacaagctgcctacccgtatttgagagagatgaaccatgctggagcggagatttatcaatatcggaatggtttttttcacgggaaagtaacaatcattgatggagaaattgttgatataggtacagcgaattttgataatagaagtttttatttaaattgtgaatctaattgtgtcgtatatgataaaacagttgttgctgacgtatgggatcgactaaaagaagacttccataaatcaaaaagattttcggaagaagattttgagaaaattagtaaatgggattggtttttagcaagaatagcaaatgttatagcatcatatttatag

SEQ ID NO: 98921 - protein, 394 aa, Bacillus cereus ATCC 10987
MKHFFVVILCVIGVFIWMNIDVEMGKKMASEYEVGQVRLGEFQLYTNGEELYTNLFEDIRNAEKYIYIHFYIVGKDEISKEFLQLLEKKASSGVEVKLSVDRIGGYKLKKKTIRQLQSNGVQFTFSKKPKLKHLFYSLHQRNHRRIVTIDGKVSYIGGFNIGKEYLGQDPKFGPWRDYHVRVIGNGATDMERQFAADWKEDTGEKMPVHESLPAIGNVKYQYLFSDGKGLWEKYGALLKQAKKSLIIATPYFVPSKEMMKELKGALNRGVNVKILVPFKSDAVLLKQAAYPYLREMNHAGAEIYQYRNGFFHGKVTIIDGEIVDIGTANFDNRSFYLNCESNCVVYDKTVVADVWDRLKEDFHKSKRFSEEDFEKISKWDWFLARIANVIASYL

SEQ ID NO: 98922 - DNA, 1194 bp, Bacillus cereus ATCC 10987
  CDS (1)..(1194): transl_table=11
atgttcttcttatctctcttattaataggtagcactctctggattgtaattgatctttcttatgggagaattgttcatttaaagcgtgtacgttctcgttctttccctttacgtcaaagtgattttcacctttatacatacggaaaagatttgtatgacgctctatttactgatataaaacaggcgaaacaccatgtgcacgttttgttcttcattgtaaaaaacgataaaatcagccgggaatttttaaagttacttattgataaggcaaaggaaggaattgaagtaagacttctactcgatcgattgggaagccatcatttatcaaatgaggccattcgctccctacaaaaacatggtgtctctttttcattttgtcacaaagtaaagtttccctttcctttcttttctgcaaatcaaagaaaccatagaaaaattacagttattgacgggaaaattggttatattggtggatttaatattggagaagaatatttaggacataatcaaaaattaggattatggcgcgattatcatttacgtcttacaggagaaggaatacaagatttacaaaagcaatttttacatgattggctggacgatacagaccaaaatttattagaggcatctctttattttcctaagcaacaaccaggaaccattctgcatcgttttatccctactgatggggcctacttgcaaaatacatttttatatttaattgaaagcgcagaaaaagaactctttatcggtacaccatatttcattcctggaagaaaaattatgaatgcattattagaagcacgaaaacgcggggttcaaatcacaattctcgttccagaaaaagcggatcacccccttgttcgagaagcaaaattcccatattgccgaaagttaatacaagctggctgtaatatttacgcatttcaacaaggtttttttcacgctaaagttattatagttgatgactacatctgtgatatcggaactgcaaactttgatatgagaagtttatatattaaccatgaaatcaactgccttttatatgatgaacattttatacaaacagtaaaaaataaattccacgaagatctagaaaatgcttcattactttccttgaaagatgttagtccgaattctctcattaatagaggcaaagaatggataggaacaatacttgctttctttctatag

SEQ ID NO: 98923 - protein, 397 aa, Bacillus cereus ATCC 10987
MFFLSLLLIGSTLWIVIDLSYGRIVHLKRVRSRSFPLRQSDFHLYTYGKDLYDALFTDIKQAKHHVHVLFFIVKNDKISREFLKLLIDKAKEGIEVRLLLDRLGSHHLSNEAIRSLQKHGVSFSFCHKVKFPFPFFSANQRNHRKITVIDGKIGYIGGFNIGEEYLGHNQKLGLWRDYHLRLTGEGIQDLQKQFLHDWLDDTDQNLLEASLYFPKQQPGTILHRFIPTDGAYLQNTFLYLIESAEKELFIGTPYFIPGRKIMNALLEARKRGVQITILVPEKADHPLVREAKFPYCRKLIQAGCNIYAFQQGFFHAKVIIVDDYICDIGTANFDMRSLYINHEINCLLYDEHFIQTVKNKFHEDLENASLLSLKDVSPNSLINRGKEWIGTILAFFL

SEQ ID NO: 98924 - DNA, 1545 bp, Clostridium thermocellum ATCC 27405
  CDS (1)..(1545): transl_table=11
atgtggtcaaggataaaatctattgtaaaatttttgtatcacagagttgttttaatatctttggcaatacttatacagttgattgctcttgtaagtgttgtattgaagtttaacgactattttgtgttcttctattgggcatgcctgattataagcatgattgcagtatttttgattttgaacggaaaaagcaatccctcctacaaaattgcatggattattccgatacttttgtttcctatttttggcggattgttctatatttttttcggaggaaagaagcttagcaggcgcgagagaagaaagctgaaatccattggtatgaaggtggagaatgctttggtgctgcagccggaggttttaagtgaaataatgctgcatgacgacggcgcggccgttcagtcaaggtatattcaaaatgtagcccactatcctccccataaaaattccacggcggaatacctttccatcggagaaaaaaagtatgaaaagcttaaggaggaacttaaaaaagcaaagcattttatatttatggagtattttatcattcaggaaggaattatgtggaacagtatattggagatactggtggagaaagcaaaaaatggggtagatgttcgtcttatctacgatgatatggggtgtttgctgtttttgccgcgaaattacaacaaaaagcttgaaagtatgggaatcaagtgttgtgtttttaaccctgtgtctccgatattgtctgccaaaataaacaaccgggatcaccggaaaatagcgataattgacgggcatacggcttttaccggcggcatcaaccttgcagacgaatacatcaatgagattaaaaagcacggacactggaaagatactgccataatgataaaaggggaagccgtatggaacatgacggtaatgtttttgtctatgtgggattatcttagggggattgaggaagattttgaaaagttccgctataagtttaaaaaagaaagtgaaattgaggacggatattttcagccgttttcagacagtcctttcgatgatgagactgttggtgagacagtatatttaaaccttttgaacaaagcaaaaagatatgtttatattacaacaccctatcttgttattgactacaaaatgacacaggcattggcttcggcagcgaaatccggaatagatgtccggattataactccccatatagaggataaatggtatgtccatgccgttacaaggtcaaattaccgctttctggttgaaagcggcgtaaaaatctatgaatacacaccgggatttattcattccaaaaccttggtttccgatgacgaatatgcggttgtgggcacgataaacatggattacagaagtttctatctgcattttgagtgtggtgtctggacatacaagagcaaaagtgtgcttgacataaaagaagatttcctaagcacccttgacgtgtgtacggaaataacaatggatatgattaaaaagacaaaatggtataaaaccctgattggtaccctcctgcgtgtctttgcccctcttatgtag

SEQ ID NO: 98925 - protein, 514 aa, Clostridium thermocellum ATCC 27405
MWSRIKSIVKFLYHRVVLISLAILIQLIALVSVVLKFNDYFVFFYWACLIISMIAVFLILNGKSNPSYKIAWIIPILLFPIFGGLFYIFFGGKKLSRRERRKLKSIGMKVENALVLQPEVLSEIMLHDDGAAVQSRYIQNVAHYPPHKNSTAEYLSIGEKKYEKLKEELKKAKHFIFMEYFIIQEGIMWNSILEILVEKAKNGVDVRLIYDDMGCLLFLPRNYNKKLESMGIKCCVFNPVSPILSAKINNRDHRKIAIIDGHTAFTGGINLADEYINEIKKHGHWKDTAIMIKGEAVWNMTVMFLSMWDYLRGIEEDFEKFRYKFKKESEIEDGYFQPFSDSPFDDETVGETVYLNLLNKAKRYVYITTPYLVIDYKMTQALASAAKSGIDVRIITPHIEDKWYVHAVTRSNYRFLVESGVKIYEYTPGFIHSKTLVSDDEYAVVGTINMDYRSFYLHFECGVWTYKSKSVLDIKEDFLSTLDVCTEITMDMIKKTKWYKTLIGTLLRVFAPLM

SEQ ID NO: 98926 - DNA, 1491 bp, Clostridium difficile 630
  CDS (1)..(1491): transl_table=11
atgggagtaataggaacaatatttctgttctatttaattatatcatatctagctggagccataatttctgtgattatattacttgaaaatagagaccctgcaaaaacaatgtcttggctattgatgtttattatatttccaggtgtaggtttaatgatatatgctatttcaggtagaaatattagaaaaagaaaattatttaagactcaaaaactagctaataatataaaagaaaagaaactatttgatacattagaaaagataacggaaatagttgaattagaaaaagaatctataaaacaaaataagcttttaagagatgaagaggatggtagttatagaaaaagggtaataaatatgttgttaaagactggtatgtttccctttactaaaaataataaagtggatgtatttgtagatggaaatgaaaagtttaaaagacttatagaagatataagagaagctaaagaccatattcatttagagtactttatcatcaaagatagtgaaataggtagggtgttaaaagaagaacttataaaaaaggctaaagaaggcattaagataagaattttatatgatgatgtaggatgctggagattttggtttaatagaaaatttttccgagaaatgagggaagtaggtatagaaattgcagcatttttacctacaaaatttcctataataggagggaaattaaactatagaaatcacagaaaaattgttgttattgatggaataattggatatacaggtggaataaatataggagatgaatatttaggcaaaaatgataagtttggatattggagagatactcatattaggattaagggtatttctgtatacatgcttcaaatgacatttctgattgattggtattatacgacaaaagaagtattagtgactaaaaattatttcccaagtgtagggaatgttggtgaaagtatgatacaagttgttgcgagtggtccagacagtgactgggaagatattcattatgcttatttttctgcaatatgtcaggctagaaaaaatgtttatatagaaactccatattttattccagatgaaagtctactaaaagctataaagagtgctgctcttagtggagttgatgtgagaataatatttcctaaaattgcagaccacaagatagtaaatatagcatcttattcatattttgaagaaatattaagagcaggtggtaaagtttatttatataataaaggatttatacattctaaagtcgtaataatagatgataaaattgcttctgcaggtacagctaatatggatttaagaagttttatgcttaactttgaggtaaatgcatttatctatgatgaagaagttattagggtaatgacagatgatttctttgaggatttaagttactgtgaagaacttaatttggaggtatttaagaatagaaatatcatacaaaaaatcaaagaatctgtagcaagattattttcaccaatattataa

SEQ ID NO: 98927 - protein, 496 aa, Clostridium difficile 630
MGVIGTIFLFYLIISYLAGAIISVIILLENRDPAKTMSWLLMFIIFPGVGLMIYAISGRNIRKRKLFKTQKLANNIKEKKLFDTLEKITEIVELEKESIKQNKLLRDEEDGSYRKRVINMLLKTGMFPFTKNNKVDVFVDGNEKFKRLIEDIREAKDHIHLEYFIIKDSEIGRVLKEELIKKAKEGIKIRILYDDVGCWRFWFNRKFFREMREVGIEIAAFLPTKFPIIGGKLNYRNHRKIVVIDGIIGYTGGINIGDEYLGKNDKFGYWRDTHIRIKGISVYMLQMTFLIDWYYTTKEVLVTKNYFPSVGNVGESMIQVVASGPDSDWEDIHYAYFSAICQARKNVYIETPYFIPDESLLKAIKSAALSGVDVRIIFPKIADHKIVNIASYSYFEEILRAGGKVYLYNKGFIHSKVVIIDDKIASAGTANMDLRSFMLNFEVNAFIYDEEVIRVMTDDFFEDLSYCEELNLEVFKNRNIIQKIKESVARLFSPIL

SEQ ID NO: 98928 - DNA, 1482 bp, Clostridium difficile 630
  CDS (1)..(1482): transl_table=11
atgtttgatatatcatttttcgaaatgtcaatatatgaaatagcagttactacaatatatataattaatttcatggttatactaaaccttatctttagagaaaaaagaaacataaatacaactttaacatggcttcttatattagtattgattcctgctcttggattcatactttatatagcttttggcagaaatatttcaaaaaacaatatgtttagattgaaagaaaaggatgataagataatcaaaagtaatatactagatactcaggttaaactccaatctacatctgaaattgattcagatatacatcaacataaggatatgatttatgcattggctaattcaaataatgctcattataccaataataacgatgtgtggatttatgctgaatctagtcaattttttaacagtcttcttgaagaacttaaaaaagctaaaaaatatataaacatacaattttacattttcaaagatgacaaaatcggaactgaaataatagacattcttatagacaaagctaaagaaggtgttgaagtaagacttttatttgatgcagttggtggtagaacactaaaaaatagtacactttccagacttaaagaaagtggtgttaaagttggaagcttcttcccatcattcttgaaaattgtaaactttaacttaaactatagaaatcaccgaaaaattgttgtcattgatggtaaggtaggatttgtaggtggatataatgttggtgatgaatatttaggtagaaatccaaaatttggtctatggagagatacacatactaagcttactggtgattgcgtaattgacctaaatatgagattcatccttgattggagatatacaactaaagaagacttagatttagaaaagtactttatagaagaagatacaaattctaatcatccttctgaaaatattgggattcagatagtatcaagtggtccagatatatcagaacttgatgagattaaatatggttaccttaaaatgattcagaaagctagaaagtatatatacatacagagtccttatttaatacttgactcaacttttatagatactttaaaaatagcttgtttatctggtgttgatgtgagagttatgattccttctaaacctgaccatccctttgtatactgggcatcatattcatatgctggagaacttttaaagtttggagctaaaatctatacttatggtcaaaatgcatttttacatgctaagacaatagttatagatgactctatatgctctataggaacagctaatatggatatcagaagttttgagcttaatttcgaagttaatgcatttatgtactcttcaaaaaaagcattggaacaaagaattatatttgaaaatgatattttaaattctaaggaaataacattagatatatataattctaggtctacttatataaaaatcaaggaatcaatttcaagactattatcagcagttttataa

SEQ ID NO: 98929 - protein, 493 aa, Clostridium difficile 630
MFDISFFEMSIYEIAVTTIYIINFMVILNLIFREKRNINTTLTWLLILVLIPALGFILYIAFGRNISKNNMFRLKEKDDKIIKSNILDTQVKLQSTSEIDSDIHQHKDMIYALANSNNAHYTNNNDVWIYAESSQFFNSLLEELKKAKKYINIQFYIFKDDKIGTEIIDILIDKAKEGVEVRLLFDAVGGRTLKNSTLSRLKESGVKVGSFFPSFLKIVNFNLNYRNHRKIVVIDGKVGFVGGYNVGDEYLGRNPKFGLWRDTHTKLTGDCVIDLNMRFILDWRYTTKEDLDLEKYFIEEDTNSNHPSENIGIQIVSSGPDISELDEIKYGYLKMIQKARKYIYIQSPYLILDSTFIDTLKIACLSGVDVRVMIPSKPDHPFVYWASYSYAGELLKFGAKIYTYGQNAFLHAKTIVIDDSICSIGTANMDIRSFELNFEVNAFMYSSKKALEQRIIFENDILNSKEITLDIYNSRSTYIKIKESISRLLSAVL

SEQ ID NO: 98930 - DNA, 1392 bp, Herminiimonas arsenicoxydans
  CDS (1)..(1392): transl_table=11
atgcgacatttcctagccattcggccactcatcaaactcctgtttgtggcgctttgcttttctttaagcgcctgcgcttcgctgcccgaagtacattacctgaaaacctcgctgcaaccacaggactccgccacgatacaaacagcatcaggcataaacttatcaaagcaaaaaaccgaatccctgcttacgcaaaaactgcgtagtgcaaaagtcgatttgccggaactggcagcactggaagaagctgcgaccggtagtccgctgatcgccgggaataaattgactctgttgagtgatggtccgcagacgatgtccgcgatgatagcggcaatcagaaacgccagggaccacatcaatctggaaacctatatttttggcgatgaaggtttgggcgaagaatttgccgaccttctgatccagaaacagcatgaaggtgtacaggtcaatgtcatttacgacagcataggttccatcaagagcaaaccggaattcttccagcgtttgcgcgatggcggcatcaatctgcttgaatataatccggtcaacccattcaaacgaatgatttcatggcgtttgaacaatcgagaccatcgcaagattctgatcgtggatggcatgatcgcatttaccggtggcatcaatatcaccgacgattattcttccggctcgctgtttcgttcacgcaccaggaaccgctcgaatctgggttggcgcgatacacacattcaggttgaaggcccggcagtcgcctccttccagtggctattcatgcaaacatgggtaagccagaaaaccgacgatctcgctgcacgaaaatattttccaccgctaaagccggtaggcgacaaaatagttcgtgtcattgccagcacaccagatggcgattatgaaatctacaaggcctacattctcgccatgcaggaagcgaaaatatccatacacattaccaattcctactttgtacccgatgtgcaaatgatagaggccctcaccaaggcagcacaacgcggactggacgtgaaaatagtcttccccggcgtctccgataccggtctggtcatgcatgcaggccgttcgttctacagccaactgctggcaagcggcgtacggatatttgaactgcaggcatccgtgctgcatgccaagactgccgtcatcgatggctactggtccaccgtcggttcgacgaatctcgatatgcgcagtttcctgcataatagtgaagtcaatctgattgccctcgatcaggacttcggctccgtgatggaaaatgccttcaatgaggacatcaagaattcgatcgaggtaaccagcgcaacatgggagcaaaggccattttccgaccggctccgtgaatgggtcgcacgccgctttgaatactggctatag

SEQ ID NO: 98931 - protein, 463 aa, Herminiimonas arsenicoxydans
MRHFLAIRPLIKLLFVALCFSLSACASLPEVHYLKTSLQPQDSATIQTASGINLSKQKTESLLTQKLRSAKVDLPELAALEEAATGSPLIAGNKLTLLSDGPQTMSAMIAAIRNARDHINLETYIFGDEGLGEEFADLLIQKQHEGVQVNVIYDSIGSIKSKPEFFQRLRDGGINLLEYNPVNPFKRMISWRLNNRDHRKILIVDGMIAFTGGINITDDYSSGSLFRSRTRNRSNLGWRDTHIQVEGPAVASFQWLFMQTWVSQKTDDLAARKYFPPLKPVGDKIVRVIASTPDGDYEIYKAYILAMQEAKISIHITNSYFVPDVQMIEALTKAAQRGLDVKIVFPGVSDTGLVMHAGRSFYSQLLASGVRIFELQASVLHAKTAVIDGYWSTVGSTNLDMRSFLHNSEVNLIALDQDFGSVMENAFNEDIKNSIEVTSATWEQRPFSDRLREWVARRFEYWL

SEQ ID NO: 98932 - DNA, 1167 bp, Herminiimonas arsenicoxydans
  CDS (1)..(1167): transl_table=11
atgcgctcggtcagcttcgtcggtcaaaatgatatccagcttttatattgcggcgcggagtacttcccggcgctgatcgaagcgttcgatgccgccaagtcggaaatttatctcgaaacatatattttcgccgccgatgaaacggctgatgcagtcaaggctgcactggtgcgcgcagcgcagcgcggcgtaatcgtcaacgtcatgacagactgggtaggcaccggcaatgcgcaatcgaaagtattgcagcgcgattttcaggccgcgggggtagcgtatcgcagtttcaatccatggtttgtgcgcggcatcgcacgcatgcaccggaaattgtgcgtggtggatcgcgtggcggcgtttcttggcggtttgaatatcgtggacgacatgcgcaatgacgacgaccctcgtatccttctgccggcgccgcgttgggatttcggcgtgcgcattagcggtccgctggtagcaagcatccattgggaaatggcagtgcattgggtacgccttggcaatcttagttggcgtacgcgctgggctacttacagggagcagcacaggcgcaggccgacagatgcgcgcgtagcgatggtggccggcttggtggtacgcgacaacttgcacaatcgccgtacgatacaaaatgcctatttgaaggcgctgggcggtgcgcgcgaatcggccatgctggcgaatccgtatttcgcacccggaaggaaattgcgcaaaggcttgtcgtcggctgcattgcgcggcgttgatgtcaccttgctgctgggtgtgggccaatatcgttttcaggatgtgattgcacgttcgttctatcccaagttgctgaagtgcggggtgaagatcgtcgaataccgcaagacgcaattgcatggcaaggtggcggtggtcgacgataactgggccactataggttccagcaattacgatggcttcagcctgtttgtaaatcaggaagcaaacgtggttgtgctcgatgccgacttcgcgaaaaaattacgcgcgcatatcgaacatggcgtggccgatggcgtgccggtcgatttatccgagttcgacaagatccccttgtacaagcggattttttatcgcttcgcttaccaggtctataaaagcatgttgcgcctgattacctggggcaaatcagccgagtag

SEQ ID NO: 98933 - protein, 388 aa, Herminiimonas arsenicoxydans
MRSVSFVGQNDIQLLYCGAEYFPALIEAFDAAKSEIYLETYIFAADETADAVKAALVRAAQRGVIVNVMTDWVGTGNAQSKVLQRDFQAAGVAYRSFNPWFVRGIARMHRKLCVVDRVAAFLGGLNIVDDMRNDDDPRILLPAPRWDFGVRISGPLVASIHWEMAVHWVRLGNLSWRTRWATYREQHRRRPTDARVAMVAGLVVRDNLHNRRTIQNAYLKALGGARESAMLANPYFAPGRKLRKGLSSAALRGVDVTLLLGVGQYRFQDVIARSFYPKLLKCGVKIVEYRKTQLHGKVAVVDDNWATIGSSNYDGFSLFVNQEANVVVLDADFAKKLRAHIEHGVADGVPVDLSEFDKIPLYKRIFYRFAYQVYKSMLRLITWGKSAE

SEQ ID NO: 98934 - DNA, 1452 bp, Burkholderia vietnamiensis G4
  CDS (1)..(1452): transl_table=11
atgaccttcgactggcttcatgactggcttcacctcggcaccctgctcctggccatccatgtgctcggaatcgtcgcggcgtgccacgcgatcatgaacacgcgcacgtcgcaaggcgcggtcgcgtgggccgtgtcgctcgtcgcgatgccgtacctgacgctcgtcccgtacctgttcctcggccgcagcaagttctccggctacgtcgacgcgcgccgccaggagttgcgggcgctgcgcacgcatacgcagcgcgtaccgtggctcgatacgcacggcgccgacgggccggcagccgctgcgatcggccaggccgccgtgctcgcgctcacgcgcctcggcgggatgccgttcgtcggcggcaacacggtgcgcacgctggtcaacggcgacgcgaccttcgcggcgatcctcgcggcgatcgacgccgcgcgcgactacgtgatcgtccagttcttcatcgtgcgcgacgacgcgctcggccggatgctcagcgatgcactgctcgcgcgcgccgcagccggcgtgcgctgctatctgctgtacgacagcatcggcagcttcgatctgccgcgcagctacgtcgacacgctgcgccgcggtggcgtcgacgtgcatccgttcgcgacccgccgcaagttcgtcaaccgcttccagctgaacttccgcaaccatcgcaagatcgtcgtcgtcgacggcgaccgtgcgttcgtcggcggccacaacgtcggcgtcgaatatctcggcgcgaacccgcgcctgtcgccgtggcgcgatacccatatcgagatccgcggcccggtggtcgcgagcatccagtacgtgttcgccgaagactggcactgggccacccagacgctgccggcgctcgccgcgccgccggccgccctgcccggcgacacgatgcactgcctggccgtgccgatggggccggccgacaaacaggaaaccggctcgctgttcttcgtcgaggcgatcaacgccgcgcgcgaacgggtgtggatcacgacgccgtatctcgtgcccgacgaagcggtgctcgccgcgctgaagctcgcggtgatgcgcggcgtcgacgtgcgcatcctgataccgagccggcgcgaccactacgtcgtgttcgaggcgtcgaagctctatgcgcgcgacctcgtcgacgccggcgtcaaggtgttccgctaccgcagcggcttcctccaccagaaggtcgtgctgatcgatcgcgtcgcggccgcggtcggcagcgcgaacctcgacaaccgttcgttccggctcaacttcgagatcatggtgctgaccgtcgacgcggcgttcgcagcggacgtcgcgacgatgctcgatgccgacttcgcgctggcggacgaggtcgacgccaccgagtatcggcgctcgcctgcatggcggcgcatcgcgatgcacgtcgcccgcctgttcgcgccgattctgtag

SEQ ID NO: 98935 - protein, 483 aa, Burkholderia vietnamiensis G4
MTFDWLHDWLHLGTLLLAIHVLGIVAACHAIMNTRTSQGAVAWAVSLVAMPYLTLVPYLFLGRSKFSGYVDARRQELRALRTHTQRVPWLDTHGADGPAAAAIGQAAVLALTRLGGMPFVGGNTVRTLVNGDATFAAILAAIDAARDYVIVQFFIVRDDALGRMLSDALLARAAAGVRCYLLYDSIGSFDLPRSYVDTLRRGGVDVHPFATRRKFVNRFQLNFRNHRKIVVVDGDRAFVGGHNVGVEYLGANPRLSPWRDTHIEIRGPVVASIQYVFAEDWHWATQTLPALAAPPAALPGDTMHCLAVPMGPADKQETGSLFFVEAINAARERVWITTPYLVPDEAVLAALKLAVMRGVDVRILIPSRRDHYVVFEASKLYARDLVDAGVKVFRYRSGFLHQKVVLIDRVAAAVGSANLDNRSFRLNFEIMVLTVDAAFAADVATMLDADFALADEVDATEYRRSPAWRRIAMHVARLFAPIL

SEQ ID NO: 98936 - DNA, 1578 bp, Streptococcus pyogenes str. Manfredo
  CDS (1)..(1578): transl_table=11
atgattatcaaaaagaaagcaaaagtaaaatatttgctccataaagggaaacatggatttttaagaggaatttttagtagaacaacaatcattgtattattaattattttgcaattagttttcttatttcaatcttatgcctggatggagcagtaccgtgtttggataacgattcttgaaagtgtctttgctattactattgttttatatttagttaatagtgatatggatgctatttcaagaatgacgtggttaattttgattatgattgctccattactagggtcactgtttttaatttatacaaaattggattggggttacagagggctaaaacaaagaataaatcatcttgtagatctgtctgcaccttaccttagcgatgatgacgctatattagaggtattaaaggatagcacatcaaccacatatcatttagtacagtacttagaaagaagtcgtggcaactttccgatttataataatacaagggtaacttacttcccaacaggtgaaactttttttgatagtttaaaagaacagttattcttagctaaaaagtacatttttcttgaattttttattattgcagaaggccaaatgtggggagaaatccttagtattctagaaaaaaaagtcagtgaaggtgtagaagttagggtgttgtttgatggcatgaacgaactatcaacgctatcatcagattacgccaagagattagaacaaatagggattaaagctaaatcatttttaccgatttcaccctttatctctacctattacaattatcgagatcaccgaaaaattgtcgttattgatggggaggtatcattcactggaggtattaatctagcagatgagtacattaatgaagtagagcgttttggccactggaaagatgctggtttaatgcttgagggtgaagcaacagacagctttttaattttgtttttacaaatgtggtctatcacagaaaaagaactgattattgccccttatctttcagatcattctttaaaacttccttcagatggctatgttattccctacggtgattccccgcttgatactgataaaataggtaaaaatgtttatatagacattttaaatcatgctaaagagtacgtttatatcatgacaccttaccttattttagatagcgagatggaacacgctttacggtttgcatcagaacgtggagtagatatccgaattattatgccaggagtgccagataagggggtaccatatgccttagctaaaacctattataaagctttgatgtcttctggagtaaaaatttatgagtatcaaccagggttcgttcattcaaaggtatttatctctgataatacaaaagcagttgtcggaacaattaacttagactatcgtagcctttatcatcattttgaatgcgcgacttatttatatcgtgtgtcagttattgctgatattgtgaatgactttaatgaagctcaaaagcaatcactattgatgacatcagatcatttgacgcaacgtccttggtatcaaaaattgataggattattagtacgaacaattgcccctctcttgtaa

SEQ ID NO: 98937 - protein, 525 aa, Streptococcus pyogenes str. Manfredo
MIIKKKAKVKYLLHKGKHGFLRGIFSRTTIIVLLIILQLVFLFQSYAWMEQYRVWITILESVFAITIVLYLVNSDMDAISRMTWLILIMIAPLLGSLFLIYTKLDWGYRGLKQRINHLVDLSAPYLSDDDAILEVLKDSTSTTYHLVQYLERSRGNFPIYNNTRVTYFPTGETFFDSLKEQLFLAKKYIFLEFFIIAEGQMWGEILSILEKKVSEGVEVRVLFDGMNELSTLSSDYAKRLEQIGIKAKSFLPISPFISTYYNYRDHRKIVVIDGEVSFTGGINLADEYINEVERFGHWKDAGLMLEGEATDSFLILFLQMWSITEKELIIAPYLSDHSLKLPSDGYVIPYGDSPLDTDKIGKNVYIDILNHAKEYVYIMTPYLILDSEMEHALRFASERGVDIRIIMPGVPDKGVPYALAKTYYKALMSSGVKIYEYQPGFVHSKVFISDNTKAVVGTINLDYRSLYHHFECATYLYRVSVIADIVNDFNEAQKQSLLMTSDHLTQRPWYQKLIGLLVRTIAPLL

SEQ ID NO: 98938 - DNA, 1446 bp, Desulfovibrio vulgaris subsp. vulgaris str. Hildenborough
  CDS (1)..(1446): transl_table=11
atgaccacgctgcactggatactgctgcccatctcctacgcgccatctgtggtcgctgcgctgcatgccctgctcaccaagcgcgacccgcgttcggccctcggctggattgccgtgagcctcacgttcccattggctggccccttcttctatttcatcttcggcatcaaccgcgtccatagccgtgcggcccagcttctggcagccacggagaacaggaggcgtcgtcagggtgagaggttgcatggagggccggaagaggacgacccgccgggtaccgtttcggatacctacatacccccacggtttcgcgccctggcacgtgtcggacgcatggtcaccggaagaccccttgcggggggcaataccgtgcgtccgctgtataatggcgaagacgcctatcccgccatggtcgaggccatcgacaaggccgaacacagtgtctttctcaccacgtacatcttcggtggccggcgcataggcgaacagttcgtggattccctcgccgatgcggctgaacgcggggtcgacgtccgggtcatcatcgacggtgtggggggactctattcgtggccgagggcgtggtcgcgcctgaagcgtcgcggagtgcgcgtcgagagattcctgccgccgcacctgttgccaccgcagctttccgtgaacctgcgcaaccaccgcaaggtgctggtctgcgacgggcatgtcggtttcacgggcggcatgaacgtgggtgaccatcacctcatggccaccgacaatccgcgccgtgtgcaggatgtgcatttcctgttcacgggccccatcgtggcacagttgcaggaggtcttcctgcgtgactggggtttcctcacgggagactatgccctgacggccccggttcacgatgaaccctgtggcgattcgctctgtcgtacggtgctcgaagggccgggcgaccgcgcagaacgtctgcacgacctgctatgcggcatcatctccagcgcctcgcgctcggtgcgcatcgtgaccccgtacttcctgccgtcgcgtgagatcatcagcgccctgcgggcagcggccctgcgcggggtcgatgtgcgcgtcatgctgcctgcccgcaacaaccttcccttcgtgcactgggccacacgacacctgctggaaagccttgtggacagcggggtgcgcgtcttctaccagccgccgcccttctcgcattccaagctgttgctggtcgacggctactatgcgcaggtcgggtcggccaacatcgacacgcgcagtctgcggctcaacttcgaattgacggtggaggtcttcgacaccagcgtcgtgcggcagttgaacaggcatttcgacacggtgcggcgcatgagcgaagaggttcaggccagtatgctggccagtagacccttcgccacgcgggtgcgggatgccctgttctggctcttctctccgtatctgtga

SEQ ID NO: 98939 - protein, 481 aa, Desulfovibrio vulgaris subsp. vulgaris str. Hildenborough
MTTLHWILLPISYAPSVVAALHALLTKRDPRSALGWIAVSLTFPLAGPFFYFIFGINRVHSRAAQLLAATENRRRRQGERLHGGPEEDDPPGTVSDTYIPPRFRALARVGRMVTGRPLAGGNTVRPLYNGEDAYPAMVEAIDKAEHSVFLTTYIFGGRRIGEQFVDSLADAAERGVDVRVIIDGVGGLYSWPRAWSRLKRRGVRVERFLPPHLLPPQLSVNLRNHRKVLVCDGHVGFTGGMNVGDHHLMATDNPRRVQDVHFLFTGPIVAQLQEVFLRDWGFLTGDYALTAPVHDEPCGDSLCRTVLEGPGDRAERLHDLLCGIISSASRSVRIVTPYFLPSREIISALRAAALRGVDVRVMLPARNNLPFVHWATRHLLESLVDSGVRVFYQPPPFSHSKLLLVDGYYAQVGSANIDTRSLRLNFELTVEVFDTSVVRQLNRHFDTVRRMSEEVQASMLASRPFATRVRDALFWLFSPYL

SEQ ID NO: 98940 - DNA, 1515 bp, Listeria monocytogenes str. 4b F2365
  CDS (1)..(1515): transl_table=11
atgcgcaaactgattcaatttctgtttatagcagtagttttatttttagtggaatactttttaatcaatcaagcagctatattattcttagtaacaagtggacttatccaattatgcggattaattattgtgattcggctactactctttgatcaacggaatactagctcaaaagtcgcctggattgcggttattttcattttacctgtacttggaacgattagttaccttgtgtttggtagaaatccagcaactagaaaattcagcacagctcaagtaatggaaaaagctaaattaattaatgcgattcacgcaattccaaacaacactaatgaaaaattaccacgactatctaaaagaattgcgcatttaacgtccatagagccaattaaggggaataaaatcgaaatattaacaaatggcgaagaaacttttccagtgctcttagacgcgcttagaaaggctgaaaaccacattcatattcaatactatattttcaaaacggatgaaatttctacaaagattcgtgatattttggtagaaaaagcaaaagcaggcgttgaagttagatttatgtttgatgggcttggatcaagcaaactgggtaaagcctttttagctcctttgaaagaagctggagttagtattcacgcatttgacccaattacctctccctggattgtaagaacagccaatttaagaaatcaccgtaaaattgtcgtgattgatggtcaaattggctttacaggcgggcttaatattggagaagaatatcgttctaatacaccagatttccgtgtttggcgcgatacacatattaaaatcacaggccaagctgttatcgaacttcaagaatcttttctaaatgattgggtctatatggaaaaccaagcaggtgctgcagatcaatttattagtgaagctggattacaacaatatttttcaccagttgatgtgggtgacgaatgggcgcaagtgatttacggcggaccatatgataaagaaaaatgggttcgcgattcgatgcttgatttaattgattccgctaaagaatctgtttggattgtgtcgccttactttgttccagatgaggagtcgcttgcagttattcgccgggttgcgatgagcggtgttgacgtgcgagttattattccaggcaaaggtgatcgcgggatttcattccacggaagtaatgcgtatgtgaaaacaatgattgaagcaggcgcgaaaatgtatgcttatgccgatgattcttttgttcatgcgaaggcaatgctagtggacgggacgcgtgcagctataggtactgccaattttgacgtgcgtagttttagattgaatcatgaattaatggtattcttatatgatgaaagcgaggctatgcatcatttaaaacgtgattttgagaaagattttgaagatagccgactttttacgatgaaagatatggaaaacaaaccattattgactcgtataaaagaagttctatctagtttactatcaccaattttataa

SEQ ID NO: 98941 - protein, 504 aa, Listeria monocytogenes str. 4b F2365
MRKLIQFLFIAVVLFLVEYFLINQAAILFLVTSGLIQLCGLIIVIRLLLFDQRNTSSKVAWIAVIFILPVLGTISYLVFGRNPATRKFSTAQVMEKAKLINAIHAIPNNTNEKLPRLSKRIAHLTSIEPIKGNKIEILTNGEETFPVLLDALRKAENHIHIQYYIFKTDEISTKIRDILVEKAKAGVEVRFMFDGLGSSKLGKAFLAPLKEAGVSIHAFDPITSPWIVRTANLRNHRKIVVIDGQIGFTGGLNIGEEYRSNTPDFRVWRDTHIKITGQAVIELQESFLNDWVYMENQAGAADQFISEAGLQQYFSPVDVGDEWAQVIYGGPYDKEKWVRDSMLDLIDSAKESVWIVSPYFVPDEESLAVIRRVAMSGVDVRVIIPGKGDRGISFHGSNAYVKTMIEAGAKMYAYADDSFVHAKAMLVDGTRAAIGTANFDVRSFRLNHELMVFLYDESEAMHHLKRDFEKDFEDSRLFTMKDMENKPLLTRIKEVLSSLLSPIL

SEQ ID NO: 98942 - DNA, 1503 bp, Mycoplasma mobile 163K
  CDS (1)..(1503): transl_table=4
atgtttacaccaaaaataattaatagaatatttatttcctttatctcgattgcttttatttttttgatttcaatcatttttataatcttaggagctcctttatgattaattggtttaggagttttctatgcaattaatttagtatgtaatactgttttaatcttacaagatcgtcatagtgatgcaaaaatttcttgattttttattttgacttttattcctgtaattgctcatgctatttattttatttttgggcaaaaatacaaaaaaagagtatcaagagatgaatacattaaaaagacaaatgaatttttccaatttcaaaaccaaactaatttattagaaattgaattaaaggaaaatattagaactcttttacaaagacaagaaatttttactcaaagaaaatatcaaaaggctaagacaacttttttctttgaaacaactaatgcttacaagcaaatttttgaagatttagaaaatgctaaggaatttattcacttgcatttttatattatcaaaacaggagaaatatgggaacattttcgaaaaatcattactaaaaaaagatctgaaggtgttgaaataagaatgattgtagatgattttggtaattgaagtatgcctaagtcagaaattgattattttaaaaaaataggagtccaaataaaaattttcggaaaagtttattttccttttattgggagtgataatggttttagaactcacagaaaaattgttattattgatggaaaaattttacatacaggtggaatgaatttatctgatgaatatgctagtcttagtaaaacatatggttattgaatagatattaatttaaaaattgaaggaaactttgttcaacaatattcactactatttttatatgactgatttagttttacaaaagaaaaattagatgtaaataaatatgcaaaattaaattctacagaaaataacaattcagaaataattttaattgaagattccccagaaaatgatgagcctattttagaagaaagtttaataacttgaattgaaaattcaaataaaaaaatcacaataagtaccccatattttattccgacttttaggttatttttagcaattaaaaaagctttaatgtctggtgttgaagtagaaatttttttaccaggacaagctgataaaaaatatgtctatgttgttagtttatactatgctaagaaaattgcaaaatatggagcaaaaataatgattttgaataatgttttcttacattctaaaacagcactttttgaccaagaattgagttatatcggaacaatgaatatagacacaagaagcctttattcacaatacgaaacaacaaatttatttttagataaagatagtattcaaaaacttgaaaagaattttaatgattatagaaatatttcaacactattaaaaattaaaaaatcaagtaaaattcttgaatttttcattggaatttttgctaaattattcagtcctttgatgtaa

SEQ ID NO: 98943 - protein, 500 aa, Mycoplasma mobile 163K
MFTPKIINRIFISFISIAFIFLISIIFIILGAPLWLIGLGVFYAINLVCNTVLILQDRHSDAKISWFFILTFIPVIAHAIYFIFGQKYKKRVSRDEYIKKTNEFFQFQNQTNLLEIELKENIRTLLQRQEIFTQRKYQKAKTTFFFETTNAYKQIFEDLENAKEFIHLHFYIIKTGEIWEHFRKIITKKRSEGVEIRMIVDDFGNWSMPKSEIDYFKKIGVQIKIFGKVYFPFIGSDNGFRTHRKIVIIDGKILHTGGMNLSDEYASLSKTYGYWIDINLKIEGNFVQQYSLLFLYDWFSFTKEKLDVNKYAKLNSTENNNSEIILIEDSPENDEPILEESLITWIENSNKKITISTPYFIPTFRLFLAIKKALMSGVEVEIFLPGQADKKYVYVVSLYYAKKIAKYGAKIMILNNVFLHSKTALFDQELSYIGTMNIDTRSLYSQYETTNLFLDKDSIQKLEKNFNDYRNISTLLKIKKSSKILEFFIGIFAKLFSPLM

SEQ ID NO: 98944 - DNA, 1137 bp, Bacillus anthracis str. Sterne
  CDS (1)..(1137): transl_table=11
ttggatgaacatcgatgtggaaatggggaaaaaatggctagtgaatatgaattaggacaagttcgattgggtgaatttcaactgtatacgaacggtgaagaattatatacgaaattatttgaggatatacgcaatgcagaaaagtacatatatatccatttttatattgtaggtaaagacgaaataagcaaagagtttttgcagttgctcgagaaaaaggcatcaggtggagtagaagtgaaattgtcagtcgatcgaataggtggatataagctgaagaaaaagataattcgtcaactaaaaagcaatggtgtccagtttacatttagtaaaaaacctaaactgaaacatatattctactcgttgcatcaacggaaccatagacgcattgttacgatagatggaaaagtatcatacgtcggcggctttaacattggaaaggaataccttggacaaaatccgaaatttggtccgtggcgtgattatcatgtacgagtcaaggggaatggtgccacggatatggaaagaaaattctctgctgactggaaagaagatactggagaaaaaatgcctgtacatgaaagtttacctgcaatagggaatgtaaagtatcaatatttattttcagaaggaaaaggtttatgggaaaaatatggagcgcttataaagcaggctaaaacgtctttaattattgctacaccatattttgtaccaagtaaagaaatgataaaagcgttaaaagatgcattaaaccgtggtgtcaatgtaaaaattctcgtaccatttaaaagtgatgcagtattgttaaaacaagctgcctatccgtatttgaaagacatgttacatgctggagcagagatttatcaatatcagaatggtttttttcatgggaaagtaacaatcattgatggggaaagtgttgatattggtaccgcaaactttgataatagaagtttttatttaaatatggaatccaattgtgttatctatgataagggagtaacagcggacgtatggagtcgattaaaagaagactttcataaatcaaaaagattttcggaagaagattttgagaaaattagtaaatgggattggtttttagcaagaatagcaaatgttatagcatcatatttatag

SEQ ID NO: 98945 - protein, 378 aa, Bacillus anthracis str. Sterne
MDEHRCGNGEKMASEYELGQVRLGEFQLYTNGEELYTKLFEDIRNAEKYIYIHFYIVGKDEISKEFLQLLEKKASGGVEVKLSVDRIGGYKLKKKIIRQLKSNGVQFTFSKKPKLKHIFYSLHQRNHRRIVTIDGKVSYVGGFNIGKEYLGQNPKFGPWRDYHVRVKGNGATDMERKFSADWKEDTGEKMPVHESLPAIGNVKYQYLFSEGKGLWEKYGALIKQAKTSLIIATPYFVPSKEMIKALKDALNRGVNVKILVPFKSDAVLLKQAAYPYLKDMLHAGAEIYQYQNGFFHGKVTIIDGESVDIGTANFDNRSFYLNMESNCVIYDKGVTADVWSRLKEDFHKSKRFSEEDFEKISKWDWFLARIANVIASYL

SEQ ID NO: 98946 - DNA, 1530 bp, Bacillus thuringiensis serovar konkukian str. 97-27
  CDS (1)..(1530): transl_table=11
atgaagaaacctatcatccaattactattaatatttacaattgtatctatcgttcttttcctattaaatacatcttatatttcgttatatacatttgtcggcgttctctggtccatcacaattgtaggaatttcattcgttatttttatcgaaaatagatctcctcaaagtaccttagcctggtttttagtattagcacttcttcccgttataggtgtgcttttatactctattttcgggcgtagccgttggagaagaaaaaagcatctccatcgttcagaagagcaaagaaagttattccgtgaaatattagaaggaagacgactagagttatcactcaaagtcccattaagtgaacgctctgtccatttaacagaagtcgtacaaaaatttggaggcggccctgcagcagatagaacgactaccaaacttttaacaaacggagatcaaacattctcagaaattttgcaagcgatcgagcaagcaaaacatcacatacatattcaatactatatttataaatctgatgagattggtacaaaagttcgggatgcgttaatcaaaaaggcaaaagatggtgttattgtacgcttcctttatgatggactcggaagtaatacgttgagaagacggtttttacaacctatgaaagaagctggaattgaaattgttgaatttgatcctattttttcagcttggttacttgaaaccgtcaattatcgtaaccaccgtaaaatcgtcattgtagatggagaaatcggttttactggtggactcaacgtcggtgatgaatatcttggtcgttcaaaaaaatttcccgtttggcgtgacagtcatttaaaagtagaaggaaaagcgctatataaattacaagcaatctttctagaggattggctctatgcatctagtggattgaatacttattcttgggatccatttatgaatagacaatacttccctggtaaagaaatttcaaatgcagaaggtgctgtgcaaattgtagcgagcggaccaagctcagatgataaaagcattcgcaatacattattagctgttatgggctcggcaaaaaaatctatttggattgctacaccatactttattccagatcaagaaactttaacattactacgtttaagtgcaatatctggcatagatgtacgcattttatatcctggtaaaagtgatagtattattagtgaccaagcatctcagtcctacttcactccacttttaaaagctggtgcctccatttatagttataaagatggctttatgcatgcaaaaattgtacttgttgatgataaaatcgcaacaatcggaacagcaaatatggacgtacgcagctttgaattgaattacgaaattattagcgtactgtatgaatcagaaactgttcatgatattaaacgtgattttgaagatgactttaagcattctactgaaattaaatggaacgctttccaaaagagaagtatcaaaaaacgaatattagaatcttttatgaggctcatttctcctttactataa

SEQ ID NO: 98947 - protein, 509 aa, Bacillus thuringiensis serovar konkukian str. 97-27
MKKPIIQLLLIFTIVSIVLFLLNTSYISLYTFVGVLWSITIVGISFVIFIENRSPQSTLAWFLVLALLPVIGVLLYSIFGRSRWRRKKHLHRSEEQRKLFREILEGRRLELSLKVPLSERSVHLTEVVQKFGGGPAADRTTTKLLTNGDQTFSEILQAIEQAKHHIHIQYYIYKSDEIGTKVRDALIKKAKDGVIVRFLYDGLGSNTLRRRFLQPMKEAGIEIVEFDPIFSAWLLETVNYRNHRKIVIVDGEIGFTGGLNVGDEYLGRSKKFPVWRDSHLKVEGKALYKLQAIFLEDWLYASSGLNTYSWDPFMNRQYFPGKEISNAEGAVQIVASGPSSDDKSIRNTLLAVMGSAKKSIWIATPYFIPDQETLTLLRLSAISGIDVRILYPGKSDSIISDQASQSYFTPLLKAGASIYSYKDGFMHAKIVLVDDKIATIGTANMDVRSFELNYEIISVLYESETVHDIKRDFEDDFKHSTEIKWNAFQKRSIKKRILESFMRLISPLL

SEQ ID NO: 98948 - DNA, 1134 bp, Bacillus thuringiensis serovar konkukian str. 97-27
  CDS (1)..(1134): transl_table=11
atgaacatcgatgtggaaatggggaaaaaaatggctagtgaatatgaattaggacaagttcgattgggtgaatttcaactgtatacgaacggtgaagaattatatacgaaattatttgaggatatacgcaatgcagaaaagtacatatatatccatttttatattgtaggtaaagacgaaataagcaaagagtttttgcagttgctcgagaaaaaggcatctagcggagtagaagtgaaattgtcagtcgatcgaataggtggatataagctgaagaaaaagataattcgtcaactaaaaagcaatggtgtccagtttacatttagtaaaaaacctaaactgaaacatatattctactcgttgcatcaacggaaccatagacgcattgttacgatagatggaaaagtatcatacgtcggcggctttaacattggaaaggaataccttggacaaaatccgaaatttggtccgtggcgtgattatcatgtacgagtcaaggggaatggtgccacggatatggaaagaaaattctctgctgactggaaagaagatacgggagaaaaaatgcctgtacatgaaagtttacctgcaatagggaatgtaaagtatcaatatttattttcagatggaaaaggtttatgggaaaaatatggagcgcttataaagcaggctaaaacgtctttaattattgctacaccgtattttgtaccaagtaaagaaatgataaaagcgttaaaagatgcattaaaccgcggtgtcaatgtgaaaattctcgtaccatttaaaagtgatgcagtattgttaaaacaagctgcctatccgtatttgaaagacatgttacatgctggagcagagatttatcaatatcagaatggtttttttcatggaaaagtaacaatcattgatggggaaattgttgatattggtaccgcaaactttgataatagaagtttttatttaaatatggaatccaattgtattatctatgataagggagtaacagcggacgtatggagtcgattaaaagaagactttcataaatcaaaaagattttcggaagaagattttgagaaaattagtaaatgggattggtttttagcaagaatagcaaatgttatagcatcatatttatag

SEQ ID NO: 98949 - protein, 377 aa, Bacillus thuringiensis serovar konkukian str. 97-27
MNIDVEMGKKMASEYELGQVRLGEFQLYTNGEELYTKLFEDIRNAEKYIYIHFYIVGKDEISKEFLQLLEKKASSGVEVKLSVDRIGGYKLKKKIIRQLKSNGVQFTFSKKPKLKHIFYSLHQRNHRRIVTIDGKVSYVGGFNIGKEYLGQNPKFGPWRDYHVRVKGNGATDMERKFSADWKEDTGEKMPVHESLPAIGNVKYQYLFSDGKGLWEKYGALIKQAKTSLIIATPYFVPSKEMIKALKDALNRGVNVKILVPFKSDAVLLKQAAYPYLKDMLHAGAEIYQYQNGFFHGKVTIIDGEIVDIGTANFDNRSFYLNMESNCIIYDKGVTADVWSRLKEDFHKSKRFSEEDFEKISKWDWFLARIANVIASYL

SEQ ID NO: 98950 - DNA, 1194 bp, Bacillus thuringiensis serovar konkukian str. 97-27
  CDS (1)..(1194): transl_table=11
atgttcttcttacctctcttattaataggtatcgctctctggattataatcgatctttcttatgggagaattgttcatttaaggcgtgtacgttctcgttctttccctttacgtcaaagtgattttcacctttatacatacggaaaagatttgtatgacactctatttactgatataaaacaggcgaaacaccatgtgcatgttttgttcttcattgtaaagaacgataaaatcagccgagaatttttaaagttacttattgataaggcgaaggaaggaattgaagtaagacttttactcgatagattgggaagccatcatttatcaaacgaggccattcgctccctgcaaaaacatggtgtctctttttcattttgtcacaaagtaaagtttccttttcctttcttttctgcaaatcaaagaaaccatagaaaaattacagttatcgatgggaaaattggttacattgggggatttaatattggtgaagagtatttgggacataatgaacggttaggattatggagggactatcatttacgtcttacaggcgaaggagtacaagatttacaaaagcaatttttacatgactggtttgatgatacaaaccaaaatttattggacgcttctctttattttccgaaacagcaacccggtactatccaacatcaatttattccgactgatggtgcatatttacaacatacttttttacatttaattgaaggggcaaaaaaggaactctttatcggtacaccctatttcattcctggaaggaaaatcatgaatgcattattagaagcacgaaaacgcggggttcaaatcacgattctcgttccagaaaaggcggatcacgcccttgttcgagaagcaaaattcccgtattgccgagagttaatacaagctggatgtaatatttacgcatttcaacaagggttttttcacgctaaagttattatagttgatgactacatttgtgatatcggaactgcaaactttgatatgagaagtttatatattaaccatgaaattaactgccttttatatgataaacattttatacaaacagtaagaaacaaattccataaagatctaagaaacgcatcattactttcctttaaagatgttagcccgcattctcttattgatagaggaaaagaatggataggaacaatactcgctttcttcctatag

SEQ ID NO: 98951 - protein, 397 aa, Bacillus thuringiensis serovar konkukian str. 97-27
MFFLPLLLIGIALWIIIDLSYGRIVHLRRVRSRSFPLRQSDFHLYTYGKDLYDTLFTDIKQAKHHVHVLFFIVKNDKISREFLKLLIDKAKEGIEVRLLLDRLGSHHLSNEAIRSLQKHGVSFSFCHKVKFPFPFFSANQRNHRKITVIDGKIGYIGGFNIGEEYLGHNERLGLWRDYHLRLTGEGVQDLQKQFLHDWFDDTNQNLLDASLYFPKQQPGTIQHQFIPTDGAYLQHTFLHLIEGAKKELFIGTPYFIPGRKIMNALLEARKRGVQITILVPEKADHALVREAKFPYCRELIQAGCNIYAFQQGFFHAKVIIVDDYICDIGTANFDMRSLYINHEINCLLYDKHFIQTVRNKFHKDLRNASLLSFKDVSPHSLIDRGKEWIGTILAFFL

SEQ ID NO: 98952 - DNA, 1482 bp, Staphylococcus aureus subsp. aureus MSSA476
  CDS (1)..(1482): transl_table=11
atgcgatatacattttcaaatgatttaggaacactttttaccattattttagccattggattcatcattaatttagtattggcttttattattatctttttagaaagaaatagacgtacagcgagttcaacttgggcatggctatttgtactttttgtcttaccattgattggttttattctttacttgttttttggtagaaccgtttcggcacgtaaattgaataaaaacaatggtaaggtgttaacggatttcgatggacttttaaaacaacaaatagaaagctttgataaaggtaattatggtactgataacaaacaagttcaaaaacatcatgatttagtacgtatgcttttgatggatcaagatggttttttaactgaaaataataaagttgatcatttcattgatggaaatgatttatatgatcaagttttacaagatattaaaaatgctaaagaatacatccatttagagtattatacattcgctctagatggcttgggccaaagaattttaaaagcgttagaagagaaattgaaacaaggtctagaagtgaaaattttatatgatgacgttggttcaaagaaagttaagatggctaattttgatcattttaaatcgttaggtggagaagttgaagcattttttgcttctaaattaccgttattgaatttcagaatgaataacagaaatcatagaaaaatcatcgtaatcgatggtcaactaggttatgtcggaggatttaacattggtgatgaatatctaggattaggtaaactagggtattggagagatacgcatttacgtatacaaggggatgcggttgatgcactgcagttgcgatttattttagactggaattcgcaagcgcaccgtccacagtttgaatatgatgttaagtatttccctaaaaagaacggaccattgggcaattcaccaattcaaatagctgcaagtggtccggctagtgactggcatcaaattgaatatggttatacaaaaatgattatgagcgctaagaagtcggtatatttgcaatcgccttatttcattccggataactcatatataaatgccattaaaattgcagctaaatcaggggtagatgttcatctaatgattccatgtaagccagatcatcctttagtttattgggcgacatattcaaatgcttcagatttactatctagtggcgtaaaaatttacacgtatgaaaatggatttatacattctaaaatgtgtttaatagatgatgaaatggtttcagtcggaactgctaatatggactttagaagttttgaattgaatttcgaagtcaatgcttttgtatatgatgaaaagcttgctaaagatttaagggtggcttatgaacatgatattacaaaatcaaaacaactaaccaaagaatcatatgccaatagaccgctgtctgttaagtttaaagaatcgttagctaaattagtttcgccaattttataa

SEQ ID NO: 98953 - protein, 493 aa, Staphylococcus aureus subsp. aureus MSSA476
MRYTFSNDLGTLFTIILAIGFIINLVLAFIIIFLERNRRTASSTWAWLFVLFVLPLIGFILYLFFGRTVSARKLNKNNGKVLTDFDGLLKQQIESFDKGNYGTDNKQVQKHHDLVRMLLMDQDGFLTENNKVDHFIDGNDLYDQVLQDIKNAKEYIHLEYYTFALDGLGQRILKALEEKLKQGLEVKILYDDVGSKKVKMANFDHFKSLGGEVEAFFASKLPLLNFRMNNRNHRKIIVIDGQLGYVGGFNIGDEYLGLGKLGYWRDTHLRIQGDAVDALQLRFILDWNSQAHRPQFEYDVKYFPKKNGPLGNSPIQIAASGPASDWHQIEYGYTKMIMSAKKSVYLQSPYFIPDNSYINAIKIAAKSGVDVHLMIPCKPDHPLVYWATYSNASDLLSSGVKIYTYENGFIHSKMCLIDDEMVSVGTANMDFRSFELNFEVNAFVYDEKLAKDLRVAYEHDITKSKQLTKESYANRPLSVKFKESLAKLVSPIL

SEQ ID NO: 98954 - DNA, 1461 bp, Erwinia carotovora subsp. atroseptica SCRI1043
  CDS (1)..(1461): transl_table=11
atgtcgacattttataccgtaataagttggttactggtttttagctactggttgctgatcgcaggtgtgaccttgcgtattctgatgaaacgtcgggcagtgccttcagcgatggcctggctactggtgatttatattctgccacttgtcggtattgtcgcttatctttcatttggcgaactccatctcggtaaacgtcgggctgaacgcgcgagcaaaatgtggccatcaacggcaaaatggctgcgcgaattaaaggaatatcgccgtattttcgcgacggaaaacagtgaagtcgccagcgcactatttcagctctgtgaacgccgacaaggggttggcggcgtcaaaggcaaccagttgcaattgatgaccacatttgatgacaccattaaggcgttattacgtgatattgaactcgcgcgtaataacatcgaaatggtgttctatatctggcaacccggtggtctggtcgagcaagtcacgtcttcccttatctcggccgcacgacgcggcgtacattgccgcatcctgctggactcggccggcagcgttcaatttttccgccaacatcatcccgaactgatgcgcaccgctggaatagaagtggtcgaagcgctgaaagtgaatctgttccgtgctttcctgcgccgcatggatttacgacagcaccgtaaaattattctgatcgacagccgcattgcttataccggcagcatgaatatggtcgatccacgtctcttcaagcaggatgctggcgttgggcaatggattgacctcatggcgcgtattgaaggcccggtagcgactaccctgggcatcatttactgctgtgactgggagatggaaacgggcaaacgcctgctcccgccgccgcctgatgttaacgtcatgccgttcgaacaggagagcggccacaccattcaggttatagcttccggccctggttacccggaagaaatgattcatcaggcgctgctgacgtccgtctattcggcgcgtaagcaattgatcatgacgaccccctacttcgtgcccagcgacgatctgctgcatgccatctgcaccgccgcccagcgcggggtcgatgtcagcattattgttccgcacaagaacgactccgtactggtcggctgggccagccgtgcgttcttcacggaactgctggccgcaggcgtaaaaatttaccaattcaaagacggactgctgcacaccaaaagtgtgctggtcgacggacagctcagcttggtcggcacggtgaatctcgatatgcgcagcctgtggctgaattttgaaattacgctggtgattgacgatgctggattcggcagcgacttagcctgcgtgcaggaagactatatcgcccgctcacgcctgttaaacgcgacgcagtggcaaaaccgtccttattggcaacgcattgtcgagcggctgttctactttttcagccccctgctatga

SEQ ID NO: 98955 - protein, 486 aa, Erwinia carotovora subsp. atroseptica SCRI1043
MSTFYTVISWLLVFSYWLLIAGVTLRILMKRRAVPSAMAWLLVIYILPLVGIVAYLSFGELHLGKRRAERASKMWPSTAKWLRELKEYRRIFATENSEVASALFQLCERRQGVGGVKGNQLQLMTTFDDTIKALLRDIELARNNIEMVFYIWQPGGLVEQVTSSLISAARRGVHCRILLDSAGSVQFFRQHHPELMRTAGIEVVEALKVNLFRAFLRRMDLRQHRKIILIDSRIAYTGSMNMVDPRLFKQDAGVGQWIDLMARIEGPVATTLGIIYCCDWEMETGKRLLPPPPDVNVMPFEQESGHTIQVIASGPGYPEEMIHQALLTSVYSARKQLIMTTPYFVPSDDLLHAICTAAQRGVDVSIIVPHKNDSVLVGWASRAFFTELLAAGVKIYQFKDGLLHTKSVLVDGQLSLVGTVNLDMRSLWLNFEITLVIDDAGFGSDLACVQEDYIARSRLLNATQWQNRPYWQRIVERLFYFFSPLL

SEQ ID NO: 98956 - DNA, 1566 bp, Mesoplasma florum L1
  CDS (1)..(1566): transl_table=4
atgataatgaaaaaaccgtttgtagcgacagcttctttaattgcaatgttcagtattggaggcgctttatatgttgcaatcaatttatgtttaaacttctttatacctacaccattgccgtttattttttttatatcagcaactcacatagtttcaatggtatgagcaattgttgttttatgtaatagaaaacgaagaattgaaactagaattagatgagcaatatttataatagtaattccattttttggtattatgtcttacatatttttaggtagggtttacaaatataataaaaataagaattatttatataacaaaaactcagttagtgttctacaaccaaaagtacaatatgacattgaaaatctaaaagaaattgaaagactaaatccagagtttaagagatcatttatgatgacttttgaacaacaaagagaaggtatttatgcaaatactgaaatagaatatttaaaatcaggaaatgaatatttttcaaatttattaaatgatataaaaaatgctaaagagtatgtaatgattaattgttacatcatttctgaaggtgaatttttgagtaaactaacaagcttactagttgaaaaaatgagtgaaggtgttagagtatacataatttatgatttcttaggaagttatggaagatttacaacaagtaaaaaaagattaattcaagagggtgcaaacttaattgcttactcaccgatacatttcccatttttaaaatgaaatgcaaattatagagatcacagaaaagatatttcaattgacggccaaataggatatttaggtggagttaacatttcagatgaatacataaataaaagtggagtttttggtttctgaaacgattcagcaataagaattaatggcgaaggagttcaagaaattgaagcaatattccaaaaagactgaaatttttatgtaactaaaaaacaaaagaaaattgaaaaattagaacctaaatttggtaaagcaatcagaaaacgttatacaactgatgaatttattcagattgtttctgatggaccaaatcatgacagacctatttgcttagaactattattaaatttaattcattcagcgcaaaatagaatttgactaaagtctccttactttataccacccccagaaattataaatgcgttatgtaatgctgcatctactggattggatgttcgtattttattaccaggaagatcagacaaatttttattgttagaagtttctaaacaatgaactaaaaaaatgtttgaaaacggcgttaaaatatattcaatgaatgatacttttatacatgaaaaagcttatatttttgatgaagctatatcatttactggaagttctaatcttgactatagagctctattttgcgatcaacaaactatggctctaataagatcaaataatatgaacaaaaagattgaagagaaaatgattcatgacatggataaatcatttgaatataaatttatgccaaacaaagatttaccattgtgaaaaagagctattgttaaagtctataatattatggccccacttttataa

SEQ ID NO: 98957 - protein, 521 aa, Mesoplasma florum L1
MIMKKPFVATASLIAMFSIGGALYVAINLCLNFFIPTPLPFIFFISATHIVSMVWAIVVLCNRKRRIETRIRWAIFIIVIPFFGIMSYIFLGRVYKYNKNKNYLYNKNSVSVLQPKVQYDIENLKEIERLNPEFKRSFMMTFEQQREGIYANTEIEYLKSGNEYFSNLLNDIKNAKEYVMINCYIISEGEFLSKLTSLLVEKMSEGVRVYIIYDFLGSYGRFTTSKKRLIQEGANLIAYSPIHFPFLKWNANYRDHRKDISIDGQIGYLGGVNISDEYINKSGVFGFWNDSAIRINGEGVQEIEAIFQKDWNFYVTKKQKKIEKLEPKFGKAIRKRYTTDEFIQIVSDGPNHDRPICLELLLNLIHSAQNRIWLKSPYFIPPPEIINALCNAASTGLDVRILLPGRSDKFLLLEVSKQWTKKMFENGVKIYSMNDTFIHEKAYIFDEAISFTGSSNLDYRALFCDQQTMALIRSNNMNKKIEEKMIHDMDKSFEYKFMPNKDLPLWKRAIVKVYNIMAPLL

SEQ ID NO: 98958 - DNA, 1269 bp, Propionibacterium acnes KPA171202
  CDS (1)..(1269): transl_table=11
gtgcacatgacccgggcccctcgccaaagattcactgttcgccgcgcactgcactgggtggcaggcgggatggttgccgcccagatggctacgatggccggactggtcacctacaacggcattaagcgacgaggccgtcgcccataccgtttccccactgcgccggcagagcccctcaaggtgtctggtcatcaggttgagatcttcactttcggacgcgatctttacgcggcgatgatcttcgacattaaatcagctcaacacaccgtttaccttgagaccttcatctggaaaaacgacgaagtcgggcgtcattttcggcaggcactcgtagaagccgccgcacgcggggtcaaggtctatgcgatgtgggacaccttcgccaacctcgttgtggacccacgattctttcggcagctcgaaggggtgcaggtgcgagcccaacctctcgtaaccccctcatggataccgacgctacgcaatctggggcgagaccaccgcaagctcctcatcgtcgattccaaggtcgcctacatcggtgggtacaacatcggctccctctacgccgaccgctggcgtgacacccacgctcgtattaccgggcctgccgtcggggagctcgaaaacgtctttgttgacatgtggaatcaacgccccaagggggccctcatctcccggcgcaaccagcccgtactaccttctcccggcgtccgctattgggatacgcctttcgctgtacaccgcaactccccccggatggcggtctatcccatccggaacatgtacctggaggccatcgaccgcgcgagtgagcgaatctggatgacccagggctacctcatccccgatgacgacgttgtcgcagccctccaccaagccgcatctcgcggggttgacgttaggatcgtcattccggctgaatcgaaccatgtcatcgccgactggctgagccggggctactacgaccgcctcctccaccagggtgtgcgactgttcctttaccagggagctatggtccacgcgaagacctgcactattgacggcatttggtccacgattggtacagcgaacctcgaccggttatccctccaaggtaactatgaggtaaacgtcgctatcactgactccaccgtcgcccaacgaatggctgagattttcgagatcgacatggccaactgtgtggaactgaccttagacgaatggcagtcgcgctctcacatagcgaaactcactgaagctctactgtcaccttggcgaccatttttctag

SEQ ID NO: 98959 - protein, 422 aa, Propionibacterium acnes KPA171202
MHMTRAPRQRFTVRRALHWVAGGMVAAQMATMAGLVTYNGIKRRGRRPYRFPTAPAEPLKVSGHQVEIFTFGRDLYAAMIFDIKSAQHTVYLETFIWKNDEVGRHFRQALVEAAARGVKVYAMWDTFANLVVDPRFFRQLEGVQVRAQPLVTPSWIPTLRNLGRDHRKLLIVDSKVAYIGGYNIGSLYADRWRDTHARITGPAVGELENVFVDMWNQRPKGALISRRNQPVLPSPGVRYWDTPFAVHRNSPRMAVYPIRNMYLEAIDRASERIWMTQGYLIPDDDVVAALHQAASRGVDVRIVIPAESNHVIADWLSRGYYDRLLHQGVRLFLYQGAMVHAKTCTIDGIWSTIGTANLDRLSLQGNYEVNVAITDSTVAQRMAEIFEIDMANCVELTLDEWQSRSHIAKLTEALLSPWRPFF

SEQ ID NO: 98960 - DNA, 1578 bp, Streptococcus pyogenes MGAS10394
  CDS (1)..(1578): transl_table=11
atgattatcaaaaagaaagcaaaagtaaaatatttgctccataaagggaaacatggatttttaagaggaatttttagtagaacaacaatcattgtattattaattattttgcaattagttttcttatttcaatcttatgcctggatggagcagtaccgtgtttggataacgattcttgaaagtgtctttgctattactattgttttatatttagttaatagtgatatggatgctatttcaagaatgacgtggttaattttgattatgattgctccattactagggtcactgtttttaatttatacaaaattggattggggttacagagggctaaaacaaagaataaatcatcttgtagatctgtctgcaccttaccttagcgatgatgacgctatattagaggtattaaaggatagcacatcaaccacatatcatttagtacagtacttagaaagaagtcgtggcaactttccgatttataataatacaagggtaacttacttcccaacaggtgaaactttttttgatagtttaaaagaacagttattcttagctaaaaagtacatttttcttgaattttttattattgcagaaggccaaatgtggggagaaatccttagtattctagaaaaaaaagtcagtgaaggtgtagaagttagggtgttgtttgatggcatgaacgaactatcaacgctatcatcagattacgccaagagattagaacaaatagggattaaagctaaatcatttttaccgatttcaccctttatctctacctattacaattatcgagatcaccgaaaaattgtcgttattgatggggaggtatcattcactggaggtattaatctagcagatgagtacattaatgaagtagagcgttttggccactggaaagatgctggtttaatgcttgagggtgaagcaacagacagctttttaattttgtttttacaaatgtggtctatcacagaaaaagaactgattattgatccttatctttcagatcattctttaaaacttccttcagatggctatgttattccctacggtgattccccgcttgatactgataaaataggtaaaaatgtttatatagacattttaaatcatgctaaagagtacgtttatatcatgacaccttaccttattttagatagcgagatggaacacgctttacgatttgcatcagaacgtggagtagatatccgaattattatgccaggagtgccagataagggggtaccatatgccttagctaaaacctattataaagctttgatgacttctggagtaaaaatttacgagtatcaaccagggttcgttcattcaaaggtatttatctctgataatacaaaagcagttgtcggaacaattaacttagactatcgtagcctttatcatcattttgaatgcgcgacttatttatatcgtgtgtcagttattgctgatattgtgaatgactttaatgaagctcaaaagcaatcactattgatgacatcagatcatttgacgcaacgtccttggtatcaaaaattgataggattattagtacgaacaattgcccctctcttgtaa

SEQ ID NO: 98961 - protein, 525 aa, Streptococcus pyogenes MGAS10394
MIIKKKAKVKYLLHKGKHGFLRGIFSRTTIIVLLIILQLVFLFQSYAWMEQYRVWITILESVFAITIVLYLVNSDMDAISRMTWLILIMIAPLLGSLFLIYTKLDWGYRGLKQRINHLVDLSAPYLSDDDAILEVLKDSTSTTYHLVQYLERSRGNFPIYNNTRVTYFPTGETFFDSLKEQLFLAKKYIFLEFFIIAEGQMWGEILSILEKKVSEGVEVRVLFDGMNELSTLSSDYAKRLEQIGIKAKSFLPISPFISTYYNYRDHRKIVVIDGEVSFTGGINLADEYINEVERFGHWKDAGLMLEGEATDSFLILFLQMWSITEKELIIDPYLSDHSLKLPSDGYVIPYGDSPLDTDKIGKNVYIDILNHAKEYVYIMTPYLILDSEMEHALRFASERGVDIRIIMPGVPDKGVPYALAKTYYKALMTSGVKIYEYQPGFVHSKVFISDNTKAVVGTINLDYRSLYHHFECATYLYRVSVIADIVNDFNEAQKQSLLMTSDHLTQRPWYQKLIGLLVRTIAPLL

SEQ ID NO: 98962 - DNA, 1464 bp, Leifsonia xyli subsp. xyli str. CTCB07
  CDS (1)..(1464): transl_table=11
atgggcgacggggtcttggccacggtcatcgtggtcttcctgctcctgttcgactttgtgatccgtgttgtcgcgatcatcgtggtcccccggaatcgcaagcccacctcggcgaccgcctggctgctggccattttcctcatcccgtacatcggagtgctgttcttcctgctgatcggcagctacaagctcccgaaggcgcgccgggagaagcagaaggagatcaactccttcatcatcgacagcaccgagggcatggagcgtgtgcggcgtgaccacccctggccgccgtggctccagtcggtcgtcgaactgaaccgcaatctcggggcgatgcccctggtgggcggcaaccgggcctcgctcaatggcgactatgtgggctcgctcgcggcgatgacggaggagatcgcggccgcgcgccgctacgtccacgtcgaattctacatcctgaccctcgacaagacgacagcgccgttcttcgacgcgctggaacgtgcggtgcagcggggggtgaccgtgcgggtgctgctcgaccacatcgcgtcgctccggacgcccggctacaccgccacgatccgccggctcaccgagatgggcgtgaagtggcatctcatgcttccggtgcagccgttccggggaaagtatcagcggcccgacctccgcaaccaccggaagctgctcgtggtcgacgggcgggtcgccttcgtgggctcgcagaacgtcatcgaccgcagttacaacaagcgctccaacatcaagcgcggtctcaagtggaaagagctgatcgtccggctcgagggtccgatcgtcgccggtctgaacgcgatcttcatcacggactggtacagcgagaccgacgaactcctgcggcgggagacggagccgatcgcggtcgaactcgacgcggacgaactcgacgcgcaggtcgtgccttcgggtcccggattcgccggcgagaacaatctccgactgttcctggcgctgctctactacgcgcaggagcgcatcgtcatcacatcgccgtacttcgtccccgacgagtccatgctcaccgcgatcaccactgcgacgcagcggggtatcgcggtcgatctgttcgtctcggagatcggggaccaggcgctcgtctaccacgcccagcggtcttactacgaagccttgctgcgcgccggagtgaggatctggatgtacaaggcgccgtacatcctgcatgccaagcacttcacgatcgacgatgaggtcgcggtgatcgggtcgagcaacatggacatgcgctccttccagctgaacatggaggtctctctgatggtcaggggccgtccgttcgtgcagcagatgcgggctatcgaggacggctaccggcgggacagccgcgagctgacgctggatgagtggatgcggcagccgctgcgttcgaccgtgctggacaacctcgcgcgattgacttccgcgctgcaataa

SEQ ID NO: 98963 - protein, 487 aa, Leifsonia xyli subsp. xyli str. CTCB07
MGDGVLATVIVVFLLLFDFVIRVVAIIVVPRNRKPTSATAWLLAIFLIPYIGVLFFLLIGSYKLPKARREKQKEINSFIIDSTEGMERVRRDHPWPPWLQSVVELNRNLGAMPLVGGNRASLNGDYVGSLAAMTEEIAAARRYVHVEFYILTLDKTTAPFFDALERAVQRGVTVRVLLDHIASLRTPGYTATIRRLTEMGVKWHLMLPVQPFRGKYQRPDLRNHRKLLVVDGRVAFVGSQNVIDRSYNKRSNIKRGLKWKELIVRLEGPIVAGLNAIFITDWYSETDELLRRETEPIAVELDADELDAQVVPSGPGFAGENNLRLFLALLYYAQERIVITSPYFVPDESMLTAITTATQRGIAVDLFVSEIGDQALVYHAQRSYYEALLRAGVRIWMYKAPYILHAKHFTIDDEVAVIGSSNMDMRSFQLNMEVSLMVRGRPFVQQMRAIEDGYRRDSRELTLDEWMRQPLRSTVLDNLARLTSALQ

SEQ ID NO: 98964 - DNA, 1533 bp, Desulfotalea psychrophila LSv54
  CDS (1)..(1533): transl_table=11
atgcaaatacaagcgctgcactggacctccccactgatctcaacagtttttttcaccgcagatctcatcctgcgcattggtctctccctacgggtaatcatgtgtaaaaaaaactatggggtttcatacgcatggttggtcgttgtccttcttgtcccctttctcggcggcctgctctacctctgcttcggagaaaatcgactctccgaacggcgaatcaaaagaatactcaaggcaaaaaaatactactataagtggttgcaacaactagccgaaggcccgcaggtagactggtctgcgctcaaccctgagtttgcccccatccaactgcacacccaaaacctcgttggcatccccgccatggctggcaataacatcagcctgctccacagtcaggacaatatactggacagtattatcaaagacatagaggcatcacagtccacatgtcatctccaattttatatttgggaagctggcggccgtattaaagagataagcgaggccctgatcagagctaggaaaagaggggtcatctgccgaatactactggacgccattggcagcagaggttttttcagctccgcctcggccagacgaatggagcaggcaggaatcaaaattcaagcatcccttcccgctggcatatacagggctatttttgctcgaatggatatccgtaaccatcgaaaaattatcgtcattgatggcaaaatcgcctatacgggaagccaaaatatggttgacgcaatcttcttcaaacaagagagcggcgtaggtcactgggttgacatagtcgcacgtattcgtggccctgtggtagagacccttgccgcgacctttgccagcgactggtacctggaggcagagcaggatacatttcagcagatagacgacgtacaggagttgcgccatattggcgacatatacccacaaactgcccaaggaacaagcgccgtccaactggtaccatccggtcccggttttactcaggatgccatccacagcttactcctcaccgtcatctattccgctcgcaaagagcttattatgacaacaccatacttcatccccgatgagtctctgctcactgctctaaaagctgctgccctgcgtggggtccgggttattttaataattccccagagcaatgattcaaaactcgtcaaatatgccagccgggcaaagtacgatgacctcacctacgccggagtggaaataatgctctttaatggcggactcctccactcaaagaccatcaccgttgacggtgatctggccctctttggctcggtaaaccttgatatgcgaagtttttggcttaacttcgaggtaacactggtgatctattgcagagagacaacccaggacattcgacgggcacagatggcatacctacgacaatcagcccctcttgacctccgccattttcaccgtcgtcacttctttgagaaactcaaagaaaactgtgcactactggtttcacccactactataacgcaccccaacaactgttcagcgcaacagttatag

SEQ ID NO: 98965 - protein, 510 aa, Desulfotalea psychrophila LSv54
MQIQALHWTSPLISTVFFTADLILRIGLSLRVIMCKKNYGVSYAWLVVVLLVPFLGGLLYLCFGENRLSERRIKRILKAKKYYYKWLQQLAEGPQVDWSALNPEFAPIQLHTQNLVGIPAMAGNNISLLHSQDNILDSIIKDIEASQSTCHLQFYIWEAGGRIKEISEALIRARKRGVICRILLDAIGSRGFFSSASARRMEQAGIKIQASLPAGIYRAIFARMDIRNHRKIIVIDGKIAYTGSQNMVDAIFFKQESGVGHWVDIVARIRGPVVETLAATFASDWYLEAEQDTFQQIDDVQELRHIGDIYPQTAQGTSAVQLVPSGPGFTQDAIHSLLLTVIYSARKELIMTTPYFIPDESLLTALKAAALRGVRVILIIPQSNDSKLVKYASRAKYDDLTYAGVEIMLFNGGLLHSKTITVDGDLALFGSVNLDMRSFWLNFEVTLVIYCRETTQDIRRAQMAYLRQSAPLDLRHFHRRHFFEKLKENCALLVSPTTITHPNNCSAQQL

SEQ ID NO: 98966 - DNA, 1461 bp, Yersinia pseudotuberculosis IP 32953
  CDS (1)..(1461): transl_table=11
atgacgacattttataccgtaatcagttggctttccgtttttggctactggttactcattgccggggtaacattgcgtattctgatgaaacgcagggccgttccttctgctatggcttggttactgattatctacattctgccattggtggggataattgcttacctttcattcggtgaattgcatttgggtaagcggcgtgctgaacgagctaaagccatgtggccatcgaccgctcgctggctgagtgaactcaaggaatgccaacatatctttgctaactctaatagcgaagttgccaccccactgtttcaattatgcgaacggcgtcaaggaataaacggtgttaaaggaaatcaactacaactattaacaacaaccgatgacacactaaaagcgctagtacgagatattgaactcgcccgccacaatatagaaatggtgttttatatttggcaacctggtggtctggtcgatcaggtggctgaatcgttgatggctgcggctcgacgcggcgttcattgccggctgttactcgattcagcgggtagcaagcaatttttccgcagcccttatcccgcaatgatgcgtaatgcaggtattgaggtggttgaggcacttaaagttaatgtatttcgtatgttcttgcgccgaatggatctgcgccaacatcggaaaattgtgttaatcgacaactatgttgcttataccggcagtatgaacatggtagatccccggttcttcaaacaagatgccggggttggtcagtggattgatatgatggcgcgcatggaaggcccggtagccacaaccctaggtattgtttatgcctgtgactgggaaattgaaacaggcaaacgtattttacccccgccccccgacgcgaatattatgccattcgaagaagagactggtcatacgattcaagtcatcgcttctggccctggtttcccagaagaaatgatccaccaggcattattaacagctgtgtatgccgcacgtgaacagttaattatgactacgccatattttgtccccagtgatgacttattacatgccatctgtaccgcggcacaacgcggggttgatgtcagtattattgtcccgcgtgagaatgattcgatgatggttcgctgggccagccgagcattcttcaccgaattgctgaatgcaggcgttaaaatttatcagtttgaaggcggcctattacacagtaaaagtgttctggtcgatggacagctaagtttagtcggcactgttaatctggatatgcgcagtttgtggctgaattttgaaatcacactggtgattgatgatgatggctttggggctgatttagcacaagttcaggatgattatatcgcccgctctgccttattggatggtgaacggtggaacaagcgccctctttggcacagagtaactgagcgtttattctattttttcagcccattactgtaa

SEQ ID NO: 98967 - protein, 486 aa, Yersinia pseudotuberculosis IP 32953
MTTFYTVISWLSVFGYWLLIAGVTLRILMKRRAVPSAMAWLLIIYILPLVGIIAYLSFGELHLGKRRAERAKAMWPSTARWLSELKECQHIFANSNSEVATPLFQLCERRQGINGVKGNQLQLLTTTDDTLKALVRDIELARHNIEMVFYIWQPGGLVDQVAESLMAAARRGVHCRLLLDSAGSKQFFRSPYPAMMRNAGIEVVEALKVNVFRMFLRRMDLRQHRKIVLIDNYVAYTGSMNMVDPRFFKQDAGVGQWIDMMARMEGPVATTLGIVYACDWEIETGKRILPPPPDANIMPFEEETGHTIQVIASGPGFPEEMIHQALLTAVYAAREQLIMTTPYFVPSDDLLHAICTAAQRGVDVSIIVPRENDSMMVRWASRAFFTELLNAGVKIYQFEGGLLHSKSVLVDGQLSLVGTVNLDMRSLWLNFEITLVIDDDGFGADLAQVQDDYIARSALLDGERWNKRPLWHRVTERLFYFFSPLL

SEQ ID NO: 98968 - DNA, 1530 bp, Bacillus cereus E33L
  CDS (1)..(1530): transl_table=11
atgaagaaacctatcatccaattactattaatatttacaattgtatctatcgttcttttcctattaaatacatcttatatttcgttatatacatttgtcggcgttctctggtccatcacaattgtaggaatttcattcgttatttttatcgaaaatagatctcctcaaagtaccttagcctggtttttagtattagcacttcttcccgttataggtgtgcttttatactctattttcgggcgtagccgttggagaagaaaaaagcatctccatcgttcagaagagcaaagaaagttattccgtgaaatattagaaggaagacgactagagttatcactcaaagtcccattaagtgaacgctctgtccatttaacagaagtcgtacaaaaatttggaggcgggcctgcagcagatagaacgactaccaaacttttaacaaacggagatcaaacattctcagaaattttgcaagcgatcgagcaagcaaaacatcacatacatattcaatactatatttataaatctgatgagattggtacaaaagttcgggatgcgttaatcaaaaaggcaaaagatggtgttattgtacgcttcctttatgatggactcggaagtaatacgttgagaagacggtttttacaacctatgaaagaagctggagttgaaattgttgaatttgatcctattttttcagcttggttacttgaaaccgtcaattatcgtaaccaccgtaaaatcgtcattgtagatggagaaatcggttttactggtggactcaacgtcggtgatgaatatcttggtcgttcaaaaaaatttcccgtttggcgtgacagtcatttaaaagtagaaggaaaagcgctatataaattacaagcaatctttctagaggattggctctatgcatctagtggattgaatacttattcttgggatccatttatgaatagacaatacttccctggtaaagaaatttcaaatgcagaaggtgctgtgcaaattgtagcgagcggaccaagctcagatgataaaagcattcgcaatacattattagctgttatgggctcggcaaaaaaatctatttggattgctacaccctactttattccagatcaagaaactttaacattattacgtttaagtgcaatatctggcatagatgtacgcattttatatcctggtaaaagcgatagtattattagtgaccaagcatctcagtcctacttcactccacttttaaaagctggtgcctccatttatagttataaagatggctttatgcatgcaaaaattgtacttgttgatgataaaatcgcaacaatcggaacagcaaatatggacgtacgcagctttgaattgaattacgaaattattagcgtactgtatgaatcagaaactgttcatgatattaaacgtgattttgaagatgactttaagcattctactgaaattaaatggaacgctttccaaaagagaagtatcaaaaaacgaatattagaatcttttatgaggctcatttctcctttactataa

SEQ ID NO: 98969 - protein, 509 aa, Bacillus cereus E33L
MKKPIIQLLLIFTIVSIVLFLLNTSYISLYTFVGVLWSITIVGISFVIFIENRSPQSTLAWFLVLALLPVIGVLLYSIFGRSRWRRKKHLHRSEEQRKLFREILEGRRLELSLKVPLSERSVHLTEVVQKFGGGPAADRTTTKLLTNGDQTFSEILQAIEQAKHHIHIQYYIYKSDEIGTKVRDALIKKAKDGVIVRFLYDGLGSNTLRRRFLQPMKEAGVEIVEFDPIFSAWLLETVNYRNHRKIVIVDGEIGFTGGLNVGDEYLGRSKKFPVWRDSHLKVEGKALYKLQAIFLEDWLYASSGLNTYSWDPFMNRQYFPGKEISNAEGAVQIVASGPSSDDKSIRNTLLAVMGSAKKSIWIATPYFIPDQETLTLLRLSAISGIDVRILYPGKSDSIISDQASQSYFTPLLKAGASIYSYKDGFMHAKIVLVDDKIATIGTANMDVRSFELNYEIISVLYESETVHDIKRDFEDDFKHSTEIKWNAFQKRSIKKRILESFMRLISPLL

SEQ ID NO: 98970 - DNA, 1545 bp, Bacillus cereus E33L
  CDS (1)..(1545): transl_table=11
atgaaaaatacgttaaagttgattttctttgttttactattgttcgcattatttgtttcattacgtatgtttattgatgtggcattttattcggatgtaattgggataaaagatgtttcaattttaggtattattagtattttatttacggtatctgcatttttaattggctgtgttattttcttagagaaccgtcatccgtcaaaaacacttacatggctcattgtattaggtatttttcccgtatttggattcttcgcttatttattattcggacaaaacttccggaggaagagaatgttccaaaagaaggcgttgctcgatgaacaagcgtttttacaatataagggacatgaagattacgaagaacggattttgcgcaatcataagcatcaagagctattatttcgtttagcggatcgcttaggcgctttaaatatttcatttcaaactgaaacgagaacattaacaaatggagatgaaacgtttcaggccattttagatggattaaaacgagcgaaacatcacattcatatggaatattacattgtgcgtgatgataagcttggaacagaaattaaagatattttaatacaaaaatcaaaagagggcgtagttgttcgttttttatatgatgcggttggaagttttaaattatcaaaatcgtatattgaagaattaaacgatgcaggtgtcgaagtaattccgttcttccctgtgcgctttccaattttaaacgataagattaattatcgaaaccaccgaaaaatcgttattattgatggaaatgaagggtttgtaggtggattaaatattggcgatgaatatttagggaaggataagtacttcggcttttggcgagacacacatttatatttgcgtggtgaagctgtacaaagtttgcaacttattttccttcaagattggttttatatgactggtgaggctgtgctagcccctgaatatttacaagcgaaagcagttgagggagagcattggggaggcgtgcagctcgttgcaggtgggccggataataaatgggaaacaatcaaacatttatattttgctatgattgcttctgcgcggaaatccatttggattgcaacgccgtatttcattccggatgatgatattttatctgcattaaaggtagctgcgcttgctggtatcgatgttcgtttgttaatgccgagtaagcctgataagcgcactgtcttttacgcatcgagatcgtatttcccagagcttttagatgcaggggtaaagatatatgaatacgagaaaggttttctccatagtaaagttgtcattgtcgattctgatttagcttcaattgggacagcgaatatggatatgagaagttttcatttgaactttgaagtaaatgcctttttatatgatacagatagcattcgaaaacttgttcaagattttaaagacgatttagaagaatcaagtgaaattcatgtcgatcgttttcataaaaggcgtcttcatagacgaattgttgaatcaacgtaccgattattatcacctttattataa

SEQ ID NO: 98971 - protein, 514 aa, Bacillus cereus E33L
MKNTLKLIFFVLLLFALFVSLRMFIDVAFYSDVIGIKDVSILGIISILFTVSAFLIGCVIFLENRHPSKTLTWLIVLGIFPVFGFFAYLLFGQNFRRKRMFQKKALLDEQAFLQYKGHEDYEERILRNHKHQELLFRLADRLGALNISFQTETRTLTNGDETFQAILDGLKRAKHHIHMEYYIVRDDKLGTEIKDILIQKSKEGVVVRFLYDAVGSFKLSKSYIEELNDAGVEVIPFFPVRFPILNDKINYRNHRKIVIIDGNEGFVGGLNIGDEYLGKDKYFGFWRDTHLYLRGEAVQSLQLIFLQDWFYMTGEAVLAPEYLQAKAVEGEHWGGVQLVAGGPDNKWETIKHLYFAMIASARKSIWIATPYFIPDDDILSALKVAALAGIDVRLLMPSKPDKRTVFYASRSYFPELLDAGVKIYEYEKGFLHSKVVIVDSDLASIGTANMDMRSFHLNFEVNAFLYDTDSIRKLVQDFKDDLEESSEIHVDRFHKRRLHRRIVESTYRLLSPLL

SEQ ID NO: 98972 - DNA, 1194 bp, Bacillus cereus E33L
  CDS (1)..(1194): transl_table=11
atgttcttcttacctctcttattaataggtattgctctctggattgtaatcgatctttcttatgggagaattgttcatttaaggcgtgtacgttctcgttctttccctttacgtcaaagtgattttcacctttatacatacggaaaagatttgtatgacactctatttactgatataaaacaggcgaaacaccatgtgcatattttgttcttcattgtaaaaaacgataaaatcagccgagaatttttaaagttacttattaataaggcaaaggaaggaattgaagtaagacttttactcgatagattgggaagccatcatttatcaaacgaggccattcgctccctgcaaaaacatggtgtctctttttcattttgtcacaaagtaaagtttccttttcctttcttttctgcaaatcaaagaaaccatagaaaaattacagttatcgacggtaaaattggttacattgggggatttaatattggtgaagagtatttgggacataatgagcggttaggattatggagggactatcatttacgtcttacaggcgaaggagtacaagatttacaaaagcaatttttacatgactggtttgatgatacaaaccaaaatttattggacgcttctctttattttccgaaacagcaacccggtactatcgaacatcaatttattccaactgatggtgcctatttacaacatacttttttacatttaattgaaggtgcaaaaaaggaactctttatcggtacaccctatttcattcctggaaggaaaattatgaacgcattattagaagcacgaaaacgcggggttcaaatcacgattctcgttccagaaaaagcggatcatgcccttgttcgagaagcaaaattcccgtattgccgaaagttaatacaagctggatgtaatatttacgcatttcaacaagggttttttcacgctaaagttattatagttgatgactacatttgtgatatcggaactgcaaactttgatatgagaagtttatatattaaccatgaaattaactgccttttatatgataaacattttatacaaacagtaagaaacaaattccataaggatctaggaaacgcatcattactttcctttaaagatgttagcccgcattctcttattgatagaggaaaagaatggataggaacaatactcgctttcttcctatag

SEQ ID NO: 98973 - protein, 397 aa, Bacillus cereus E33L
MFFLPLLLIGIALWIVIDLSYGRIVHLRRVRSRSFPLRQSDFHLYTYGKDLYDTLFTDIKQAKHHVHILFFIVKNDKISREFLKLLINKAKEGIEVRLLLDRLGSHHLSNEAIRSLQKHGVSFSFCHKVKFPFPFFSANQRNHRKITVIDGKIGYIGGFNIGEEYLGHNERLGLWRDYHLRLTGEGVQDLQKQFLHDWFDDTNQNLLDASLYFPKQQPGTIEHQFIPTDGAYLQHTFLHLIEGAKKELFIGTPYFIPGRKIMNALLEARKRGVQITILVPEKADHALVREAKFPYCRKLIQAGCNIYAFQQGFFHAKVIIVDDYICDIGTANFDMRSLYINHEINCLLYDKHFIQTVRNKFHKDLGNASLLSFKDVSPHSLIDRGKEWIGTILAFFL

SEQ ID NO: 98974 - DNA, 1536 bp, Mannheimia succiniciproducens MBEL55E
  CDS (1)..(1536): transl_table=11
atgatgataaaatccctatgtttatgtataattttgaattcttgcataaagttctcaaaaagtgcggttagaatgaatattaatttagactcgattatagcatatattgtgccggtgattatgtggacattaatagtcaccatcacgttgcgccaaattatcaaacggcaatcctcctcggcaatgctctcctggttgatgattatttatattgtgccggtagtcggcatcctggcttatttggtactgggcgaaattaatttgggcaaacggcgggcaaatgcctctaaacaattattacccaaatatatgaaatggttcgccggccttaaaaaccaacaacatttactgattaacgatcaacaaccgtcgcttgccagccctttatttgctcttgcccaacgccgtttaagcattccctgtattaacggcaacgaattacatattctggacactccggaaagcattattcaaaatattattgatgacattcaccaggctcaatattctatcaatatggtattctatatttggtcaaacggcggtctggtggagcaggtacagcaagcgttgattcaagccaagcaacgcggcgtgaaaattcatattctgctggactccgtaggaagccgggcgtttttcaaaagcgaaaattaccaaaaaatgaccgcacttggtattgaaattgaagaagccctgcacgtaaatttgctgcgggttttcctgcgccgtattgatttacgtcaacatcgcaaaattattgtgatcgataatcaaatctcttataccggtagcatgaatatggttgatccgaatttctttaagcaagacagccatgtaggaaaatggatcgacattatggtacgtatcgacggcccggtttccgccgtgctgaacggtttgcattcatgggattgggaaatggaacgcgggcaaggactttatgtgccgttgccaagcccccaacatccgatggataattataatattcacgcggtacaaattctcgccaccggccccgggttgccggcggatttaatggaacaatcccttgctacggcgatttttgccgccaaggaaagtattacaatcaccacgccttattttgtgccgagtcagaatattgtagatgcgttgcaaattgccgcgctgcgaggcgtgaatgtgtcactgattttgccggtgcataacgattcccttatggttcgctgggcaagccgtacttattttgatgatctactcaccgccggtgtaaaaatttataactttacggaaggactgttgcatacaaaaagtatcctggttgataacaaaatggcactggtcggtacggtaaacatggatattcgcagtttttcgctgaatttcgaagtgaccatggtagttgaagaccaaactttcgccaatgaaatcagtttgctccatgaaaactatatgaatggtgccacgttgctggacgaacaacgctggttaaaccgcccggtgtttacacgaattattgaaaaactgtttttcttattcagcccattattatag

SEQ ID NO: 98975 - protein, 511 aa, Mannheimia succiniciproducens MBEL55E
MMIKSLCLCIILNSCIKFSKSAVRMNINLDSIIAYIVPVIMWTLIVTITLRQIIKRQSSSAMLSWLMIIYIVPVVGILAYLVLGEINLGKRRANASKQLLPKYMKWFAGLKNQQHLLINDQQPSLASPLFALAQRRLSIPCINGNELHILDTPESIIQNIIDDIHQAQYSINMVFYIWSNGGLVEQVQQALIQAKQRGVKIHILLDSVGSRAFFKSENYQKMTALGIEIEEALHVNLLRVFLRRIDLRQHRKIIVIDNQISYTGSMNMVDPNFFKQDSHVGKWIDIMVRIDGPVSAVLNGLHSWDWEMERGQGLYVPLPSPQHPMDNYNIHAVQILATGPGLPADLMEQSLATAIFAAKESITITTPYFVPSQNIVDALQIAALRGVNVSLILPVHNDSLMVRWASRTYFDDLLTAGVKIYNFTEGLLHTKSILVDNKMALVGTVNMDIRSFSLNFEVTMVVEDQTFANEISLLHENYMNGATLLDEQRWLNRPVFTRIIEKLFFLFSPLL

SEQ ID NO: 98976 - DNA, 1467 bp, Bacillus licheniformis ATCC 14580
  CDS (1)..(1467): transl_table=11
atggatattattaaaaatatcagtatcacatcgatatttctcggttttatattagttttaaatacgcttttggcaatcgttgtgatctttagggaacgccgggatgcaagctcctcctgggcctggctcttggtgctcttctttattcccgttctcggctttatcctttatttgctcttcggccacaatttgagcaggaatcacctttttcaatgggaagaccgaaagaagatcgggattgaaaaaatattggaacagcagctgaccaagctgaaaaaccgcgagtttgaatttcgcaataaagcgacggcggacagcaaagacttgatttatatgcacattttgaataaccacgccgtttttacagaagacaatgcggtcgagctgttaacggacggacgccagaaattcgacaggctgcttcgcgatattgaaaacgccaaagaccatattcatcttcaatattatatttataaaggcgatgagatcggcaaaaagctccgggatgcgctcatcaaaaaagcaaaagaaggcgttgaagtccgcgttttgtatgatgaattaggatcaagaagcctcaggaaaagctttttcaaagagctgaaaaaagcgggaggatttgtcgaagtctttttcccgtcgcgctttaaatttatcaatttgcgcatgaattaccgcaaccaccgcaagctcgtcattatcgacggcgtcatcggctatgtcggaggatttaatgtcggagacgaatatctcggtctgaacccggcctttggctattggcgggacacgcacctcagaatcaaaggaacagcggtccactcgattcaaacgcgttttatcctggattggaatcaggcctcgcaccatcacgacattacatatatgccaaaccattttcctgacatcgactcccacggaaacatcggcatgcaaatcgtcaccagcggccccgattcagaatgggagcagattaaaaacggctatattaaaatgatatcaacggcaaagcggtccattcttattcagacgccttattttataccggacgcaagcctgctcgatgccctcaggatcgcttgtctgtccggcgttgacgtcaggatcatgattcctaacaaacccgaccatccgtttgtgtactgggcaacctattcttacatcggcgaacttttaaaagcaggcgcctccgtatttatttacgacaacggttttatccatgcgaaaacgattgtagtagatgaggaaatttcatcggtcggcacggcaaatattgatatgcgcagcttcaagctcaattttgaagtgaatgcatttttatatgatgaggaaattgcgagaagccttgtcctatcatttgaaaaagatctgcaagtgtcaagggagctgacctttgaggaatatttaaacagaagcaaatcgatccgcttcaaagaagccatttcgatcctgctgtcgccgattttatag

SEQ ID NO: 98977 - protein, 488 aa, Bacillus licheniformis ATCC 14580
MDIIKNISITSIFLGFILVLNTLLAIVVIFRERRDASSSWAWLLVLFFIPVLGFILYLLFGHNLSRNHLFQWEDRKKIGIEKILEQQLTKLKNREFEFRNKATADSKDLIYMHILNNHAVFTEDNAVELLTDGRQKFDRLLRDIENAKDHIHLQYYIYKGDEIGKKLRDALIKKAKEGVEVRVLYDELGSRSLRKSFFKELKKAGGFVEVFFPSRFKFINLRMNYRNHRKLVIIDGVIGYVGGFNVGDEYLGLNPAFGYWRDTHLRIKGTAVHSIQTRFILDWNQASHHHDITYMPNHFPDIDSHGNIGMQIVTSGPDSEWEQIKNGYIKMISTAKRSILIQTPYFIPDASLLDALRIACLSGVDVRIMIPNKPDHPFVYWATYSYIGELLKAGASVFIYDNGFIHAKTIVVDEEISSVGTANIDMRSFKLNFEVNAFLYDEEIARSLVLSFEKDLQVSRELTFEEYLNRSKSIRFKEAISILLSPIL

SEQ ID NO: 98978 - DNA, 1233 bp, Burkholderia mallei ATCC 23344
  CDS (1)..(1233): transl_table=11
atgttcctgcaggagcgcggctccgcgtcgcggctcgcgttcacgtccggcaacgaggtgcgcctctgcgacggcggcgcggcgttctttccggcgctgatcgaacggatcgacgccgcgcgcgagcgcgtcgcgctcgaaacctacatcttctgcgacgacgccgtcggccgcgcggtgtccgacgcgctcgtccgcgcggccgcgcgcggcgttcacgtgcgcgtcatcaccgatggaatcggcaccgagcgcctgccgcttttcggcacctggccggacgcgggcgtcgagcaccggatctacaatccctatctgttcggccgcttcggtttttcgcgcacgcaccgcaagctcgcggtgatcgacgacgcctgcgcgttctgcggcggcatcaacatcgtcgacgatttcgagcagaacggcgagcgcctgccgcatccgcgttgggacttcgcggtcgaactggccgggcccgccgtcgccgacgtgcgcgccgcgttcgaggtgcagtggcaccggatcgccgccggccacaagcgctacgcgcaatatctgccgcatgacgtcgatggtcccgcgttcgccgcgcgctttcgccgctggatgcgcagccaccgctgggtgaaggcgggcgcgctgcgcgtcgtgaccgagccgagcgtggcgttcgtcgcgcgcgacaatatcgtgaaccgccgggcgatcgagaaggcgtatctcgcggcgatcggccgcgcgcgccagtcgatcctgctcgctaacccttacttcatgccggggcgcaagctgcggcgcgcgctcgccggcgcggcgcgccgcggcgtcgacgtgcggatcctgctcgggcgcaacgagttcgcgtcgctcgatatggcggtgccgttcctatatcatgcattgctgcgctcgggcgtgcgcgttgccgaatacgacaagacgatgctgcacggcaaggtcgcggtgatcgacgatcattgggcgaccgtcggctcgtcgaatctggatgcgctcagcctgatgctgaacaacgaggcgaacgtcgtgctcgtgcgccaccgcgaggagacggccgcgctgcgcgacgcgatcgcggcggcgttcgccgacggccgcgagatcgacccggcgctctacgcggcgcggcccgccgccgagcggtttctgaactggttcgcgtacaacgcgtaccggagtgcgatgaagctgctgacggtcggcggatacgactaa

SEQ ID NO: 98979 - protein, 410 aa, Burkholderia mallei ATCC 23344
MFLQERGSASRLAFTSGNEVRLCDGGAAFFPALIERIDAARERVALETYIFCDDAVGRAVSDALVRAAARGVHVRVITDGIGTERLPLFGTWPDAGVEHRIYNPYLFGRFGFSRTHRKLAVIDDACAFCGGINIVDDFEQNGERLPHPRWDFAVELAGPAVADVRAAFEVQWHRIAAGHKRYAQYLPHDVDGPAFAARFRRWMRSHRWVKAGALRVVTEPSVAFVARDNIVNRRAIEKAYLAAIGRARQSILLANPYFMPGRKLRRALAGAARRGVDVRILLGRNEFASLDMAVPFLYHALLRSGVRVAEYDKTMLHGKVAVIDDHWATVGSSNLDALSLMLNNEANVVLVRHREETAALRDAIAAAFADGREIDPALYAARPAAERFLNWFAYNAYRSAMKLLTVGGYD

SEQ ID NO: 98980 - DNA, 1383 bp, Azoarcus sp. EbN1
  CDS (1)..(1383): transl_table=11
atgcgcttctgtgtttcaatttcccacgtgaccggcagaacgcgagcctgccgcgtcggactgtctgcatctcgccgaaagggcctttcgatgccacgaaaatggatgtccaaacgcatgctctggaccgccgcgatcacggcggtgggcaccggagtcgtggcgttggtggggatgaacttctccacgccggaaaagaagctggaacaggtgctcgcgcaccgcttccccgtcgccgcgccgcagttccggcgcgagatgtcggtgctgctcgggccgccgatcatcgcgggcaatcgcgtcactgcactgcagaacggtgatgagatattcccggcgatgttgcaggccattcgtggcgctcgcacttcgatcacgttcgagacgtacatctactggtccggcgaaatcggcagggaattctccgatgcgctggccgagcgcgcgcaggccgggattccggtccatgtcacgatcgactgggcgggcagcatcaagatggacgagcgcctgctgcggaagatggagcaggccggggtgcgggtccatcgctaccggccgttgcactggtactcgctcgaccggctcaacaaccgtacgcaccgcaagttgctggttgtcgacggacgcatcggcttcaccggcggcgtcggggtcgcggaccaatggctcggacacgcgcaggatcccgaacattggcgcgattcccattaccgcatcgagggcccggccgtcgcgcagatgcaggcggcgttcaacgacaactggatcaagacgaccggcgaagtgctcagcggtccggcctatttcccggagctgtcgccggtcggagacgtggccgcgcatctcttcctcgcgtcgccgtcgggcggcagcgagagcatgcacctgatgtacatgatggcagtgagcgccgcgaaacattcgatcgacctcgccgcatcgtacttcgtgccggacgagctgatcgtcaaggcgttgatcgccgcccgggaacgcggggtgcgcgtccgcgtgctgctgcccggcccgtacatcgattcggacgcagtgcggttcgcgtcgaaagccggatgggggccgctgctgcaggccgacatcgagatccacgaataccagccgacgatgctgcacacgaagctgctggtgatcgaccgcgaggtggtgtcggtcggatccaccaatttcgacatccgttcgttccgcctcaacgatgaggcgagcctcaatctctacgaccggccgttcgccgagaaaatgatcgcggtcttcgagtccgacctcgcgcaggcgcagcgctacacctatgaaatgtggcaacagcggccgatgaaggacaagctgatcgagaaattcgtgctgccgctgaagtcgcagctgtga

SEQ ID NO: 98981 - protein, 460 aa, Azoarcus sp. EbN1
MRFCVSISHVTGRTRACRVGLSASRRKGLSMPRKWMSKRMLWTAAITAVGTGVVALVGMNFSTPEKKLEQVLAHRFPVAAPQFRREMSVLLGPPIIAGNRVTALQNGDEIFPAMLQAIRGARTSITFETYIYWSGEIGREFSDALAERAQAGIPVHVTIDWAGSIKMDERLLRKMEQAGVRVHRYRPLHWYSLDRLNNRTHRKLLVVDGRIGFTGGVGVADQWLGHAQDPEHWRDSHYRIEGPAVAQMQAAFNDNWIKTTGEVLSGPAYFPELSPVGDVAAHLFLASPSGGSESMHLMYMMAVSAAKHSIDLAASYFVPDELIVKALIAARERGVRVRVLLPGPYIDSDAVRFASKAGWGPLLQADIEIHEYQPTMLHTKLLVIDREVVSVGSTNFDIRSFRLNDEASLNLYDRPFAEKMIAVFESDLAQAQRYTYEMWQQRPMKDKLIEKFVLPLKSQL

SEQ ID NO: 98982 - DNA, 1158 bp, Azoarcus sp. EbN1
  CDS (1)..(1158): transl_table=11
gtgacggagtttctccccggcaacgcgatcacgctgctggagaatggcggagacttcttccccgcactgcaagaggcgatcgacggcgcgcggaaggaaatcttcctcgaaacctacatcttcgagaacgacgcgaccggcagcctgatcgccactgcgcttcgacgcgccgctatgcgcggcgtggcggtgcggctgctggtcgacgggttcggcgggcgccaattcgtccgcacgctgatgcccgaactgatcccggacggtgtcggggtgatgatctaccgccgcgagctgcgcatgctggcgttgcgccgacaccggctgcgtcgcatgcatcgcaagctggccgtcatcgacggggcggtcgcgttcgtcggcggcataaacatcgtcgacgacctgcagggcggcctgttcgaacgcccgcgcttcgactatgcggtgcgcgtcgaagggccactgctcggaccgatgctcgagtcgatgcaccgcctgtggcggctcgtgtcgtgggcgaggctcggtcgccggctgcacgacccgctgctcgttctggcgaagaccgcgcctgccgggacggtgcgcgccgcattcgtcacgcgcgacaacctgcggcgccggcgcgacatcgaggacgcctatctcgaggcgatcggcagcgcgcgcaccgaggtgctgatcgcctgcgcgtattttttccccggccggcgtttccgtcaggctctggtcgatgctgccgaacgcggagtgcgcgtgtcgctgctgctgcagggcgtgtccgaccacccgatgctgtgccatgcgacgcgtgcgctgtatccgttctttctcgggcgcagcatccacctgttcgaatatcaccatagccatctccacgcgaaagtcgcggtcgtcgatcggcgctgggcgacggtcggttcgagcaacatcgacccgttcagcctgctgctcgcgcgcgaagccaacgtcgtcatcgacgacgtcggtttcgcgaccgagctcaatgggagcctccagagggcgatcgcgagcggtgcgcgagaactgcgccgcgaggactggcgccggctgccgacgctgcgccgcgtcaccagctggatttcgtaccagctggtgcgactggcaatcggggtggccggctacggtggcaaacattga

SEQ ID NO: 98983 - protein, 385 aa, Azoarcus sp. EbN1
MTEFLPGNAITLLENGGDFFPALQEAIDGARKEIFLETYIFENDATGSLIATALRRAAMRGVAVRLLVDGFGGRQFVRTLMPELIPDGVGVMIYRRELRMLALRRHRLRRMHRKLAVIDGAVAFVGGINIVDDLQGGLFERPRFDYAVRVEGPLLGPMLESMHRLWRLVSWARLGRRLHDPLLVLAKTAPAGTVRAAFVTRDNLRRRRDIEDAYLEAIGSARTEVLIACAYFFPGRRFRQALVDAAERGVRVSLLLQGVSDHPMLCHATRALYPFFLGRSIHLFEYHHSHLHAKVAVVDRRWATVGSSNIDPFSLLLAREANVVIDDVGFATELNGSLQRAIASGARELRREDWRRLPTLRRVTSWISYQLVRLAIGVAGYGGKH

SEQ ID NO: 98984 - DNA, 1413 bp, Silicibacter pomeroyi DSS-3
  CDS (1)..(1413): transl_table=11
atgtgggccgctctactctcgctgatcgtgttctgcctttacggggcggcgatcgtctgcgcggtgcaggcggcacgcaccgcgcgcacgccgcaaggcgcggttggctgggtggtgttcctgctcaccctgccctgggcctcggtgccgctttacatgtttctggggcatcaccggtttcacggctatcgcatcgcgcgccgcgagagtgaacgggtggtcgccgggctgcgcgcccatgccgatgccaccgcccccgatcccgatcgggtcatggtcaacacccgccccttcgagaagatcgcccatatggcggtcagccggggcaatggcgcccggctgctggtcgatggcgaggccacctttgccgcgctgttcgccgccctggacgcggcgcgccactatgtgctgatccagttctatatcgtgcgcgacgacgatctggggctggaactgcgcgaccgtctgatcgcggcggcgcagcgcggggtcaaggtgcggttccttaccgacgccatcggcagctatggcctttcggacaattatatcgaggatctgcgcgccgcaggcatcgacatcgccaatccgcgcaagcagcgcgggcccaatacccgctttcaggtcaattaccgcaaccaccgcaagacggtggtggtagacggccagactgggttcatcggcggccacaatgtgggtgtcgaatatctgggtcaggatccggtgatgggccgttggcgcgacacccatgttcagatcaccggcccctctgtgctgcagctccagctggtctttgccgaggactggcactgggcgcggggcgaggatctgctcgatcttctcagctgggaaacccggctcgacccgcaggatgccgatgcgctgatcgtcgccaccggccccggcgaccgcaccgaaagcggcgccatgatgttctttgccgcgatcaccgctgccgagcgccgctgctggatcgcctcgccctatttcgtgcccgatctcgacattctggcggcgctgaaacatgccgcgctgcggggggtcgatgtgcgcctgctggtgcccgacgaggccgatcacaccatcccctggctggcggctttcgcctatttcgacgaggtgcgcgaggccggggtgcgcgtgatgcgctataccgacgggttcctgcatcaaaaggtgttcgtggtcgatgacaccatcgccgccgtgggcacaaccaatctggacaaccgctcgttccgcctgaatttcgaggcgatggcgctgttctttgatgcgacagtggccggtcaggtgacggcgatgctggagcatgattttgccagcagcaccgaactgacccgcagcctggcggcacagccggtattcatccgctacggcgcgccgctggcgcggctgtttgcgccgatcctgtga

SEQ ID NO: 98985 - protein, 470 aa, Silicibacter pomeroyi DSS-3
MWAALLSLIVFCLYGAAIVCAVQAARTARTPQGAVGWVVFLLTLPWASVPLYMFLGHHRFHGYRIARRESERVVAGLRAHADATAPDPDRVMVNTRPFEKIAHMAVSRGNGARLLVDGEATFAALFAALDAARHYVLIQFYIVRDDDLGLELRDRLIAAAQRGVKVRFLTDAIGSYGLSDNYIEDLRAAGIDIANPRKQRGPNTRFQVNYRNHRKTVVVDGQTGFIGGHNVGVEYLGQDPVMGRWRDTHVQITGPSVLQLQLVFAEDWHWARGEDLLDLLSWETRLDPQDADALIVATGPGDRTESGAMMFFAAITAAERRCWIASPYFVPDLDILAALKHAALRGVDVRLLVPDEADHTIPWLAAFAYFDEVREAGVRVMRYTDGFLHQKVFVVDDTIAAVGTTNLDNRSFRLNFEAMALFFDATVAGQVTAMLEHDFASSTELTRSLAAQPVFIRYGAPLARLFAPIL

SEQ ID NO: 98986 - DNA, 1467 bp, Bacillus clausii KSM-K16
  CDS (1)..(1467): transl_table=11
atgatgattgaatctgcatttgcaataccaacatatttgcttgtcgccctcatgatcgtcaatatcttgcttgccgccattttaatttttattgaacggaaagatgcacaggcgacttgggcatggctgcttattctattttttattccactaggcggctttattatttacattttcctcgggcaaacattaacacggaggaaaatgtttgaatgggaaggaataaaaaaagtaggactcgagcatttcattgaagaacaaaagcgtgaccttttagacacttcgttccgcttttatagccctactgttgataaaaatcgcgaattgatctatatgcatctaatgagcaacgacgcgctgctaacaaaagagaaccgtgtcgatattttcagcgacggcaaagaaaaatttgcgcaattgttaaaggacatcaaacaagccgagacgttcatccacatccagtattatattttccgttacgatgagatcggaaaaacgatcgtggatgcgctgacagaaaaagcgcgccaaggcgtaaaagtccgcttgctctatgatgacctcggttcccggtctttgcgcaaaaagtatttaaaagcgtttcgtgaagcaggcggagaaatcgggatttttttcccatctaggtttacgattgttaacttgcgtttgaacttccgcaaccaccgtaaactcgttaacatagatggcaaatgcggttatgtcggcggctttaacgttggagatgagtatttaggaaaaagcaaaaaatttggctactggcgcgatacccatttgcgtatcgtcgggcctgctgtccaagcgattcaaacacgctttatcttagattggaaccaggcttccaaacaataccatatttcctaccatgatcgttattttccagaagtgcagcctgctggcgatacgcctgtacaaattgtctcaagcggaccagactcggaatttgaacaaatcaaaaatggctatttaaaaatgatcatggatgcgcgaaagtcgattttaatccagacgccttactttattcccgaccaaacgttgcttgatgcccttcgtgtcgctgcacaaacaggcatagaagtaaaactgatgattccaaacaaaccggaccatatgtttgtttactgggcaaccacttcccatattggcgaaatgctaagagctggcgcaacggtctatcagtatgaaaatggctttattcataataaagtgttgatcgtcgatgaaacggtttgttctgtcggtaccgctaacattgatcaacggagctttaagctcaattttgaagtgaatgcctttatttatgacagtcaaatcgctggccagctaatagcggactttgagaatgatgtaaaacactctactcaaattacgccagaaatgtatgaaaacaggccaataagcgtccgctttaaagagtcaatttcacggctgttgtcgccgattttataa

SEQ ID NO: 98987 - protein, 488 aa, Bacillus clausii KSM-K16
MMIESAFAIPTYLLVALMIVNILLAAILIFIERKDAQATWAWLLILFFIPLGGFIIYIFLGQTLTRRKMFEWEGIKKVGLEHFIEEQKRDLLDTSFRFYSPTVDKNRELIYMHLMSNDALLTKENRVDIFSDGKEKFAQLLKDIKQAETFIHIQYYIFRYDEIGKTIVDALTEKARQGVKVRLLYDDLGSRSLRKKYLKAFREAGGEIGIFFPSRFTIVNLRLNFRNHRKLVNIDGKCGYVGGFNVGDEYLGKSKKFGYWRDTHLRIVGPAVQAIQTRFILDWNQASKQYHISYHDRYFPEVQPAGDTPVQIVSSGPDSEFEQIKNGYLKMIMDARKSILIQTPYFIPDQTLLDALRVAAQTGIEVKLMIPNKPDHMFVYWATTSHIGEMLRAGATVYQYENGFIHNKVLIVDETVCSVGTANIDQRSFKLNFEVNAFIYDSQIAGQLIADFENDVKHSTQITPEMYENRPISVRFKESISRLLSPIL

SEQ ID NO: 98988 - DNA, 1440 bp, Pseudomonas syringae pv. syringae B728a
  CDS (1)..(1440): transl_table=11
atggattatcacgacccgtactttttcggttacgtcctgggtttcattcatttactcggtacaggtgccgccatccatgcattgctgacggtgcggacttcccaaggcgcaattgcctgggcgatgccgctgctgttcattccctatttcaccttgctgccttatctggtgttcggccgaagctcattcgacgcgtacatcaaggcgcgccgccaggccaaccaggaaatgcggatcgcgatcggcgacctcaactggcgcccatggatggaagaagctgtggctgcgcgtcgatcagaggcgtatgcggcgctgcgtgcaatgcccaagctgggcaacatgccggcgctggccaacaacaaggtcaagttgctgatcaatggcgaagaaaccttcggggccatttttcaggccatccgtgaagcgaaaaagaccatcctggttcagttcttcatcattcatgacgacaaacttggccgcgaactgcaatcgctgctgctggaaaaagccgccgaaggcgtggcgatctttgtactttacgaccgcatcggcagccacgctctgccaggtgcctatatcgataagctacgcgacggtggcgtgcagataaaagccttcgccacacgcggcggctggctcaatcgctttcagatcaacttccgcaaccaccgcaagatcgtcgtcgtcgatggcctgaaaggctatataggcggtcataacgtgggtgatgaatacatgggcctgaagccgccgctggccccatggcgcgatactcacgtgcaagtcatcggcccggtggtcgcctgcttgcaggagtcgtttgccgaggactggttctgggccacccgcgaactgcccccgctcagcctgcctgatgaatttcccgaagacggtgtgctttgccagttgctgaccagtggcccggctgatgctcaggaaacctgctcgctgttcttcgttgaagccatccatgctgccgaagagcgcgtgtggatcaccagcccctacttcatccctgacgaagccgtcactgctgcgctgaccctggcagtgttgcgcggcgtggacgtgcgcctgctgctgccgtcgcgccccgaccactacgtggtgtatgccgcttcaagtctgtacgcctttgatgctgtgcgtgccggagtgcgggtattccgctacgaaccgggcttcctgcatcagaaggtcgtcctggtcgacaacgagattaccgccatcggcagcgccaacctcgacaaccgctcgttccgcctcaacttcgaattgatgctgctgaccgtcgacagcgacttttccagccaggtggaatccatgctcaccgccgacttcaacctcgcccgcgaaatctccgtacaggaaagccatgaaacgcggcgtctgcatcaactgggtatgcgcgtggcgcggctgatttcaccgattctgtga

SEQ ID NO: 98989 - protein, 479 aa, Pseudomonas syringae pv. syringae B728a
MDYHDPYFFGYVLGFIHLLGTGAAIHALLTVRTSQGAIAWAMPLLFIPYFTLLPYLVFGRSSFDAYIKARRQANQEMRIAIGDLNWRPWMEEAVAARRSEAYAALRAMPKLGNMPALANNKVKLLINGEETFGAIFQAIREAKKTILVQFFIIHDDKLGRELQSLLLEKAAEGVAIFVLYDRIGSHALPGAYIDKLRDGGVQIKAFATRGGWLNRFQINFRNHRKIVVVDGLKGYIGGHNVGDEYMGLKPPLAPWRDTHVQVIGPVVACLQESFAEDWFWATRELPPLSLPDEFPEDGVLCQLLTSGPADAQETCSLFFVEAIHAAEERVWITSPYFIPDEAVTAALTLAVLRGVDVRLLLPSRPDHYVVYAASSLYAFDAVRAGVRVFRYEPGFLHQKVVLVDNEITAIGSANLDNRSFRLNFELMLLTVDSDFSSQVESMLTADFNLAREISVQESHETRRLHQLGMRVARLISPIL

SEQ ID NO: 98990 - DNA, 1440 bp, Pseudomonas fluorescens Pf-5
  CDS (1)..(1440): transl_table=11
atggattattttggcccgcacatcttcggctatctcatcgcactgctgcattttctcgggttgatcgccgcgatccacgcggtactcaccgtcaggaccgcccagggcgccatcgcctgggccctgtcgctgctgttcatgccctacctgaccctgattccctacctggtgtttggtcgcagtaccttcgacgcctatatccaggcccggcgtcaggccaacgtggaaatgcacaaggccatcaatgagctgaactggcgtccctgggtggaagaagccctcaccgcccgcgcctccaaggcctacgcctcgctgcgggccatgcccaagctggggcgcatgccgtgcctggccaacaatcaggtgcgcctgctggtcaacggcgacgccaccttcgaagcgatcttcaacgccatccgccgctcccacaaggcggtgctgatccagttcttcatcatccacgacgatgacctgggccggcgcctgcaacgcctgctgctggaaaaggccgccgagggcgtgtcgatccacctgctctacgaccgcatcggcagccactccctgcccgccagctacgtacagaccctgcgcgacgccggggtccaggtgcacgccttcgccacccgcagtggctggctcaaccgcttccaggtgaacttccgcaatcaccgcaagatcgtggtggtggacggcatgctggggttcgtcggcgggcataacgtcggcgacgaatacctgggcaagaagccgcccctggcgccctggcgtgatacccacgtgcaggtcagcggcccggtggtggcctgcctgcaggagtcctttgccgaagactggttctgggccgcccgggaactgccgccgctgatcctcccggacacctacccggacgacggtgtgctctgccaattgctggccagcggcccggccgatgcctacgaaacctgctcgctgttctttgtcgaggccatccacgcggccaccgagcgggtgtggatcaccagcccgtacttcattcccgatgaggcggtgttcgctgccctgcgcctggcggtgctgcgggacgtggatgtgcgcatcctgctgcccgcccgcccggaccaccgcatcgtctatgccgcctccagcctgtacgccttcgaagcggtgcgcgccggggtgcgggtattccgctatcagccggggttcctgcaccagaaggtggtgctgatcgacaacgaaatcagcgccattggcagcgccaacctggacaaccgttcgttccgcctgaatttcgaagtgatgctgctgacggtggacgacgacttcgccaccgaagtggaacacatgctggaagccgacttcgccaaggcccgggaaatcgccaaggaagaaagccgccagacccaccgcctgcaacaactgggcatgcgggtcgcgcggctgatttctccgatcctttaa

SEQ ID NO: 98991 - protein, 479 aa, Pseudomonas fluorescens Pf-5
MDYFGPHIFGYLIALLHFLGLIAAIHAVLTVRTAQGAIAWALSLLFMPYLTLIPYLVFGRSTFDAYIQARRQANVEMHKAINELNWRPWVEEALTARASKAYASLRAMPKLGRMPCLANNQVRLLVNGDATFEAIFNAIRRSHKAVLIQFFIIHDDDLGRRLQRLLLEKAAEGVSIHLLYDRIGSHSLPASYVQTLRDAGVQVHAFATRSGWLNRFQVNFRNHRKIVVVDGMLGFVGGHNVGDEYLGKKPPLAPWRDTHVQVSGPVVACLQESFAEDWFWAARELPPLILPDTYPDDGVLCQLLASGPADAYETCSLFFVEAIHAATERVWITSPYFIPDEAVFAALRLAVLRDVDVRILLPARPDHRIVYAASSLYAFEAVRAGVRVFRYQPGFLHQKVVLIDNEISAIGSANLDNRSFRLNFEVMLLTVDDDFATEVEHMLEADFAKAREIAKEESRQTHRLQQLGMRVARLISPIL

SEQ ID NO: 98992 - DNA, 1440 bp, Psychrobacter arcticus 273-4
  CDS (1)..(1440): transl_table=11
atgatcgtagatatcttgttgaccatacattttatcctgctgatactgatttctttacgggtcttatctcgtcatgatttgacctcgcctgctagattggcatggattgtcatcctgtttattttgccttattttggcgtactgatttactggatgttcggtgaagtacatttgggtcatgactttgggcaaaaacgcgacgatatcattaagcaactaaatacccatagcccaagcgttcttggtcatgagacgacgttagagaagatgatcaagcccgcctatcaagcctcatttgcttacgcggcaaaagccaccggttttcataccatggagggcaatcaggcggagctcatggcagatgcgagcgagacccgcagacgcatgattgccgattttgatgctgcaacagaccatatccatgtgctgtattacatttggctcgtcgatggcatgggtattgataccgcgcaagccttcatccgagcagcaaagcgtggcgttacttgtcgggcgatggttgatggcatgggctcacgcaagatggtgcgctcaaagatatggcaagaaatgaagaatgctggcgtacaagtcagtgtcgctctcccgctgaccaactttataaaggtaatgctgtttagccggattgatcttcgtaatcaccgcaagattactgtcattgatggcaaaatcggctactcgggtagtcgcaactgcgccgatcctgaatttatggtgaaaccaaaatatgctccgtgggttgatattatgctgcgtatcgaaggacctgtggtcgcgcaaaatcaaatgttatttgccagtgattggttgattgaaaacccagacactccgcttgatagcttctattatgacagcacgccaaagcctaatggcttccctgcccaagtcttttcagatggtcccactcagcgccacggtaccacgccacagtttttgggtgctctgattagtcaagcccaagatacgctgattatctcgacaccctattttgtaccggattattcacttgtcagtattttatgcgctactgcctatcgcggggttgaagtgacgatggtttttccaaaaaataacgattcttttatcgttgccgcgaccagtcgcagttattattggcaattgcttgaagcgggggtaaaaatttatgaatataaaccaggcttgttacacgcaaagaccttgacgattgatggtgaaattagcttgattggctcgaccaatttagacttgcgtagctttgatttgaattatgagaataacatcgtatttagtgataaaaagctgacggcagatattatgcagcgccaatatcaatatattgctgactcagacgaagtaacacgtgaagaggtcaaaaactggccaccatcttctaggatttggaacaacatcgttgctacgatgggacctgttttataa

SEQ ID NO: 98993 - protein, 479 aa, Psychrobacter arcticus 273-4
MIVDILLTIHFILLILISLRVLSRHDLTSPARLAWIVILFILPYFGVLIYWMFGEVHLGHDFGQKRDDIIKQLNTHSPSVLGHETTLEKMIKPAYQASFAYAAKATGFHTMEGNQAELMADASETRRRMIADFDAATDHIHVLYYIWLVDGMGIDTAQAFIRAAKRGVTCRAMVDGMGSRKMVRSKIWQEMKNAGVQVSVALPLTNFIKVMLFSRIDLRNHRKITVIDGKIGYSGSRNCADPEFMVKPKYAPWVDIMLRIEGPVVAQNQMLFASDWLIENPDTPLDSFYYDSTPKPNGFPAQVFSDGPTQRHGTTPQFLGALISQAQDTLIISTPYFVPDYSLVSILCATAYRGVEVTMVFPKNNDSFIVAATSRSYYWQLLEAGVKIYEYKPGLLHAKTLTIDGEISLIGSTNLDLRSFDLNYENNIVFSDKKLTADIMQRQYQYIADSDEVTREEVKNWPPSSRIWNNIVATMGPVL

SEQ ID NO: 98994 - DNA, 1158 bp, Pseudomonas syringae pv. phaseolicola 1448A
  CDS (1)..(1158): transl_table=11
atgaacggtgcgattttcccgtggcgtgaaaacaaccgctttcaattgctgatcgacggtcctgcgttcttcccgcgcatgatcgccgccattgaccgggccgagcagcaggttgacctggagctgtacctggtcgaagccggggccttcgccgatgccatcgtgcgggcgctggtcgaggcgggcaggcgtggtgtgatcgtgcgctgcctgttcgacgacttcggttcaaaagccttcgacgccgggctgcgtaagcaactgaccgacgccggtgtgattctgcgtttctacaacccgatccactggcgacgcggcgtgcgcaacttctaccgcgaccatcgcaaattgctggtggtcgacaagacgctggcggtggtcggcggtacgggtgtaaccgatgaattctgggagccagacaaggatgtcagccaatggcacgaagtgatggtggaaatcaccgggccgctggttcttgactggcaagcgttgttcaaccggcagtttcacgccaatgctcgacgtttcgcctggcgcccgaaagaaaactttggtctggatcatctgcccaccgccccggtagccggtgaaggccttggccgtgtggcgtacgccgactctcgccagcaccgcgacattctgcaatcgctggtgcgcacgctgaacaccgggcaaaagcgcatctggctggcaaccccttactttctgcccacctggaaagttcgccgcgccttgcgcagggcagcctcgcgcggcgtcgatgtacgtttgctgctgaccgggccacgcaccgatcacccgtcggtacgctacgccggtcaccgttactacccgcgcttgctgcgggccggggtcaaggtcttcgaataccagccgtgttttctgcacttgaaaatggtcctgatcgacgactgggtgagcatcggttcgtgtaacttcgaccactggaatctgcgcttcaaccttgaagccaacctcgaggccctcgacccagggctgacccgcgatgtggtcgccagtttcgaaaaagacttcgccctgagcgccgaaaccacactggcagactggaaggccagaccactgtggcgacgcgtcaaacagcgcttgtgggggtggatcgaccggctggtggtgaacctgctggatcagcgtaattga

SEQ ID NO: 98995 - protein, 385 aa, Pseudomonas syringae pv. phaseolicola 1448A
MNGAIFPWRENNRFQLLIDGPAFFPRMIAAIDRAEQQVDLELYLVEAGAFADAIVRALVEAGRRGVIVRCLFDDFGSKAFDAGLRKQLTDAGVILRFYNPIHWRRGVRNFYRDHRKLLVVDKTLAVVGGTGVTDEFWEPDKDVSQWHEVMVEITGPLVLDWQALFNRQFHANARRFAWRPKENFGLDHLPTAPVAGEGLGRVAYADSRQHRDILQSLVRTLNTGQKRIWLATPYFLPTWKVRRALRRAASRGVDVRLLLTGPRTDHPSVRYAGHRYYPRLLRAGVKVFEYQPCFLHLKMVLIDDWVSIGSCNFDHWNLRFNLEANLEALDPGLTRDVVASFEKDFALSAETTLADWKARPLWRRVKQRLWGWIDRLVVNLLDQRN

SEQ ID NO: 98996 - DNA, 1440 bp, Pseudomonas syringae pv. phaseolicola 1448A
  CDS (1)..(1440): transl_table=11
atggattatcacgacccgtactttttcggttatgtcctcggcttcattcatttgctgggcacaggcgccgctattcacgcgctgctgacggtgcgtacctctcaaggtgcgattgcctgggcgatgccgctgctgttcattccgtatttcaccctgctgccttatctggtgttcggcagaagctcgttcgacgcgtacatcaaggcgcgtcgccaggccaaccaggaaatgcgcattgcgattggcagcctcaactggcggccgtggatcgaggaagctgtggcagcacgtcgctcggatgcctatgcagcgttgcgcgccatgcccaagttgggaaacatgcctgcactggccaataacaaagtcaggttattgattaatggtgaggaaaccttcggagcgatcttcaaagccatccgtgaggcgaaaaagacaatcctgattcagttcttcatcattcatgacgacaacctcggtcgccagctgcaaacactgctactggaaaaagccgccgagggcgtaggcatctttgtcctttatgaccggatcggtagccacgcattgccgggggcttacatcgacaaattgcgcgacggtggcgtgcagataaaagcctttgccacacgtggcggctggctgaatcgctttcagatcaacttccgcaaccaccgcaagatcgtcgtcgtcgatggcctgaaaggctacatgggcgggcataacgtcggtgatgaatacacggggctgaagccgccgctggcaccttggcgcgatacccatgtagaagtcatcggcccggtggtcgcctgcctgcaggagtcgttcgccgaagactggttctgggccacccgcgagctgccaccattgagcctgcctgatgagtttcccgaggatggtgtgctctgccagttgctgaccagtggcccggccgatgcgcaggaaacctgctcgctgttcttcgtcgaagccatccacgctgccgaagagcgcgtatggatcaccagcccttacttcatacctgacgaagccgtgaccgctgcgctgaccctggcggtactgcgcggggtggatgtgcgcctgctgctgccctcacggcctgatcattatgtggtctatgccgcctccagcctgtacgctttcgatgccgtgcgtgccggcgtgcgggtattccgttacgaaccaggcttcctgcaccagaaggtcgtgctggtcgacaacgacatcactgccataggcagcgcaaacctcgacaaccgctcgttccgcctcaacttcgaactgatgctactgacggtcgacagcgacttctccagccaggtggaatccatgctcactgccgacttcaacctcgcccgcgaaatatccgtgcaggaaagccacgaaacgcggcgcctgcatcaactgggtatgcgcgtggcgcggctgatttcgccgattctgtga

SEQ ID NO: 98997 - protein, 479 aa, Pseudomonas syringae pv. phaseolicola 1448A
MDYHDPYFFGYVLGFIHLLGTGAAIHALLTVRTSQGAIAWAMPLLFIPYFTLLPYLVFGRSSFDAYIKARRQANQEMRIAIGSLNWRPWIEEAVAARRSDAYAALRAMPKLGNMPALANNKVRLLINGEETFGAIFKAIREAKKTILIQFFIIHDDNLGRQLQTLLLEKAAEGVGIFVLYDRIGSHALPGAYIDKLRDGGVQIKAFATRGGWLNRFQINFRNHRKIVVVDGLKGYMGGHNVGDEYTGLKPPLAPWRDTHVEVIGPVVACLQESFAEDWFWATRELPPLSLPDEFPEDGVLCQLLTSGPADAQETCSLFFVEAIHAAEERVWITSPYFIPDEAVTAALTLAVLRGVDVRLLLPSRPDHYVVYAASSLYAFDAVRAGVRVFRYEPGFLHQKVVLVDNDITAIGSANLDNRSFRLNFELMLLTVDSDFSSQVESMLTADFNLAREISVQESHETRRLHQLGMRVARLISPIL

SEQ ID NO: 98998 - DNA, 1428 bp, Dechloromonas aromatica RCB
  CDS (1)..(1428): transl_table=11
gtggttttgctgcccagcccggatatcgaccgcatggtgaaggcctgttcgcacttgagactggcgctgacgtcagcgtttctgctgttcgttgccgccggttgtgcgatgctgcccgataccgatgccatcatcgcccgtcattccgcgcaaacggcccgtttcgagagtgcgcgcgggacgatttcgcccgagaaaagcgccgccatcgtcgccagtctgaaaagcagcgctggcgacatcgatattctcgacaagcaaatcgcgctcgagcaagccatcgtgggcagtccgctgatcgtcggcaacaaggtcatcctgcttcaggacggcgaggccacctacgccgccatgtttgccgccatccgtgccgcccgtgaccatatcaacctggagtcctacatcatcgaggacgatgaaatcgggcgccagtttgctgacttgttgctggctcaacagcagcagggcgtgcaggtcaatgtgatctatgacagcttcggcggcatgaataccccagcggcgtatttcgaccgcctgcggcaaggcggcatcaacgtcgtcgagttcaacccgatcaacccgctcatcgccaaggggcagtggctgttcaacaatcgggatcaccggaagctgctggtcgtcgatggccggatcgccttcattggcggcatcaatatcagcaatgtctattcatcgagccctggctcacggcgcgccaagaaggcgctgggtagcgcgattgactggcgcgataccgatttgcagatcgaagggccagtcgctggcgagttgcagaaattgttcatggacacctggtccaaacagcagggaaagccgctggctggccgaaattactttccggaactcaaggcgcagggcaaggatatcgtccgtgccatcggcagtacgccggacgacccctacagcctgatttacctgacgctgatctcggccatagggaacgccgaaagagagattcacctgaccaatgcctatttcgttcccgatccccggttgctcaaggccctcagcgatgcggccgggcgcggtgtcgatgtcaatctgatcttgcccagtcagaccgattcgaaaattgtctttcatgccggccgctcgcactattcagcgctgctgaaggtgggcgtcaagattcacgagaggggcggggcgctgcttcattccaagacggcgctgatcgatggcgtctggtcatgtgtcggttcgaccaatctggactggcgcagctttctcgataatgacgaggtcaatgccgtgatcctcggtcgcgatttcggcttgcagatgaaggccatgattgcccgcgaccttgcggcatcgaaggcgatcagtgcggaagactgggcgaaccgatccctgttgttgcgcctccaggagtggggcgccagcctgctgcagagactgctctaa

SEQ ID NO: 98999 - protein, 475 aa, Dechloromonas aromatica RCB
MVLLPSPDIDRMVKACSHLRLALTSAFLLFVAAGCAMLPDTDAIIARHSAQTARFESARGTISPEKSAAIVASLKSSAGDIDILDKQIALEQAIVGSPLIVGNKVILLQDGEATYAAMFAAIRAARDHINLESYIIEDDEIGRQFADLLLAQQQQGVQVNVIYDSFGGMNTPAAYFDRLRQGGINVVEFNPINPLIAKGQWLFNNRDHRKLLVVDGRIAFIGGINISNVYSSSPGSRRAKKALGSAIDWRDTDLQIEGPVAGELQKLFMDTWSKQQGKPLAGRNYFPELKAQGKDIVRAIGSTPDDPYSLIYLTLISAIGNAEREIHLTNAYFVPDPRLLKALSDAAGRGVDVNLILPSQTDSKIVFHAGRSHYSALLKVGVKIHERGGALLHSKTALIDGVWSCVGSTNLDWRSFLDNDEVNAVILGRDFGLQMKAMIARDLAASKAISAEDWANRSLLLRLQEWGASLLQRLL

SEQ ID NO: 99000 - DNA, 1470 bp, Ralstonia eutropha JMP134
  CDS (1)..(1470): transl_table=11
atgccgcttccaccgttcctgtcctcgctgcccgatcctgccctgtggtggggcccgctgttcacggtgaccgaatgggcgatccgcctgacgatgctggtctacgtgccgcagcgccgtgcgccggctgccgcgcgcacgtggctgctgctggtgttcttcctgccgtggctgggcctgatactttatgcgctgttcggacgcatctactatccgaagtcacgccgcctgaaactggcccgcatcaaccaggggatcgagcagctgcgcgcgcgcatcagccatgaactgccacagggtccattgccggatgggctgtgccagacgggttcctgcctgattgaacgggtcggctcattcgcgccgatgcgcggcaacgatgtcacgctgatcgaccgctacgacgacgtgattgccgcaatggtggccgacatcgacgccgcgaagcagtcggtgcacatcctgatgtacatctacgcggacgatgcgacgggccgaaggattaccgacgccgtgctgcgcgccgcgcgccgtggcgtacgctgcagcgtgctgatggacgcgctcggtgcgcgcgacggactgaaggcctttaccggcaagctgcgctctgccggcgtgcaggtggtaccggtgctgccgatgcgctcgctgtcggcagtgctcaagggcaagagtgcgcgcttcgacctgcgcaatcaccgcaagatcgtcgtgctcgatggcagcgtcggctatatcggctcgcagaacgtcgtcgatgccgaatcgatgccgggtctgcccaatgaggaactggtggcccgcgtgaccggcccggtggtatcgcaactgcaggctgtgttcctcgcggaccgctacctcgagaccggcgacaaggacctcggcgctgccgatttcccgccgctggcgccggacgggccgtgcattgcgcagatgctcccgagcgggcctggctacggcacgcagaatgcgcagatggtgctggtgtcgatgatccacaatgccgtgcgccgcgtggtcatcaccacgccttatttcgtgcccgacgagtcgttcctgcaagcgctgcacgtcgcgtgctatcgcggcgtggaggtgcatctggtgctgtcccagcgcatcgaccagcgcttcacgcaggccgcgcaggaagcgtatttcggtgtgctgctggaatcgggcgtgaaggtccacctgtaccggcccgcgttcctgcatgccaagcatgtgaccatcgacgacacggtggcgatggtcggctcgacgaacatggacatccgctcgttcgcgctcaatgcggaatcggcgctggtgatttacgacagggatgtggtggcgaagatggtgcgcattcagcagcgctatctggctgcgagcgacaccgtggtacgcgagaaatgggccgcgcggccgttgcgcacgcggacctggcagaacctttgccggttggcggattcgttgttgtga

SEQ ID NO: 99001 - protein, 489 aa, Ralstonia eutropha JMP134
MPLPPFLSSLPDPALWWGPLFTVTEWAIRLTMLVYVPQRRAPAAARTWLLLVFFLPWLGLILYALFGRIYYPKSRRLKLARINQGIEQLRARISHELPQGPLPDGLCQTGSCLIERVGSFAPMRGNDVTLIDRYDDVIAAMVADIDAAKQSVHILMYIYADDATGRRITDAVLRAARRGVRCSVLMDALGARDGLKAFTGKLRSAGVQVVPVLPMRSLSAVLKGKSARFDLRNHRKIVVLDGSVGYIGSQNVVDAESMPGLPNEELVARVTGPVVSQLQAVFLADRYLETGDKDLGAADFPPLAPDGPCIAQMLPSGPGYGTQNAQMVLVSMIHNAVRRVVITTPYFVPDESFLQALHVACYRGVEVHLVLSQRIDQRFTQAAQEAYFGVLLESGVKVHLYRPAFLHAKHVTIDDTVAMVGSTNMDIRSFALNAESALVIYDRDVVAKMVRIQQRYLAASDTVVREKWAARPLRTRTWQNLCRLADSLL

SEQ ID NO: 99002 - DNA, 1557 bp, Ralstonia eutropha JMP134
  CDS (1)..(1557): transl_table=11
atgccgcagaaggcgtttgtcgcgacgcagcagcggccgggcgccgcgccacgcatatcgctgtgccaaaataagaaccatcgtgatccggttccgcgtggcggacacctgggaagcctgcacatgctaagcccgagcgttgtcgcgacggtcatcctgatttttcacgtcattggcgtgctggccgcattgcacgccgtcatgaccgtgcgcacggcgcccggggccattgcctgggcgggatcgctggtgatgatgccgtacctcacactggtgccttacctgatcttcggcaggagccgtttcgccggctatgtcaatgcgcgccgcttcaatgacgacaggctgcgcgagatccgccatggcatgacccctgaagaccgcgacgcccgcagcgcctgcgtggtgcacgcaccggagccagcctgcatgcgcgcgcttccgcggctgaccggcatgccttgcctggccaacaacgatgtgcgcctgctggtcaacggcacgaccacgttcgaggccatcttcgcagccgtggccgcagccaggcaggtggtgatcgtgcagttcttcatcgtccatgacgatgtactcggccggcgcctgcaggcattgctgtgcgagcgcgcgcaggctggcgtcaaggtctattttctctacgacagcatcggttgccacgcgttgccgcgtggctatgtgaagaccttgatggcggccggcgtcgaggcgcgcgcgttctcgacgcaccgcggcttcgtcaaccgcttccagctcaacttccgcaaccatcggaagctcgtggtcgtggacgggtcgcaggccttcgtgggggggcataacgtcggcgttgaatatctcggcgagcggcccccgctagcgccgtggcgcgacacccatatcagcgtgcgcggcagcgctgtgctggatctgcagatggcgtttgccgaggattggtactgggccgcgcgcgaagtgccatacctgctgatgccgcctcctgacgtgggcgggcgcatgacctgccaggtcgtgccgacgggcccggccgacgcgcaggagacctgctcgctgttcttcgtcgaagccatccaggctgcgcggcaccgggtgtggatcacgtcgccatacttcgtgccggacgaagcagtctttgccgtgctgcgcctggcggtactgcgcggggtagatgtgcgtatcctgattcccgccaggccagaccatctcgtcgtgttcgccgcttccacgctttacgcgcatcaggccgtggccgcggggatcaagctgtatcgctaccagccgggctttctccaccagaaggtcatcctggtcgacgacgacgcggcggcagtcggtacggcgaacctcgacaaccgctcgttccggctgaacttcgagttgatggtgatgacggcggaccgcgagttcgccagccaggtcgctgacatgctggaggccgattttgcgcaggcgcggcgcatcggcgtagacgaattcctgcgggcgcctgcgccattgcgtgtggcgatgcacgtggcaaagctgtttgcgccgatcctgtaa

SEQ ID NO: 99003 - protein, 518 aa, Ralstonia eutropha JMP134
MPQKAFVATQQRPGAAPRISLCQNKNHRDPVPRGGHLGSLHMLSPSVVATVILIFHVIGVLAALHAVMTVRTAPGAIAWAGSLVMMPYLTLVPYLIFGRSRFAGYVNARRFNDDRLREIRHGMTPEDRDARSACVVHAPEPACMRALPRLTGMPCLANNDVRLLVNGTTTFEAIFAAVAAARQVVIVQFFIVHDDVLGRRLQALLCERAQAGVKVYFLYDSIGCHALPRGYVKTLMAAGVEARAFSTHRGFVNRFQLNFRNHRKLVVVDGSQAFVGGHNVGVEYLGERPPLAPWRDTHISVRGSAVLDLQMAFAEDWYWAAREVPYLLMPPPDVGGRMTCQVVPTGPADAQETCSLFFVEAIQAARHRVWITSPYFVPDEAVFAVLRLAVLRGVDVRILIPARPDHLVVFAASTLYAHQAVAAGIKLYRYQPGFLHQKVILVDDDAAAVGTANLDNRSFRLNFELMVMTADREFASQVADMLEADFAQARRIGVDEFLRAPAPLRVAMHVAKLFAPIL

SEQ ID NO: 99004 - DNA, 1443 bp, Thiobacillus denitrificans ATCC 25259
  CDS (1)..(1443): transl_table=11
atgccgcatccgagcccctcacccatcccgcgacgcagtcgcggcgggatcgcgggcctgacaagaatcctgatcgcttgttgcgcggcgccgctctgcgcctgcgccaccctgcccgaggcgccgcgtctcgcggcgggtccagtcgccagtccgccggtcaatttcgagtccgctcgcggcccggtttcggcacgccgcaacgcggcgatcttcgccgagctcaagcgcgacggcggcgacagcgcgatcctgctgcgccacctcgcgctcgaggaagcggtcaatcgcgacagcccgctcgtcgtcggcaaccggctgacgttgctgcaggacgggccggcgacctaccgcgcgatgttcgccgcgatccgcagcgctcgcgatcacgtcaacctgcagacctatattttcgaggcggggcagaccggcgagaccttcgcgcgcctgctgctcgagaaacaggctgccggcgtgcaggtcaacatcatctacgacagtgtcggctcgatcgacacgccgcccgctttcttccagcggctgcgcgacgccggcatgcgcgtgctcgaattcaatccggtcaacccggccaagctcaagaagaagaaatggcggctcaacaaccgcgatcaccggaagctgctcgtcgtcgacggcaagacggcttttctcggcgggatcaacatcagcgagacctattcgagcggctcgctgtcgcgcccgagcaagaaaaaagccaaggaccgtgaatcggagggatggcgcgacacgcatctgcaggtcgacggtcctgccgtcgccgaattccagaagctgtttctcgacacctgggcgcggcagaaaggcccgccgctgcccgcgcgcgcgtatttccccaagctcgcgcgccaaggcaacgaaatcgtgcgcgcgatcgcgagcgaagccgacgagggcgacagcccgatctatctgacgctgctctcggcgatcgaacacgccgagcgcagcatccgcctgaccaacgcgtatttcgtccccgacccgcaattgcgccgggcgctcgccgccgcgtcccggcgcggcgtcgacgtgcagatcatcctgccgagccggaccgactcgtgggccgtgttccacgccggacgctcgcactacgacgaactgctcgacgccggcgtgaagatctacgaacgccacggtaccgtgctgcacgccaagaccgcgtcggtcgacggcgtctggtcgacgatcggttcgaccaacctcgactggcgcagctttcttcacaacgacgagctcaacgcggtcgtgctcggaaccgacttcgcccgccagctcgacgcgatgttcgtgcgcgaccgggcggcatcggaaaagatcgacctcgagaaatggcgtcgtcgcgcgctgcacatccgcatgcaggaatggatcgcccggcgcttcgagtactggctgtag

SEQ ID NO: 99005 - protein, 480 aa, Thiobacillus denitrificans ATCC 25259
MPHPSPSPIPRRSRGGIAGLTRILIACCAAPLCACATLPEAPRLAAGPVASPPVNFESARGPVSARRNAAIFAELKRDGGDSAILLRHLALEEAVNRDSPLVVGNRLTLLQDGPATYRAMFAAIRSARDHVNLQTYIFEAGQTGETFARLLLEKQAAGVQVNIIYDSVGSIDTPPAFFQRLRDAGMRVLEFNPVNPAKLKKKKWRLNNRDHRKLLVVDGKTAFLGGINISETYSSGSLSRPSKKKAKDRESEGWRDTHLQVDGPAVAEFQKLFLDTWARQKGPPLPARAYFPKLARQGNEIVRAIASEADEGDSPIYLTLLSAIEHAERSIRLTNAYFVPDPQLRRALAAASRRGVDVQIILPSRTDSWAVFHAGRSHYDELLDAGVKIYERHGTVLHAKTASVDGVWSTIGSTNLDWRSFLHNDELNAVVLGTDFARQLDAMFVRDRAASEKIDLEKWRRRALHIRMQEWIARRFEYWL

SEQ ID NO: 99006 - DNA, 1326 bp, Anabaena variabilis ATCC 29413
  CDS (1)..(1326): transl_table=11
gtgggttggagtatttcgttaataacttttccctggctggctattcctttatattggattttaggcagaactaagtttcatggatattctgaagccatccgctcagtttacacccaacattatcaatttgttcgtcaaacttacattgaaattacaaaatttcaggtggcagttccggcaaaattggaaccattacaactactagctgaagcctgtattggtattccttttacatctggtaataatgccaaattattaattaatggtcagcaaacctatgcagccatgttgagtgcgatcgcatctgccaatagttatattttgctgcaatcctacattattattgatgacaaagctgggaatgagtttaaagatgctctaattgccaaggcaaagcaaggagtaagagtttatttaatttatgatgaaattggttctaataaaatctctcacctttatattaaatctctgcaaaaatatgatattcaagtgagtgcatttcatactaccaaaggcagaggaaatcgttttcaattaaattttcgcaaccatcgcaaaattttagtagttgatgggagaacggcgtttattggtggtttgaatattagtgatgaatatctgggtaaaaatccccgcttgagtccttggcgtgatacccacatgatgttacaaggccccactgtccaaagtctgcaaggatgttttttacaagattggtattgggcgactcgtcaagttatcgatgtaaactggcaagtgcaacccaattatgaaagcgattacacagcgttggtatttcctactggacccgcagataagttgaaagcttgtaaactgtttttcgtcaacaccatcaatcaagcacaaactcgtctctggattgctactccctattttgtgccggatgattccactttgacagccttgaaattggcagcactacgcggtgtagatgtgcggattattttacccaatcgaccggatcatttacttgtgtatttgtgttccttttcttattacacagagatgaaggcaatgaatattcaattatatagatataaacgtggattcatgcaccagaaggtgatactcatcgacgaagaaatggcaggtgtaggaacggttaatttagataatcgctcattttttctcaactttgaagttatgggttttgttgccaattctcaatttgttaaaagtgtcgaggaaatgttacaagctgattttgcggctgctgtgcctgtgaatttttcggattatgagagaaaatctttttggtttaagttagctgtgagaatatctagtttgttaaaacctttgttgtga

SEQ ID NO: 99007 - protein, 441 aa, Anabaena variabilis ATCC 29413
MGWSISLITFPWLAIPLYWILGRTKFHGYSEAIRSVYTQHYQFVRQTYIEITKFQVAVPAKLEPLQLLAEACIGIPFTSGNNAKLLINGQQTYAAMLSAIASANSYILLQSYIIIDDKAGNEFKDALIAKAKQGVRVYLIYDEIGSNKISHLYIKSLQKYDIQVSAFHTTKGRGNRFQLNFRNHRKILVVDGRTAFIGGLNISDEYLGKNPRLSPWRDTHMMLQGPTVQSLQGCFLQDWYWATRQVIDVNWQVQPNYESDYTALVFPTGPADKLKACKLFFVNTINQAQTRLWIATPYFVPDDSTLTALKLAALRGVDVRIILPNRPDHLLVYLCSFSYYTEMKAMNIQLYRYKRGFMHQKVILIDEEMAGVGTVNLDNRSFFLNFEVMGFVANSQFVKSVEEMLQADFAAAVPVNFSDYERKSFWFKLAVRISSLLKPLL

SEQ ID NO: 99008 - DNA, 1476 bp, Streptococcus agalactiae A909
  CDS (1)..(1476): transl_table=11
ttgattttacaattattgtttttactagcctcttactcatggctagagcagtatcgtgtttggttagcaaccgttgagcatatcttaacaattggagcggtcttatatttagttaatagtgaaatggatgctttgtcccgagtaacttggttaatattggtaatgattgcccctttactaggggcgatgttcctaatgtacaccaaatttgactggggttatcgtggtttgaaacaaagattggagacattgattgatgagagtcagatttatctagaggatgatcctgaaactttgaatcagcttaagtcaagtacatccacaacatatcatttggttcaatattttgaaaaagcacatggaaatttcccagtttatcgaaatactgatgtgacatttctaccaacgggagaagcattctttgaaaaaatgaaagaagaactactaaaagctaaaaagtatatctttttagaattctttatcattgacgaaggaataatgtggggagaaatacttagtattttagaacaaaaggtggaagaaggtgttgaagtccgtatcttatatgatggtatgatagaaattacaaaattatcctttgattatacgaaacgacttgagaaaataggaataaaagcaaaagcattttctccgatttctccttttatttcaacttattataactatcgtgaccatcgaaaaattgttgttattgatggagtagtaggcatgactggtggtgtaaacttagccgatgagtatattaatcacattgagttatttgggcattggaaagattcaggtattatgttaaaggggaaagcagtggatagtttcctcctacttttcttacagatgtggtccattactgaggaaaaaatgttagtagcgccttaccttggtgtacacgatgatttagttgaaaatgaaggctatgttattccttatggagattctcctttagacactgataaagtaggggaaaatgtttatatagatattcttaatcatgctagagaatatgtttacatcatgacaccttatttaatattagacagtgaattggaacatgccattcagtttgctgcggaacgtggtgtagatgtacgtattattatgccgggtatcccagataagccaatcccttatgctcttgctaaaacttactatcaagcattaacaaaatcaggtgttaaaatatatgaatacacccctggatttgttcattcaaaaatattccttagtgataatacaaaggctgttgtaggtacgataaatcttgattaccgtagcctgtatcaccattttgaatgtgctgtctatctttataaggtagatgcaatccaagacatttatcgagattatatggatacgttaaataaatcaaggttagttagcttgaaagatataaataatattccaaaattccaaaaagtaattggcatagtgacaaaaactattgctcccctgctttag

SEQ ID NO: 99009 - protein, 491 aa, Streptococcus agalactiae A909
MILQLLFLLASYSWLEQYRVWLATVEHILTIGAVLYLVNSEMDALSRVTWLILVMIAPLLGAMFLMYTKFDWGYRGLKQRLETLIDESQIYLEDDPETLNQLKSSTSTTYHLVQYFEKAHGNFPVYRNTDVTFLPTGEAFFEKMKEELLKAKKYIFLEFFIIDEGIMWGEILSILEQKVEEGVEVRILYDGMIEITKLSFDYTKRLEKIGIKAKAFSPISPFISTYYNYRDHRKIVVIDGVVGMTGGVNLADEYINHIELFGHWKDSGIMLKGKAVDSFLLLFLQMWSITEEKMLVAPYLGVHDDLVENEGYVIPYGDSPLDTDKVGENVYIDILNHAREYVYIMTPYLILDSELEHAIQFAAERGVDVRIIMPGIPDKPIPYALAKTYYQALTKSGVKIYEYTPGFVHSKIFLSDNTKAVVGTINLDYRSLYHHFECAVYLYKVDAIQDIYRDYMDTLNKSRLVSLKDINNIPKFQKVIGIVTKTIAPLL

SEQ ID NO: 99010 - DNA, 1440 bp, Pseudomonas fluorescens PfO-1
  CDS (1)..(1440): transl_table=11
atggattatttcggaccgcacattttcggttatctgatcgccctgatacacaccctcggctcgatcgccgcgatccatgccgtattgaccgtccgcaccgcccaaggctcgatcgcctgggcgctgtcgctgatcttcattccctacctcaccctgattccttatctggtgttcggccgcagcaccttcgatggctacatcaaggcccgccgccaggccaacgaacagatgcgccaggcgatttccgaactcaactggcggccgtgggtggaagaagccctgaccgcccgcgcctcgaatgcttacgactcattgcgagcgatgccgaagctgggacgcatgccgtgcctggccaacaatgaagtgcgattgctgatcaacggtgccgccaccttcgaggcgattttccacgcaatcgaccaggcgcgggaagcggtgctgatccagtttttcatcattcacgacgatcgtcttggtcagcgcctacgcgacctgctgctgaaaaaagcggccgaaggcgtggtgattcatttgctctacgaccgcatcggcagccacgccctgccccacagctacgtgcaagcgctgcgcgatggcggtgtcgaggtcaaggcgttcgccacccgcagcggctggctcaatcgtttccaggtgaatttccgcaaccaccgcaagatcgtggtggtcgacgggctgatcgggtttgtcggcgggcacaacgtaggcgacgaatacatgggtgaaaagccaccgctggcaccgtggcgcgacactcacgttcaggtgcgcggcccggtggtggcgtgcatgcaggagtcatttgccgaagactggttctgggccgcgcggtcattgccgccgctgatcctgccggacgcgtacccagaggacggcgtgctttgccaattgctcgccagcggcccggcggatgcttacgaaacctgctcgctgttcttcgttgaggccatccacgccgccaccgaacgcgtgtggatcaccagcccctacttcattcctgacgaagccgtgttcgcggcgttgcgcctcgcagttttgcgcggggtcgacgtgcgcctgttgctgccttcgcgtcccgaccaccgcatcgtctacgcagcctccagcctgtacgccttcgaagcggtacgcgccggcgtgcgggtattccgctatgaaccgggttttctgcatcagaaggtggtgttgatcgacagtgaaatcagcgccatcggcagcgccaatctggacaatcgttcgttccggcttaatttcgaggtgatgctgctgaccgtcgacagcgaattcgccgccagcgtggaacagatgctcaacgacgacttcgcccaggcctacgaggtcgccaaagaagaaagccgggagatccaccgcctgcaacaggtcggcatgcggatcgcccggctgatttcaccgattctatag

SEQ ID NO: 99011 - protein, 479 aa, Pseudomonas fluorescens PfO-1
MDYFGPHIFGYLIALIHTLGSIAAIHAVLTVRTAQGSIAWALSLIFIPYLTLIPYLVFGRSTFDGYIKARRQANEQMRQAISELNWRPWVEEALTARASNAYDSLRAMPKLGRMPCLANNEVRLLINGAATFEAIFHAIDQAREAVLIQFFIIHDDRLGQRLRDLLLKKAAEGVVIHLLYDRIGSHALPHSYVQALRDGGVEVKAFATRSGWLNRFQVNFRNHRKIVVVDGLIGFVGGHNVGDEYMGEKPPLAPWRDTHVQVRGPVVACMQESFAEDWFWAARSLPPLILPDAYPEDGVLCQLLASGPADAYETCSLFFVEAIHAATERVWITSPYFIPDEAVFAALRLAVLRGVDVRLLLPSRPDHRIVYAASSLYAFEAVRAGVRVFRYEPGFLHQKVVLIDSEISAIGSANLDNRSFRLNFEVMLLTVDSEFAASVEQMLNDDFAQAYEVAKEESREIHRLQQVGMRIARLISPIL

SEQ ID NO: 99012 - DNA, 1551 bp, Rhodobacter sphaeroides 2.4.1
  CDS (1)..(1551): transl_table=11
atgatcgacgactggctgggcgtcctcgcctgggttctggccgcggtggcagcggtggcaggtctctcggccttcacctggcgctcgtggcggcgcttcgcccgccaggctcgcggcgccgtcaccacggccctgccgcgcaccggccccgagacggagctcgatgcgctcttcgccccgctcgaggccgaccatcccggccgctcgggcctgctcgcgctgctcgacaatcccgacgcctacgccgcccgggcgctctcggcccggatggccgggcgctcgctcgacctgatgtattacatctggcggaccgacctcaccggctggctcctcatcgaggagctgctggcggccgccgaccgcggggtgcgggtgcggcttctcctcgacgacgtgaatgtgcagggtttcgaccgcgccttcctcgcgctgaaccagcacccgaacgtcgaggtgcggctcttcaacccgatccgcaatcgaggccatgtcctgcgccgcacgctcgagatgctgctgggcctgtcccgcttcaaccgccggatgcacaacaaggcctggattgccgacggtcggctggccatcgtgggcgggcgcaacatcggcgacacctactacgacgccgaggaaagcggccttgccatgtcgcgcgatgccgatgtgatgctggcgggccccgtggtggccgaggtcgaggggctcttcgacagctactggaacctcggtctcgcgctgccgatcctgacgctctggcccgagttcaaggtgaatgtccgcagcttccagcgccggatgatgcgccacaaccgggcgcccgaggcggtctcgttcctgcgccgcaccatggccgggcgcgacgggccgacgcttctgaccgcgcgcctgcgctggaccgacaaggtcacgctgctggccgaccctcccgacaaggcgatgggccagaggtcggggccctggatgggcgaggcgatcaccgcgctcctgcgcgcggccgagcgcgaggtgcggctcatcacgccctacttcgtgcccggcaacgacggctgcgacctgctgaccgagctcgcgcagcggggggtgcggctctcgatcatgaccaatgccctgtcggtgacagacatggtgctggtgcacggcgcctatcgccactaccggctgccgctcctgaaggccggggcggagctctacgaattcggccccccgccgcgcccctgcggacgacgcgacctgctgcacaccaaggtcttcctgatcgacgggcggcaggcggtggtggggtcgctgaacttcgacctgcgctcggccttcatgaacacggagctgggcgtgctcttcgaggaacccgatctctttgccgagctcgaggcgatgttcgaccgccagagcgcgcccgacgaggcgcaccgcctgtcgctcgagaagggccggctgcgctggtcggtgaccgaggagggacgcgccgccctcgcccggttcgagccggactcgccccccgcgctgcgggccgtctcctgggtggtggggcatctgccgatccagagctacctctga

SEQ ID NO: 99013 - protein, 516 aa, Rhodobacter sphaeroides 2.4.1
MIDDWLGVLAWVLAAVAAVAGLSAFTWRSWRRFARQARGAVTTALPRTGPETELDALFAPLEADHPGRSGLLALLDNPDAYAARALSARMAGRSLDLMYYIWRTDLTGWLLIEELLAAADRGVRVRLLLDDVNVQGFDRAFLALNQHPNVEVRLFNPIRNRGHVLRRTLEMLLGLSRFNRRMHNKAWIADGRLAIVGGRNIGDTYYDAEESGLAMSRDADVMLAGPVVAEVEGLFDSYWNLGLALPILTLWPEFKVNVRSFQRRMMRHNRAPEAVSFLRRTMAGRDGPTLLTARLRWTDKVTLLADPPDKAMGQRSGPWMGEAITALLRAAEREVRLITPYFVPGNDGCDLLTELAQRGVRLSIMTNALSVTDMVLVHGAYRHYRLPLLKAGAELYEFGPPPRPCGRRDLLHTKVFLIDGRQAVVGSLNFDLRSAFMNTELGVLFEEPDLFAELEAMFDRQSAPDEAHRLSLEKGRLRWSVTEEGRAALARFEPDSPPALRAVSWVVGHLPIQSYL

SEQ ID NO: 99014 - DNA, 1440 bp, Burkholderia sp. 383
  CDS (1)..(1440): transl_table=11
atgaccctcgactggctacatctcggcaccctgatcctgaccatccacgtgctcgggatcgtcgcggcgtgccacgcgatcatgaacacgcgcacgtcgcaaggcgcgatcgcgtgggccgtctcgctcgcggccatgccgtacctgacgctcattccgtacctgttcctcggccgcagcaagttctccggctacgtcgacgcccggcgccacgagctggaaatgttgcgcatgcacacaccgcgctcgccgtggctcagcaccgatgcgaccgacgggccggccgccgatgcaatcggccaggccgcggtgctcgcgctcacgcggctcggcggcatgccgttcctcggcggcaattcggtgcgcacgctggtgaacggcgacgcgacgttctcggcgatcctggcggccatcgacgccgcgcgcgactacgtggtggtgcagttcttcatcgtgcgcgacgatgcgctcggccggatgctgcgcgactcgctgctcgcgcgtgcggcagccggcgtgcgctgctgcctgctgtacgacagcatcggcagcttcgacctgccgcacagctacgtcgacacgttgcgccggggcggcgtggaggtccacccgttcgcgaccaaccggaagttcgtcaaccgcttccagctcaacttccgcaaccaccgcaagatcgtcgtcgtcgacggcaatcgcgcgttcgtcggcggccacaacgtcggcgtcgagtatctcggcgcgaagccgcgcctgtcgccgtggcgcgacacgcacatcgagatccgcgggccggtggtcgcgagcatccagtacgtgttcgccgaagactggcactgggcgacgcagaagctgccgccgctcgcgttgccgccgcccgcgcagcccggcgacaacatgcattgcctcgcggtgccgatggggccggccgacaagcaggagacgggctcgctgttcttcgtcgaggcgatcaacgccgcgcgcgagcgggtctggatcaccacgccgtacctcgtccccgacgaagccgtgatctccgcgttgaagctcgccgtgatgcgcggcgtcgacgtgcgcatcctgatcccgagccggcgcgatcactacgtggtgttcgaagcgtcgaagctgtacgcacgcgacctggtcgatgcgggcgtcaaggtgttccgctaccggcccggctttctgcaccagaaggtcgtgctgatcgaccgcatcgcggcggcgatcggcagcgcgaatctcgacaaccgctcgttccgcctcaatttcgagatcatggtgctgaccgtcgaccgcacgttcgccgacgaggtcgagaaaatgctcgacgcagatttcgcgcaggcgtacgaggtcgatgcgagcgaataccgccggtcgcccgcctggcggcgcatcgcgatgcacgtcgcgcggctgttcgcaccgatcctctaa

SEQ ID NO: 99015 - protein, 479 aa, Burkholderia sp. 383
MTLDWLHLGTLILTIHVLGIVAACHAIMNTRTSQGAIAWAVSLAAMPYLTLIPYLFLGRSKFSGYVDARRHELEMLRMHTPRSPWLSTDATDGPAADAIGQAAVLALTRLGGMPFLGGNSVRTLVNGDATFSAILAAIDAARDYVVVQFFIVRDDALGRMLRDSLLARAAAGVRCCLLYDSIGSFDLPHSYVDTLRRGGVEVHPFATNRKFVNRFQLNFRNHRKIVVVDGNRAFVGGHNVGVEYLGAKPRLSPWRDTHIEIRGPVVASIQYVFAEDWHWATQKLPPLALPPPAQPGDNMHCLAVPMGPADKQETGSLFFVEAINAARERVWITTPYLVPDEAVISALKLAVMRGVDVRILIPSRRDHYVVFEASKLYARDLVDAGVKVFRYRPGFLHQKVVLIDRIAAAIGSANLDNRSFRLNFEIMVLTVDRTFADEVEKMLDADFAQAYEVDASEYRRSPAWRRIAMHVARLFAPIL

SEQ ID NO: 99016 - DNA, 1434 bp, Geobacter metallireducens GS-15
  CDS (1)..(1434): transl_table=11
gtgatcgacgaactggccttagcactgggaacagcggccctcattgccctctcgctcttttcggcagggcacgccttgatcatgaagcgcgatccccgttcctccctggggtggatcgtcacctgcctcaccatccccctgctcggcccctttttttactgggggatgggggtcaaccggatcttccgccgcgcccgtacatggctcgaaagtggccgtcgcctggccgaccccgagttcttcaaatcgaccctcgaacagaacaccgccacggccctcccccccggcgccgagtacctgagcgagctccgccgtctggccgaccgggtggtgagcactcccctcgtgacgggaaatcggttcacccccctggtaaacggcgaaggtgcctatcctgccatgctcgaagccatcgccggcgcccgccggtcgatccacctctccacctacatcttcgactcggacgccgcgggtcgccgcttcatcgatgccctggccgacgccgcgaggcggggggtcgacgtgcgggtcatcatcgacggcctcggcgaaaagtattccttcccccgtgcccgaacgctcatggagaggaccggcatccgggtcgcccgcttcctgccgttgaggcaggggttttacatgaatctgcgcaaccacaggaaaatgctgattatagacggggaacgggcgttcacgggagggatgaacatcggtgaccgccacatggtggagcggccgctcccgacggtggtgaaggatctgcactttgccgtcgcagggccggtggtgggcgagcttcaacagatcttcctggaagactggtacttcgtttccggagagctcctggacaaccggcaccacttcccccccctccccgcggcggggcacgccatatcccgggccatcggcgacggccccgacaaggagttccgcaagctcttcctgatcctcatgggggcactctcctgcgccacccggcaggtgcagatcatgaccccctatttcattcccgaccgggcactggtggcagcccttgtcaccactgccctgcgtggcgtggaagtgactctcgtcctccccgagaagaacaaccttccctttgtccactgggcctcccgggcctacctctgggagctcctccagcaggggatccgggtcttctaccaacctccccccttcgtccacaccaagctcttcattgtggacggcctctggagcctcatcggctccgccaatctcgatccccgcagcctccgcctcaacttcgagctgaacctggaggtctatgaccgggaattcgccggaaccctgaccaagcatgtagccggcgtgctggcccggtcccgcgaggtaaccctcgagcaaatggacaaccgccccctgccggaaaagctgcgggacggggtggccaagctcttctccccctatctgtag

SEQ ID NO: 99017 - protein, 477 aa, Geobacter metallireducens GS-15
MIDELALALGTAALIALSLFSAGHALIMKRDPRSSLGWIVTCLTIPLLGPFFYWGMGVNRIFRRARTWLESGRRLADPEFFKSTLEQNTATALPPGAEYLSELRRLADRVVSTPLVTGNRFTPLVNGEGAYPAMLEAIAGARRSIHLSTYIFDSDAAGRRFIDALADAARRGVDVRVIIDGLGEKYSFPRARTLMERTGIRVARFLPLRQGFYMNLRNHRKMLIIDGERAFTGGMNIGDRHMVERPLPTVVKDLHFAVAGPVVGELQQIFLEDWYFVSGELLDNRHHFPPLPAAGHAISRAIGDGPDKEFRKLFLILMGALSCATRQVQIMTPYFIPDRALVAALVTTALRGVEVTLVLPEKNNLPFVHWASRAYLWELLQQGIRVFYQPPPFVHTKLFIVDGLWSLIGSANLDPRSLRLNFELNLEVYDREFAGTLTKHVAGVLARSREVTLEQMDNRPLPEKLRDGVAKLFSPYL

SEQ ID NO: 99018 - DNA, 1191 bp, Geobacter metallireducens GS-15
  CDS (1)..(1191): transl_table=11
atgtccatcgtgagacgaaaaaagataatcggtacccaccgtgccccccgtttcctccgcatcttccggagaaatgccgaggcgtcccattcccgggggaacagggtgaagctctacgattccggtgcggagttcttcccggccatgctgtcggctctggccgaggcccgtcaccacatccacgccgagttctacatcgtgcgcgacgacgccaccggatccgcctttgcggaggcgcttctggccgccgcttcccgcagggtcgacgtttccctcatctacgattacatcggctgtttcgatactccctcctcctatttccggcgcctggagcaggggggagtccggtgcctcgccttcaatcctcccccattccggcggggactcgcctggttcgacaagcgggaccaccggaagatggcggtcatcgacggagaaaccgccttcaccggcggaatcaacatcggcgacgagtactcggggttcgggaggggaaccgaccgctggcgggacgtgggggtgagaatcgacgggcccgccgtcacggacctcgtgcggctcttccgcgagttctggctggaggaaaaggggagcccttctccggcctggtttgcggagcatattcccgtggcaggcatgggagatgccgacgtgatgatcgtgagcgacggcccccaccacgcccgttccttcattcgcaacgccttccgcatcgccatggccggagcgggagaatcgatccggatcatgaacccctacttcgtgccgggtccgcgggtggtccgctctctgctgcgggccgtgcggcgtggggtaaacgttcaattgatcctccccgccaagagtgacgtccccatcgtccggctcgtggggcgcggttactacgcccccctccttcgggccggcgtcgagatctacgagcgccagggggagtttctccatgccaaggtcatgctcatcgacgacacctggggggtggtcggctcggcaaatctcgaccagcgcagcttccatcgcaactacgaagtcaacaccattgttgccagccgcgagttcggccggcagatggcggagatgttcgccgacgacctcagggggtcccgccgtatcgttctagaggagcatgagcgccggggctcgctggtgcggcttctggagcggatttgcaattcggtgagctggtttctgtga

SEQ ID NO: 99019 - protein, 396 aa, Geobacter metallireducens GS-15
MSIVRRKKIIGTHRAPRFLRIFRRNAEASHSRGNRVKLYDSGAEFFPAMLSALAEARHHIHAEFYIVRDDATGSAFAEALLAAASRRVDVSLIYDYIGCFDTPSSYFRRLEQGGVRCLAFNPPPFRRGLAWFDKRDHRKMAVIDGETAFTGGINIGDEYSGFGRGTDRWRDVGVRIDGPAVTDLVRLFREFWLEEKGSPSPAWFAEHIPVAGMGDADVMIVSDGPHHARSFIRNAFRIAMAGAGESIRIMNPYFVPGPRVVRSLLRAVRRGVNVQLILPAKSDVPIVRLVGRGYYAPLLRAGVEIYERQGEFLHAKVMLIDDTWGVVGSANLDQRSFHRNYEVNTIVASREFGRQMAEMFADDLRGSRRIVLEEHERRGSLVRLLERICNSVSWFL

SEQ ID NO: 99020 - DNA, 1455 bp, Desulfovibrio desulfuricans G20
  CDS (1)..(1455): transl_table=11
atggatttcactcttctcagcggcctgctggtggtgatcaacctgtgcgtgtcgttcaccgctgcgggccatgccctgctgaacaagcgggagcccagagcctctctcgggtgggtggcggtgtgccttacctttcctctggcggggccgttgctctatttcgtgttcggcatcaaccgtgtgcgcagcaaggcagaacggttgaatgaagaaaattcggccagaggcaccgccacaaaagggcggctgcacggcggaacccatccctttctgccgcccggctccatggacgattatcttattgcgccggtctaccgcacgctgcagcgttccggtctggctgtcaccggaatgccgctggtgggcggtaacgatgtgcgcataatgcataacggcgagcaggcctacccccgcatgatcgaagcggtggaatgtgccgaagactcactgtaccttgccacatatatttttgaaaccggaccggaaggccggcgctttatcgaagctctgagctccgctgcggcacggggcgttgatgtgcgtgtgctggtggacggcgtgggcgagctgtacgcctttccccgcgcgggaaccctgctgcagcggcggggagtgcgcgtggcgcgtttccttccgcctcgtctttttcctccccagcttagtgtcaatctgcgcaaccaccgcaaggtgctggtggccgacgggcaggtaggctttaccggcggcatgaatctgggtgacaggcatatggtggacaatccggaaaacagacgccccgtggtggacattcatttcggattttccggccctgtggtggcccagctgcaggaagcttttctggatgactgggggtttgccacgggcgaatatacgctgccccgccgcgtgacggaagagccgtgcggcgatacgctgtgccgcgtggtcaaaggcggtcccgggcaggatatcgaccgtatttcggctttgatgacgggcgtcatctccagtgcgtgccgctcggtacgcatcatgactccgtattttctgccgtccggcgatctgataagcgccatgcaggcagctgccctgcgcggggtgcgggtggatgtggtgctgcccggaaaaaataatctgccggcagtgcactgggccacacgcaacatgctgtggcagctgctgcggttcggggtgcatgtctactaccagcccggcccttttgtacattccaagatcatgctcatcgacggcagttacgcgcaggtggggtctgccaatctggacccccgcagcctgcggcttaatttcgagctgaatgtggagatatttgatacgtccgtcgtgcgtccgctggtaaggcatttcgacaacgtgcggcgcaatgcgcgcagcataaccctgagcgaactggaaaaccgttccctgccggtgcgtatgcgcgatgccgcattctggctgttcaccccgtatttgtag

SEQ ID NO: 99021 - protein, 484 aa, Desulfovibrio desulfuricans G20
MDFTLLSGLLVVINLCVSFTAAGHALLNKREPRASLGWVAVCLTFPLAGPLLYFVFGINRVRSKAERLNEENSARGTATKGRLHGGTHPFLPPGSMDDYLIAPVYRTLQRSGLAVTGMPLVGGNDVRIMHNGEQAYPRMIEAVECAEDSLYLATYIFETGPEGRRFIEALSSAAARGVDVRVLVDGVGELYAFPRAGTLLQRRGVRVARFLPPRLFPPQLSVNLRNHRKVLVADGQVGFTGGMNLGDRHMVDNPENRRPVVDIHFGFSGPVVAQLQEAFLDDWGFATGEYTLPRRVTEEPCGDTLCRVVKGGPGQDIDRISALMTGVISSACRSVRIMTPYFLPSGDLISAMQAAALRGVRVDVVLPGKNNLPAVHWATRNMLWQLLRFGVHVYYQPGPFVHSKIMLIDGSYAQVGSANLDPRSLRLNFELNVEIFDTSVVRPLVRHFDNVRRNARSITLSELENRSLPVRMRDAAFWLFTPYL

SEQ ID NO: 99022 - DNA, 1275 bp, Burkholderia thailandensis E264
  CDS (1)..(1275): transl_table=11
atgagcggcaaggcccggcaccgtctcgcgcaactgcggcagatgtttctgcaggagcgcgggtccgcgtcgcggctcgcgttcacgtccggcaacgcggtgcgcctctgtgacggcggcgcggcgttttttcccgcgctgatcgagcggatcgacgccgcgcgcgagcgcgtcgcgctcgaaacctatatcttttgcgacgacgcggtcggccgcgcggtatcggacgcgctcgtccgcgcggccgcgcgcggcgtccacgtgcgcgtcattaccgacgggatcggcaccgagcgcctgctgctcttcggcacatggccggacgcaggcgtcgagcaccggatctacaacccctatctgttcggccgcttcggcttctcgcgcacgcaccgcaagctcgcggtgatcgacgacgcctacgcgttctgcggcggcatcaacatcgtcgacgatttcgagcagaacggcgagcgcctgccgtatccgcgctgggatttcgcgctcgagctgcaagggcccgccgttgccgacgtgcgcgccgcgttcgaagtgcaatggcaccggatcgcggccggccataagcgctatgcggagtatgtgccgcacggcgcggacggcacggcgttcgccgggcgctttcgccgctggatgcgcagccaccgctgggtgaaggcgggcgcgctgcgcgtcgtgaccgagccgagcgtcgcgttcgtcgcgcgcgacaacgtcgtgaatcgccgcgcgatcgagaaggcgtatctcgcggcgatcggccgcgcgcgccagtcgatcctgctcgccaacccgtacttcatgccggggcgcaagctgcggcgcgcgctcgccggcgcggcgcggcgcggcgtcgatgtgcgcatactgctcgggcgcaacgagttcgcgtcgctcgatatggcggtgccgttcctatatcatgcattgctgcgctcgggcgtgcgcgtcgccgaatacgacaagacgatactgcacggcaaggtcgcggtgatcgacgatcactgggcgaccgtcggctcgtcgaatctggatgcgctcagcctgatgctgaacaacgaggcgaacgtcgtgctcgtgcgccatcgcgaggagacggccgcgctgcgcgacgcgatcgccgtcgcgttcgccgacggccgagagatcgaccccgcgctctatgcggcgcggcccgccgtcgagcggtttctgaactggttcgcgtacaacgcgtaccggggtgcgatgaagctgctgacggtcggcggatacgactaa

SEQ ID NO: 99023 - protein, 424 aa, Burkholderia thailandensis E264
MSGKARHRLAQLRQMFLQERGSASRLAFTSGNAVRLCDGGAAFFPALIERIDAARERVALETYIFCDDAVGRAVSDALVRAAARGVHVRVITDGIGTERLLLFGTWPDAGVEHRIYNPYLFGRFGFSRTHRKLAVIDDAYAFCGGINIVDDFEQNGERLPYPRWDFALELQGPAVADVRAAFEVQWHRIAAGHKRYAEYVPHGADGTAFAGRFRRWMRSHRWVKAGALRVVTEPSVAFVARDNVVNRRAIEKAYLAAIGRARQSILLANPYFMPGRKLRRALAGAARRGVDVRILLGRNEFASLDMAVPFLYHALLRSGVRVAEYDKTILHGKVAVIDDHWATVGSSNLDALSLMLNNEANVVLVRHREETAALRDAIAVAFADGREIDPALYAARPAVERFLNWFAYNAYRGAMKLLTVGGYD

SEQ ID NO: 99024 - DNA, 1440 bp, Burkholderia thailandensis E264
  CDS (1)..(1440): transl_table=11
atgactctcgactggctccatctcggcaccctcatcggcctcgcgcacgtgctcggcgtgatcgcggcctgccatgcgatcctgaacacacgcacgtcgcaaggcgcgatcgcctgggcggtgtcgttgacggcggtgccgtacctgacgctgattccgtacctgttcctcggccgcagcaagttctccggctacgtggacgcccgccgccacgaaaccgcggcgctgcgcacccgcacgcaccccgcgccgtgggacgccgaaggctcgacgctcggcgcgccgaaagacgcgctcggcatcgcccgcgtgcgcgcgctcacgcgcctggtcggcatgccgttcgtctcgggcaacgcggtgcgcacgctcgtcaacggcgacgcgacgttcgccgcgatcctcgccgcgatcgacgccgcgcgcagctacgtgatcgtccagttcttcatcgtccgcgacgacgcgctcggcgcgatgctgcgcgacacgctgatcgcgcgcgcgaaagcgggcgtgcgctgctatctgctgtacgacagcatcggcagcttcgatctgccgtcgagctatgtgcacacgctgcgcgaaggcggcgtcgaagtgcatccgttcgcgaccaacaagcagttcgtcaaccgcttccagctcaacttccgcaaccaccggaagatcgtcgtcgtcgacggcgagcgcgcgttcgtcggcgggcacaacgtcggcgtcgaatatctcggcggcaatccgcgcttgtcgccgtggcgcgacacgcacatcgaagtgcgcggccccgccgtcgcgaacatccagtacgtgttcgccgaggactggcactgggcgacccagtcgctgccgccgcaggcgccgccgcccgcgcccgtggccgacgccgacatgcactgcctcgtcgtgccgatgggccccgccgacaagcaggaaacgggctcgctcttcttcgtggaggcgatcaacgccgcgcgcgagcgcgtgtggatcacgacgccctacctcgtgcccgacgaagcggtgatttccgcgctgaagctcgcggtgatgcgcggcgtcgacgtgcgggtgctgattccgagccggcgcgatcactatgtcgtgttcgaggcatcgaagctctatgcgcgcgatctcgtcgacgcgggcgtgcggatcttccgctaccgccccggcttcctgcaccagaaggtcatgctgatcgaccgggctgccgccgccgtcggcagcgcgaacctcgacaaccggtcgttccggctgaatttcgagatcatggtgctgaccgtcgacgatggcttcgcgaccgaagtcgaggcgatgctcgcgcgcgacttcgaagacgcgttcgaagtcgatctgagcgaataccggcgctcgcccgcgtggcggcgcgtcgcgatgcacgtcgcgaggctgttcgcaccgattctctga

SEQ ID NO: 99025 - protein, 479 aa, Burkholderia thailandensis E264
MTLDWLHLGTLIGLAHVLGVIAACHAILNTRTSQGAIAWAVSLTAVPYLTLIPYLFLGRSKFSGYVDARRHETAALRTRTHPAPWDAEGSTLGAPKDALGIARVRALTRLVGMPFVSGNAVRTLVNGDATFAAILAAIDAARSYVIVQFFIVRDDALGAMLRDTLIARAKAGVRCYLLYDSIGSFDLPSSYVHTLREGGVEVHPFATNKQFVNRFQLNFRNHRKIVVVDGERAFVGGHNVGVEYLGGNPRLSPWRDTHIEVRGPAVANIQYVFAEDWHWATQSLPPQAPPPAPVADADMHCLVVPMGPADKQETGSLFFVEAINAARERVWITTPYLVPDEAVISALKLAVMRGVDVRVLIPSRRDHYVVFEASKLYARDLVDAGVRIFRYRPGFLHQKVMLIDRAAAAVGSANLDNRSFRLNFEIMVLTVDDGFATEVEAMLARDFEDAFEVDLSEYRRSPAWRRVAMHVARLFAPIL

SEQ ID NO: 99026 - DNA, 1428 bp, Francisella tularensis subsp. holarctica
  CDS (1)..(1428): transl_table=11
atggaaaaattcttatcaagtctaatatatatattagaagccaatacaatcttatttatttgtcaaatttttactatttttattgtattaaaactaattgtagataaaagatcagcatcaaatatcctcgcatggattttggcgatattgtttatcccttactttgctattccatttttctttatctttcaacgtaaagataaacgtaaactttggcaaaaaggtgcaatgagtatagagccagaacctatagcaaatactagtctaagcgaaagtgaacataagggattacctataaatgtaataaaaacttttataaatcttgaacttcctacacttacacaaaaaaatacttttgaaatatatacaaatggtactgattctttcaaagcttttatccaagctatagaatcagcaaagcaaagtatatacattcaaacatatataatcaaaaatgatataacttcaaaactcgtaattagtgctttagaaaaaaaagctgctgaaggtatagaaattaaaatgatgatagactctctaggctctttttatgtctatcggcataacaaaagaatttttaaaaacttacgtaaactaggtgcgaaagtagtattttttatgccagtaatttctaatcctatgcgtaactatatcaattataggaatcatcgtaaaatttttatttttgataacaaaatagcttttagtggcggtatgaatattggtgacgagtatatgtcacctacagctcatgacggtatgtggggtgatttactctttaaaattcaggggcaatctttagtttatttcctaaaaattttctgttcagattggcattttgcaacatctgaggagttaaacccgaaaattgagaacaccatacaagaagaatgttttacacaagtagttccctcaggtccagatatgcaaaaaaaccagctctattcgggtttgattacagcgattaattctgcgcaaaaaagactatggattatcacaccctatttaattccatcgcttgatttacttcaagctatactccttgctaaatgtagaggtattgatgtcaaagtgattactcctaaaaattcagatcataaaataattaatcgtgctagatctagttatattagagatttacttgaatataatatagatgtttattttacaaaaaatatgttgcatgcaaaagctgtacttgtagattctaatatcgcgatacttggctcagtaaatctagataatcgtagtttatttttaaattatgaagttgctacttttatatatactcgcaaacaagtagataaattatatcaatgggcagaaaacataattaaagactctgatagagatgcatcacatttgccaaccaaacgcagcagtttaattgttgaaagcattatgaaaatacttacacctctaatgtaa

SEQ ID NO: 99027 - protein, 475 aa, Francisella tularensis subsp. holarctica
MEKFLSSLIYILEANTILFICQIFTIFIVLKLIVDKRSASNILAWILAILFIPYFAIPFFFIFQRKDKRKLWQKGAMSIEPEPIANTSLSESEHKGLPINVIKTFINLELPTLTQKNTFEIYTNGTDSFKAFIQAIESAKQSIYIQTYIIKNDITSKLVISALEKKAAEGIEIKMMIDSLGSFYVYRHNKRIFKNLRKLGAKVVFFMPVISNPMRNYINYRNHRKIFIFDNKIAFSGGMNIGDEYMSPTAHDGMWGDLLFKIQGQSLVYFLKIFCSDWHFATSEELNPKIENTIQEECFTQVVPSGPDMQKNQLYSGLITAINSAQKRLWIITPYLIPSLDLLQAILLAKCRGIDVKVITPKNSDHKIINRARSSYIRDLLEYNIDVYFTKNMLHAKAVLVDSNIAILGSVNLDNRSLFLNYEVATFIYTRKQVDKLYQWAENIIKDSDRDASHLPTKRSSLIVESIMKILTPLM

SEQ ID NO: 99028 - DNA, 1437 bp, Desulfitobacterium hafniense Y51
  CDS (1)..(1437): transl_table=11
gtgattaaattgataaaacttatgatcggttcagccctgttagccctttcactggcgctgcttataatttgcttagaaaagaagaatccggaaaagaccgccgcctggctgtcttttctggccctcaatcctctgctggggatgatgatctacctggttttcggctgcaccccgcttaaaaaaagcttattccgatccaaacatatgcccggggagcaattgcccgctttagcgcatcagcaaaagcaggccttctctgaaaatgagatctatatccaggagtccatagacgctaaaggtctgtcaaggcttttattaggaaaggcttttgcgcctttatcccggaataattcccttacccttctccacaacggagacgcaaaatttgcggctctgcttgaggatttagaaaaagctcaggatcatattcatatggaatattatatttttcatgacgatgccattggcaggagggttcagcagatcctgatccgcaaagccggtgagggtataaagatacgtttgatgtttgacgggctgggcagccgcagcctcgctaagaattttctcagggagctgagagctgccggaatagagctgcagtggtttttgcccctgcgttttccccgggccttcttgaccctgaactatcgcaatcatcgcaaactggtggttattgacggcaggattggctatctgggcggcatcaatattggggatgaatacttgtcccgaagcgctaagtacggattttggcgggacacccatctgcgcctggaagggaccagtgtgcacaccattcaggagacttttttcaatgattggtattatctcacaggggaaatccatagggaccctcgttattttcccaaggagcgggaggatggggaaatgctggtccaaattattggcgggggaccggattcccactatgaatccatcaaggaactcttcttcacgatgttaagcacagcgcaaaaggagatcgtggtgacgaccccttactttataccggatgaaagtatgatcatggccctgaaaaccgcggcctccagaggggtagccgtcaaaatcatccttcagggaaaacctgatcataagcttccttatctggcctcatcctcctatttccgcgatttgatcccgtcgggtgtggagatctatcgctaccaaaaggggatcctgcacagcaaggtattaacagttgatcaagagataggtgtggtgggctccgccaattttgacatacggagttttcaaatagacttcgaactaagtgcggtgatcttcggctctgattttgcagagaagctggttcgcgaccaagagcaggatcttcaggacagcctgcagataacccagcaggatctgcaaagcagaactccgctgttgtctttgcaaatcgctttagcccgtcttctttcacctttgctctag

SEQ ID NO: 99029 - protein, 478 aa, Desulfitobacterium hafniense Y51
MIKLIKLMIGSALLALSLALLIICLEKKNPEKTAAWLSFLALNPLLGMMIYLVFGCTPLKKSLFRSKHMPGEQLPALAHQQKQAFSENEIYIQESIDAKGLSRLLLGKAFAPLSRNNSLTLLHNGDAKFAALLEDLEKAQDHIHMEYYIFHDDAIGRRVQQILIRKAGEGIKIRLMFDGLGSRSLAKNFLRELRAAGIELQWFLPLRFPRAFLTLNYRNHRKLVVIDGRIGYLGGINIGDEYLSRSAKYGFWRDTHLRLEGTSVHTIQETFFNDWYYLTGEIHRDPRYFPKEREDGEMLVQIIGGGPDSHYESIKELFFTMLSTAQKEIVVTTPYFIPDESMIMALKTAASRGVAVKIILQGKPDHKLPYLASSSYFRDLIPSGVEIYRYQKGILHSKVLTVDQEIGVVGSANFDIRSFQIDFELSAVIFGSDFAEKLVRDQEQDLQDSLQITQQDLQSRTPLLSLQIALARLLSPLL

SEQ ID NO: 99030 - DNA, 1431 bp, Methylobacillus flagellatus KT
  CDS (1)..(1431): transl_table=11
gtgtccgaccccaacgtgctgacatgggcagccaccctcgtgtcgctggcggtcgctatccccacagcggggcacgcggtcatctacaagcgtgacccgcgctcggccacgctgtgggtgctgctgatcgctctgttgccgctgggcggttcgctgttgtacttgctgttcggtattaaccgctaccagcggcgcgcgcggcggctcttcccgggggcagatcctgctgttcagcaggacctcgcgcctacgatgccccaggccgtatcggcgccgtttgccggcctggcgcacctggtgggacgtgccaccggccagtcgctgaccagcggcaaccgcatcgagccgctcgtcgatggcgagcaggcctacccggccatgctcgctgccatcgagtcggcgcggcacagcgtcgcgctggcttcgtacatcttcgacagccaaggcatcggggcgcagttcgtcgatgcgctgcgccgggctcatgagcgcggcgtgcaagtgcgggtgctgatcgacgacgtctatgcccgctggaggccccgcagcgcttaccgcgccttgcaacgcgccggcgttccggcggcgacgttcaacccgacgttgattcccgcgcgcctgcatgccgcgcatctgcgcaatcaccgcaagctgctggtgatcgatggcgagacgggtttcaccggcggcatgaacatcttcagcccgtattggcggcccgatgcgccggagcaggcctgtcacgatttgcactttcgtctgcgcgggccggtggttgcgcatctgatgcggtgcttcaccgatgattggtgcgataccacgggcgagcggctcagcaagggtttctggggcgaaccgcccgcaacggctgatgagcaaggaacctcttgggcgcgcggcatcgaggccggtcccgatgaggccctggacaggatgcgctggaccttcatgggcgctttgagcgcggcgaagcattcggtgcgcatctggacaccttacttcgtgcccgatcagccgatgatcgcggcgctgagcacggccgcgttgcgcggcgtgcgcgtcgaggtgctgacgcccgcaaacggcgaccatcccacggtgcaatgggccgcgcgcgcccactactggcaggtgctggagcacggtgtacgcatcttcgaacggcctggcccgttcgaccacagcaagctgatgctgatagacggccagtggtgctgcctgggttctgccaattgggatgcgcgcagcctgcgcctcaacttcgagttcaatgtggaggtgtacgacaccgcgctgtctacgcggctggaatccctttttgatgccgctcgtgatgcgtcgggcgagatatcggcgaaggcgttgcgcgcccgcccgctggccatccgcttgcgcgacggggtggcccgtctgttcacccccattctctag

SEQ ID NO: 99031 - protein, 476 aa, Methylobacillus flagellatus KT
MSDPNVLTWAATLVSLAVAIPTAGHAVIYKRDPRSATLWVLLIALLPLGGSLLYLLFGINRYQRRARRLFPGADPAVQQDLAPTMPQAVSAPFAGLAHLVGRATGQSLTSGNRIEPLVDGEQAYPAMLAAIESARHSVALASYIFDSQGIGAQFVDALRRAHERGVQVRVLIDDVYARWRPRSAYRALQRAGVPAATFNPTLIPARLHAAHLRNHRKLLVIDGETGFTGGMNIFSPYWRPDAPEQACHDLHFRLRGPVVAHLMRCFTDDWCDTTGERLSKGFWGEPPATADEQGTSWARGIEAGPDEALDRMRWTFMGALSAAKHSVRIWTPYFVPDQPMIAALSTAALRGVRVEVLTPANGDHPTVQWAARAHYWQVLEHGVRIFERPGPFDHSKLMLIDGQWCCLGSANWDARSLRLNFEFNVEVYDTALSTRLESLFDAARDASGEISAKALRARPLAIRLRDGVARLFTPIL

SEQ ID NO: 99032 - DNA, 1263 bp, Burkholderia xenovorans LB400
  CDS (1)..(1263): transl_table=11
atgctggcaattcccattaccgccttcgccacgctcgtcatcatattggtgattgccaatttatcgagcggtgagaagaagatcgaacataagatcgaacgcctctatgcgagcgacgatccgcaattccttcgctcaatgggtttgttgctcgggccgccggtcatctcgggcaatcgcttcgagatgctgctcaatggcgaccgtatttttccttccatgctggagggcatccgcagcgcgcgtcaaaccatcacgtttgaaaccttcatttactggtccggcgaaattggcgaacagattgcacaggcgctcgcggataaagcgcgcgaaggtgtcgcggtgcatgtactgctcgactgggtcggttcgtcgaaaatggacaagcgctatctgagtctgcttcgcgacgcgggcgtggaggtgattcagtatcacaagcctcactggaccggccttggccgcatgaacgaccgcacgcaccgcaaactgctggtgatagacgggcgtattggcttcacgggtggtgtgggtattgcgccggagtggaccggtcacgcggaaaatgaaaagcattggcgcgacacgcatttccgtgtggcgggtccggtggtcggccatatgcaggccgtgttcatggacaactgggtcaaggctaccggcaatgtgctgcacggtcccgcctatttccccgatatcgagccaatgggcgacgggctcgcgcatatgttcagcagttcgccttcgggcggcagcgacgatatgcaattgatgtatctgatggcgattacggcggccacgcactccattcatctggcgagcgcctatttcgttcccgacaagctcactatcaacgccattgtcgaagcggcgaagcgcggcgtgaaagtgcggatcatcacgcccggaaaacgcatcgatacacacaccgtgcgcgaagcatcgcgcgcgtgctggggcgatctgctgaaagcgggcgtggaaatgttcgaatatcagccgaccatgtttcactgcaaattgctggtggtggacgaatacctggtgtcggtcggctccaccaatttcgacagccgttcattcaagctcaacgacgaagcgaatctgaacatttatgaccgcgacttcgcgaagcagcagaccgccattttcgccgacgatttaacgaagtcgcagcaggtgacgctcgaagcatggacacatcgcccgttcactgaaaagctgatcgaaaagttcgtgccgctgctggatacgcagttataa

SEQ ID NO: 99033 - protein, 420 aa, Burkholderia xenovorans LB400
MLAIPITAFATLVIILVIANLSSGEKKIEHKIERLYASDDPQFLRSMGLLLGPPVISGNRFEMLLNGDRIFPSMLEGIRSARQTITFETFIYWSGEIGEQIAQALADKAREGVAVHVLLDWVGSSKMDKRYLSLLRDAGVEVIQYHKPHWTGLGRMNDRTHRKLLVIDGRIGFTGGVGIAPEWTGHAENEKHWRDTHFRVAGPVVGHMQAVFMDNWVKATGNVLHGPAYFPDIEPMGDGLAHMFSSSPSGGSDDMQLMYLMAITAATHSIHLASAYFVPDKLTINAIVEAAKRGVKVRIITPGKRIDTHTVREASRACWGDLLKAGVEMFEYQPTMFHCKLLVVDEYLVSVGSTNFDSRSFKLNDEANLNIYDRDFAKQQTAIFADDLTKSQQVTLEAWTHRPFTEKLIEKFVPLLDTQL

SEQ ID NO: 99034 - DNA, 1452 bp, Burkholderia xenovorans LB400
  CDS (1)..(1452): transl_table=11
atgcaattcgacctgcttcacatcggcacgctggtcgccctctgccacattctcggcgtggtcgcggcgtgccatgcgattctcaacacccgcacgtcgcaaggcgcgattgcgtgggccgtgtcgctggtcgcaatgccttatctgacgctggtgccgtatctgttcctcggccgcagcaagtttgccggctacgcggacgcgcgccgggtcgagaacgaactgctgcgcacgcgcgcgcatccgccggaatgggacacgcaggcttcgtcggaaaggctgcccacgcaggagctcggcggcaggctcgtgcattcgctcacgcgtctcggcggcatgccgtttctgcccggcaactcggtgcgcacgctggtcaacggcgcggcaaccttcgaggccatcttccaggcgatcgagggcgcgcgccgctacgtcatcgtgcagttcttcatcgtgcgcgacgacgcgctcggcgagatgctcaaagacgcgctgatcgcgaaagcgcagcaaggggtgcgcgtctacttcctgtacgacagcatcggcagcttcgatctgccccaccgctatgtggcggcactgcgcgcggcgggcgtggaaacgcacccgttcgccacccatcgccgcttcgtcaaccgtctgcaggtgaatttccgcaatcaccgcaagatcgtttcggtggacggcgaacgcgcgtttgtcggcggacacaacgtgggcgtggaatatctcggcggcaaaccgccactttcgccgtggcgcgatacgcatatcgaagtgcgcggcccggcggtcgccagcatccagttcgtgttcaccgaagactggcactgggccacgcagcagttgcccgaattcgacatgccgcccgctgcggccgccgaccccgcggccggccagggcatgcactgcctcgtagtgccgagcggcccggccgacaagcaggagacctgttcgctctttttcgtcgaagcgatcaatgcggcgcgcgagcggatctggatcacctcgccctacctgattcccgatgaagcggtgttctcggcgttacggctcgcggcgctgcgcggcgtggacgtgcgcattctgattccgagccggcgcgatcacctcgtcgtattcgctgcttccaaactgtatgcatatgactcgctgcgcgccgggatccggatcttccgctaccagccgggcttcctgcatcagaaggtcgtgctgatcgacagcgtggccgcggccatcggcagcgccaatctcgacaaccgctcgttccggctgaacttcgagatcatggtgctgaccgtggatcgcggctttgccaaagaggtcgaaatgatgctgctggccgacttcgccgaatcgcgcgaaatcgaccgcaatgagtaccggcaggcaggcgccctgaagcgcgtgctgatgcacgtggcgcggctcttttcgccaatcctgtag

SEQ ID NO: 99035 - protein, 483 aa, Burkholderia xenovorans LB400
MQFDLLHIGTLVALCHILGVVAACHAILNTRTSQGAIAWAVSLVAMPYLTLVPYLFLGRSKFAGYADARRVENELLRTRAHPPEWDTQASSERLPTQELGGRLVHSLTRLGGMPFLPGNSVRTLVNGAATFEAIFQAIEGARRYVIVQFFIVRDDALGEMLKDALIAKAQQGVRVYFLYDSIGSFDLPHRYVAALRAAGVETHPFATHRRFVNRLQVNFRNHRKIVSVDGERAFVGGHNVGVEYLGGKPPLSPWRDTHIEVRGPAVASIQFVFTEDWHWATQQLPEFDMPPAAAADPAAGQGMHCLVVPSGPADKQETCSLFFVEAINAARERIWITSPYLIPDEAVFSALRLAALRGVDVRILIPSRRDHLVVFAASKLYAYDSLRAGIRIFRYQPGFLHQKVVLIDSVAAAIGSANLDNRSFRLNFEIMVLTVDRGFAKEVEMMLLADFAESREIDRNEYRQAGALKRVLMHVARLFSPIL

SEQ ID NO: 99036 - DNA, 1518 bp, Ralstonia metallidurans CH34
  CDS (1)..(1518): transl_table=11
atggattcgggtgcgaggcttggggatgttggaagtgatgtgctgtgccagaatagcgtccatcccgtccggccccggctgcctatgttgacccctagtgtgattgcagcgatcgtcgtgtctcttcacgtgctgggcgtgattgcggcgctgcacgccgtcatgaccgtacgcactgcgcccggggccatagcctgggctggatcgctggtcatgatgccgtacttctcgctgatcccctatctgatctttggacgaagccgcttcgcgggatacgtcaatgcgcggcgcttcaacaatcaccgtctgcgcgagatccgccagaacatgagtacccaggagctggattcgctcagcgcctgcctggtgatgaaccccgaccaggaatgcatgcgcgcattgccgcgtctgactggcatgccatgcctgggtaataacgacgtgcggctgctggtcaacggcgaggcgaccttccaggcgatcttcgccgcgatcgatgccgccacgcaggtcgtggtggtccagttcttcatcgttcatgatgatgagcttggactcgaactgcaacgccgcctgtgcgcgcgtgccaaggcgggggtcagggtctatttcctatacgacagcatcggctgtcacgcgctaggccgggcctacctgcgtgcgctggaggaagccggcgtccacgtgcgctcattcgccacgcatcccggctttgtcaatcgcttccagctcaacttccgcaatcaccgcaagctggtcatcgtcgatggcgagcgcgcctttgtcgggggtcataacgtcggcaacgagtacctcggtcgccggccaccactcgcgccctggcgggatacccatatcgagattcgcggcgcggtggtgctcgagctgcagatgacgttcgccgaggactggtactgggccgcgcacgaggtgccctacctgttgctgccaccgccgaggcgtttcggcgacatggtgtgccagatcgtgccatccgggccggcggacgcgcaggagacatgctcgctgttcttcgtcgaggcgatccaggccgcgcgcaagcggatctggattacgtcgccatacttcgtgcccgacgaagccgtttccgcgatgctacggctggcagtgctgcgtggtgtggacgtgcgcatcctgataccggcccggccggaccattacgtggtctatggggcgtcgacgatctatgcccaccaggccgtctgcgccggcgtgaaggtgttccgctaccagccgggcttcctgcaccagaaggtcatcctggtcgacgacgacgcggcggctgtcggcaccgcgaatctggacaatcgctcgttccggctcaacttcgagatgatggtcatgacggctcacccggcattcgcggccagcgtggccgagatgctggaagccgatttcgcgcaggcccgtcagatcgaccgcgaggacttccttggcgcgcccgcgatcctgcgcgtggcgatgcacgtggccaagctcttcgctcccatcctttag

SEQ ID NO: 99037 - protein, 505 aa, Ralstonia metallidurans CH34
MDSGARLGDVGSDVLCQNSVHPVRPRLPMLTPSVIAAIVVSLHVLGVIAALHAVMTVRTAPGAIAWAGSLVMMPYFSLIPYLIFGRSRFAGYVNARRFNNHRLREIRQNMSTQELDSLSACLVMNPDQECMRALPRLTGMPCLGNNDVRLLVNGEATFQAIFAAIDAATQVVVVQFFIVHDDELGLELQRRLCARAKAGVRVYFLYDSIGCHALGRAYLRALEEAGVHVRSFATHPGFVNRFQLNFRNHRKLVIVDGERAFVGGHNVGNEYLGRRPPLAPWRDTHIEIRGAVVLELQMTFAEDWYWAAHEVPYLLLPPPRRFGDMVCQIVPSGPADAQETCSLFFVEAIQAARKRIWITSPYFVPDEAVSAMLRLAVLRGVDVRILIPARPDHYVVYGASTIYAHQAVCAGVKVFRYQPGFLHQKVILVDDDAAAVGTANLDNRSFRLNFEMMVMTAHPAFAASVAEMLEADFAQARQIDREDFLGAPAILRVAMHVAKLFAPIL

SEQ ID NO: 99038 - DNA, 1311 bp, Acidobacteria bacterium Ellin345
  CDS (1)..(1311): transl_table=11
atgctcttgtacttgctcgcaggaacgacggtctcaacgggattcatggtcatcgcgtggctcgcgattgcggccgcgcttctggtgcttttctctggcctgtttggccccggcttgcgttacaagatctccgccgccaagccagcagacaaccgttctgacgaattcctgcacaccctcgaggcccttaccgattccaaggtccatcgcggcacgagtttcaccgtgcataccaacggcaacgacttctacgaagaagaactgcgcgccatggctgcagcacagcacagcatcaaccttgaggcctacatcttccagaagagtgaaatcgcgcagcggtacgtcgacacaatgaccgagcgcgcccgcgccggtgtacaagtcaacatcgtcctcgacgccatcggcagcgccgcaactcacgagaaattcttcaccgatctccgccaagccggaggcaaaatcgcctggtacaacgacagcacctggtacaagctgccccagttcaaccatcgcacccaccgtgaggtgttggttgtcgatggccgcgtcggcttcatcggaggcgcgggcgtcgctgaccattggtacaaggcgcgcccgaacaagccacgctggcgcgacaccatggtgcgcgtagacggtgaagctgttcccaacctgcaagccacgtttgccgagaactggttggaaagctgcggcgaagtactcaccggcgaagactatttccctcaaccgcacgcagaacagggaagtggcgaagccatggtcatcaacagcactcccaccgcaggcggttccacgcgcgcccgcttgctcttccaaatgcttttggcatcggcgcaacacacaatccacatcaccacgccgtatttcctgcccgatcgcagcatgatggacgaactcgtccgcgccgtgaaagagcgcggcgtcgaagtcgtgctcctcgttccaggcaagaagagcgatcacatgctcacgcgcagctccagtcgccgcgcctatggacgattgctggaagccgctgcgcgtatctacgaataccaaccagccatgatccacgccaagatcctgctcatcgacggcctctggggcgtcgtcggttccaccaacttcgacaatcgttccttcggtctcaacgacgaggtaaacctcgccgtgcgcgccgaagacttcgtcgaacgcctcgagcatgacttcgagcgcgaccttgccaacagcgaactcattacgttggagaagtggaagcatcgccctgtcctcgaacgcgcgcccgaactcctcggctgggtgctcgaccgccagcagtga

SEQ ID NO: 99039 - protein, 436 aa, Acidobacteria bacterium Ellin345
MLLYLLAGTTVSTGFMVIAWLAIAAALLVLFSGLFGPGLRYKISAAKPADNRSDEFLHTLEALTDSKVHRGTSFTVHTNGNDFYEEELRAMAAAQHSINLEAYIFQKSEIAQRYVDTMTERARAGVQVNIVLDAIGSAATHEKFFTDLRQAGGKIAWYNDSTWYKLPQFNHRTHREVLVVDGRVGFIGGAGVADHWYKARPNKPRWRDTMVRVDGEAVPNLQATFAENWLESCGEVLTGEDYFPQPHAEQGSGEAMVINSTPTAGGSTRARLLFQMLLASAQHTIHITTPYFLPDRSMMDELVRAVKERGVEVVLLVPGKKSDHMLTRSSSRRAYGRLLEAAARIYEYQPAMIHAKILLIDGLWGVVGSTNFDNRSFGLNDEVNLAVRAEDFVERLEHDFERDLANSELITLEKWKHRPVLERAPELLGWVLDRQQ

SEQ ID NO: 99040 - DNA, 1248 bp, Myxococcus xanthus DK 1622
  CDS (1)..(1248): transl_table=11
gtgaagctcgcctggctcgtgcccgtggtgttgattgccgccgggtgtcccgctcccaatcaccggcatgacctgcgcctgcgcgcgttgccggggaccagtccggaggcgcgctcgctcgcgttcttccagtcattgggcgtggcgctggtgccagggcaccgcgtggagttggtggagaacggcttcatcttcgacgccatcgaggaggagattctcgccgcgcgcaccagcatccacatcatcagctacatctggcgccccggtgagccgtcggaccggctggtgcgggcgctggcggcgcggcggcccggggtggcgtgccgcgtgctcgtggacccattgggcagcgtcaacttcgaggcggtgattcccgcgctggcggccagcggctgtgacgcgcgctacttccggcccatccaaggtgacttcgtggccttggacgcggttcgcctgagggcgcggaaccaccggaagatggtggtgagggatggcgaggtgggcatcaccggcggctggggcatctggaagagctggatggggaatgcgcagagcgcggagtcctggcgcgacatgaacatccgcgtggagggcccggccgtgcgagagatgcaggtcgccttcgcgcagaactggcaggaggcgggtggagacttcctgccggcgacggacttcccggagcctcgctacgcgggggatgcgcgcgccggcttcgtggccagcacggacaaccgcttcctgtcggacgcgcggcggatgacgctgctcaccatcgcggcggcgcaggagcggctctggattgcgaactcctacttcattccctccgacgccatcagtgacatgctgctggagaaggtgaagcaaggcgtggacgtgcgggtgctggtgcccgggcggcaccatgacgtcgggcccgtgaacgcggcgcagcgggcgtcctatgcgcgcttgctggagggcggcgtgcgcatctgggagtacgagctgtcgatgatgcattccaagacgatgctcgtggatgactccctgtccgtcgtgggctccaccaacatggacccgctggcgttgacgacgttggaggagtgctcggtggtggtggaggacgtggcgctggcggcgcagctcgccgcatcctttgagaaggatttacgccactcgcgggagattcactggagcgggtggaagcggcgcgggctcttgcagaagctgggcgagcggctgccgtggttcatcggcagttttctctga

SEQ ID NO: 99041 - protein, 415 aa, Myxococcus xanthus DK 1622
MKLAWLVPVVLIAAGCPAPNHRHDLRLRALPGTSPEARSLAFFQSLGVALVPGHRVELVENGFIFDAIEEEILAARTSIHIISYIWRPGEPSDRLVRALAARRPGVACRVLVDPLGSVNFEAVIPALAASGCDARYFRPIQGDFVALDAVRLRARNHRKMVVRDGEVGITGGWGIWKSWMGNAQSAESWRDMNIRVEGPAVREMQVAFAQNWQEAGGDFLPATDFPEPRYAGDARAGFVASTDNRFLSDARRMTLLTIAAAQERLWIANSYFIPSDAISDMLLEKVKQGVDVRVLVPGRHHDVGPVNAAQRASYARLLEGGVRIWEYELSMMHSKTMLVDDSLSVVGSTNMDPLALTTLEECSVVVEDVALAAQLAASFEKDLRHSREIHWSGWKRRGLLQKLGERLPWFIGSFL

SEQ ID NO: 99042 - DNA, 1461 bp, Myxococcus xanthus DK 1622
  CDS (1)..(1461): transl_table=11
atgcacctgttcgacatccccgcgtggttggaggtggcctggccccatgtggtggcggcgctgaccgtgctcatcagcgtggtggccagcgcccatgcggtgctgcacaagcgggacgtgcgggccgcggtgggctgggtgggactggcgtggctggtgccggtgctgggcggggtgctgtacgtcctgctgggcatcaaccgcatccggcgccgggcgcgttcattgatgctgaaacaagagcacggccgctttccgccgctgttccaggtggcccccatgaaggcggagacggtgagtggcccccaccccgaggccgcccccctggcacccctggtgcggctgggggacgcggtggtgggacggccgctgctgccgggcaaccgcttcaccgtgctggagtcccgccgggacgcctaccccgcaatgctggaggcgattgacgcggcgcgcacgacgctgtcgctgtgcagctacatcttcgacaatgacatggcgggccggcgcttcgtggaggcgctgagtgcagcggtgaagcggggcgtggaggtgcgggtgctggtggacgcggtgggctcgcgctacacgtggccgcccatcctgggccggctgcggcgagccggcgtccgcgccgcgcgcttcctgccgtcgctgatgccctaccggctgcccttcgccaacctgcgcaaccaccgcaagctgatggtggtggacgggcgcgtgggcttcacgggaggcatgaacatccgcaaggccttctggcccggcgaacatgccgccgtggacctgcacttccgcgtcgaaggaccgctggtgggacagctccaggagaccttcgcggaggactgggccttcaccacgcgcgagcggctgacaggcgaggcctggttcccgccgctcaccgaagtgggcaccgtgctcgcgcgaggcatcgcggacggcccggacgaggacttcgagacgctgcgcacggtgctgctgggggccctggccacggcgcgaacgtcggtgcgcatcgtcacgccctacttcctcccggacacggcgctcatcaccgcgctgagcgtggcggcgctgcgcggcgtccaggtggacatcctccttcccgagaagggcaatcttccgctggtgcagtgggccgcctgggcgcagttgtggcaggtgctgcggccgggctgccgcatcttcctcaccgccccgcccttcgaccacacgaagctgatggtggtggacggcgtgtggtcgctcatcggctcggccaactgggacccgcgctcgctgcggctcaacttcgagttcaacgtggagtgctacgacaccgcgctggccatgcagttggagggcgtggtggccgcgcggctgcgcaacgcgcggcccctcacgttggagcaggtggacgcgcgcgccctgcccatccgcctgcgggatgggctggcgcggctgctgtcgccgtacctctag

SEQ ID NO: 99043 - protein, 486 aa, Myxococcus xanthus DK 1622
MHLFDIPAWLEVAWPHVVAALTVLISVVASAHAVLHKRDVRAAVGWVGLAWLVPVLGGVLYVLLGINRIRRRARSLMLKQEHGRFPPLFQVAPMKAETVSGPHPEAAPLAPLVRLGDAVVGRPLLPGNRFTVLESRRDAYPAMLEAIDAARTTLSLCSYIFDNDMAGRRFVEALSAAVKRGVEVRVLVDAVGSRYTWPPILGRLRRAGVRAARFLPSLMPYRLPFANLRNHRKLMVVDGRVGFTGGMNIRKAFWPGEHAAVDLHFRVEGPLVGQLQETFAEDWAFTTRERLTGEAWFPPLTEVGTVLARGIADGPDEDFETLRTVLLGALATARTSVRIVTPYFLPDTALITALSVAALRGVQVDILLPEKGNLPLVQWAAWAQLWQVLRPGCRIFLTAPPFDHTKLMVVDGVWSLIGSANWDPRSLRLNFEFNVECYDTALAMQLEGVVAARLRNARPLTLEQVDARALPIRLRDGLARLLSPYL

SEQ ID NO: 99044 - DNA, 1362 bp, Myxococcus xanthus DK 1622
  CDS (1)..(1362): transl_table=11
ttgtcccgttggcttccggacaccggctggcactggaagacgggctgcgatgcggctcgggttgccgggtcgcgcgggcatccgcaccgttgggaggccatgcgtgaccaggaggcgttgaccgagcagtcgggggaagtggacacgggcgcgccgcggcgtgcgcccacgcccccagcgcccgtgccggagcatgggccggtgtggagccccggcgtctccggggggctcctgacgcgctactacctgccgcgccgccacggggtggtgcagggcaacgcatgccagttgctgcgcgacggcgtggaggcctacccggcgatgctggaggccatccgcggggcgcgccgttatgtccgtatggagacgtacatgttcgtctccgacgccgtcggcgaactgtttggccaggcgctggcggaggcggccgagcgcggcgtgcacgtgaaggtgttgtacgacgcggtgggctcctggacgagccgccggagcttcttcgcagggctgcgcgcgcggggcgtggacatccgcgccttcaagcccttcagcctgtcacgcgggctgcggcacctgctgcggagggaccaccgcaaaatcctggtggtggacggcgaggtggccttcaccggtggggtgaacatctccgcccactgggcgcccgcggagatgggcgcggcgtggcgggacgatgtgctgcgcatcgaagggccggccgtccacgaactggagcggtgtttctccgccacgtggcggatgatgttccagggccgcttccaccggctgacccggcggctggagcgcctgcgcaaccctccgcctcggcgcggcgcggtggggctggtggtgttgtccagtcggcgaagcatccaccgggcctacctgcacgccatccgccgggcccggcgcagcgtgctggtggccgccgcctatttcattccggaccggcgcatggtgatggcgctgcgcgaggcggcccggcgcggggtggaggtccatctgctgctcaacgctcgcagcgaccaccccatcctggagttcatggcccgggccttctacgagcggctgctgggcgcgggcgtccgcatcttcgagtggcagcgcggcgtgctgcacgccaagacggccgtggtggacggggtgtggggcaccatcggctcattcaacctggagcgcctcagcctggccttcaatcacgaggtgaacgcggtcttcgccgaccctcgcttggggcagcaactggaggactccttccgcggcgactgcggggactgccgcgaggtgacgctggcggagttccgccgccggcccctgtggcagaagctgctggagcgggcactgtctctgcttcgcaaaatcatttga

SEQ ID NO: 99045 - protein, 453 aa, Myxococcus xanthus DK 1622
MSRWLPDTGWHWKTGCDAARVAGSRGHPHRWEAMRDQEALTEQSGEVDTGAPRRAPTPPAPVPEHGPVWSPGVSGGLLTRYYLPRRHGVVQGNACQLLRDGVEAYPAMLEAIRGARRYVRMETYMFVSDAVGELFGQALAEAAERGVHVKVLYDAVGSWTSRRSFFAGLRARGVDIRAFKPFSLSRGLRHLLRRDHRKILVVDGEVAFTGGVNISAHWAPAEMGAAWRDDVLRIEGPAVHELERCFSATWRMMFQGRFHRLTRRLERLRNPPPRRGAVGLVVLSSRRSIHRAYLHAIRRARRSVLVAAAYFIPDRRMVMALREAARRGVEVHLLLNARSDHPILEFMARAFYERLLGAGVRIFEWQRGVLHAKTAVVDGVWGTIGSFNLERLSLAFNHEVNAVFADPRLGQQLEDSFRGDCGDCREVTLAEFRRRPLWQKLLERALSLLRKII

SEQ ID NO: 99046 - DNA, 1437 bp, Mesorhizobium sp. BNC1
  CDS (1)..(1437): transl_table=11
atggcgtttactgggaacgaaacctgggcgattgcctacctcgcgatggaatggacaatccgcattgtgatggttgttgtcgtgcccttgcggcgtacgcccgacgctgcacgcagctggctcctactggtattcttcctgcccattcccgcacttgcggtctatcttgctatcggcagaccgacctacccacgctggcgccgggaacgcttcgccagattgccggaggtcctcgccgcggcgtcgaaagagattgcccattcccacttctgccgccagccagaattgccgggcccgctggcggggccagcactgctgatcgaaacgctcgggcgattccctgcgctgtccggcaacgatgtcgaacttctttccagttacgacggcgttatcgaccgtatggtcgccgacattgatcatgcagaacgaactgtccatctcctgttctacatattcgcggacgacgatacgggccggcgcgtaatagaagccctggaacgggcggcccggcgaggtgtcgcatgcagggtgctgattgatgccatcggttcgcggcaatggcggcgacaggtggcgaggctgctcgcccaggcgggtgtggatgttcgattcgctctgaaggtagggatctttcggcggagatcggcgcgtgccgacctacgcaatcaccggaagatcgccgttgtcgacagtcgcgtcggctatgtcggctctcaaaacataacgaatgccctgtccgcctccgatatagcaaatgaagagttggtcgcacgggttgtcggcccaatcacgacagagctccaagccgtctttgtcggcgactggttcatggaaacggaggaggagctggcagtatccgccctgttcccgcaccatcatcccgaggccggggtcgttgcacaggtcctaccaagtggtcccgattatcccgacgccggcatcgggtatctagtagcggctctggttcacggcgcaagcaagcgtgtcgtgatcacgacaccttatttcgtcccggacgagccgctccttcaggcactcaaaaccgcagtactgcgcggggtggaagtgcgtttgctggtcccgcgtctcacggaccacatcctggtgaagttggcgcagcaatcctactactccgagctactccaagccggtgttcaagtgcacctctatgagggggggttcctgcacgccaagcatgtcacgtttgatgacgagatctcgctgctgggttccagcaatgtcgacatccgctcttttgtcctgaacgccgaagtaagtctcatcgcttttgataagggtgtcacggtgcagttgcgaagcgagcagatgcgctgcctcgacaagagcgagatgctcacctccgaaggttgggaagagcgcccgatgatccacaagattggcgagaatctggcgcggctagcgagtcctctcctgtga

SEQ ID NO: 99047 - protein, 478 aa, Mesorhizobium sp. BNC1
MAFTGNETWAIAYLAMEWTIRIVMVVVVPLRRTPDAARSWLLLVFFLPIPALAVYLAIGRPTYPRWRRERFARLPEVLAAASKEIAHSHFCRQPELPGPLAGPALLIETLGRFPALSGNDVELLSSYDGVIDRMVADIDHAERTVHLLFYIFADDDTGRRVIEALERAARRGVACRVLIDAIGSRQWRRQVARLLAQAGVDVRFALKVGIFRRRSARADLRNHRKIAVVDSRVGYVGSQNITNALSASDIANEELVARVVGPITTELQAVFVGDWFMETEEELAVSALFPHHHPEAGVVAQVLPSGPDYPDAGIGYLVAALVHGASKRVVITTPYFVPDEPLLQALKTAVLRGVEVRLLVPRLTDHILVKLAQQSYYSELLQAGVQVHLYEGGFLHAKHVTFDDEISLLGSSNVDIRSFVLNAEVSLIAFDKGVTVQLRSEQMRCLDKSEMLTSEGWEERPMIHKIGENLARLASPLL

SEQ ID NO: 99048 - DNA, 1536 bp, Clostridium perfringens ATCC 13124
  CDS (1)..(1536): transl_table=11
atggaaaaatttctgaaaaaactactaagtagagcatttatagttggatttcttatattcatacagtttgttatacttatgggggcaatatggaaagtaagcgaagatttcatatatgtatattttctgtttatctttattagtatagtagtatttatttatattgttagtagaaaagataatccatcctataaattagcatgggcggttcctgtattattagttcctgtctttggaggattattttatttaatatttggtggaaataagacaagcaaaaagtttagaaaacaaataaaagcttcttatgatgaaacagcacatttattatataatgatagaaaagttttagatgagttagaagaacaagataaaagtatagctaatcaatcaaggtacatagctgattactctcagtttccagtatataaaaatactacaactgagtatttatctcctggagaggtattttttgaaaggttaaaggaagagttaaaaaaggcaaagcactacatatttatggaatatttcatagtacatgaaggagttatgtggaactctattttagaaatattagaggaaaaggttaaagaaggtgtagaggttagattcgtttatgatgatatgggatgcttaggaactttaccatataagtataatgaagttttagaggctaagggaattaaatgtatggtatttaatccttttgtgccccttttatccttaagaatgaataaccgtgatcatagaaaaataactgttatagatgggcatactgggtttactgggggaataaacttagctgatgaatacataaatgaaattgttagatttggacattggaaggatgcctccataatgataaagggggatgctgtttggaatttaacagttatgtttcttcaaatatggaatttctatagtgaaagaaaagagcagtatgaaaaatattacccatattttcatcatgaagatgaatttgaaagtgatggatatgttcagccctatggagatagtcctttagatgatgaaatagtaggggaaaatgtatatttaaatattataaataaggcaaaggactatgtttatataaatactccataccttattattgataatgaacttgttacagcgcttactcttgctgctaaaagtggaatagatgttagaatagttactcctcatattgaggacaaatggtatgctcatatagttacaagggcctattatcctcaacttatagaatctggtgttaagatatatgaatatactccaggatttattcactcaaagacctttgtatctgatgatgaaataggaatagtaggtactataaatatggattatagaagtttatatcttcactttgaatgtggagtttggctatataaaactaaatctgtaggacagataaaagatgatttcttaaaaactttagaaaaatgtcaaagaataactttagaagattgtgctaaggttaaagttcctactagaattttaaggtctataataagagtatttgctccacttatgtaa

SEQ ID NO: 99049 - protein, 511 aa, Clostridium perfringens ATCC 13124
MEKFLKKLLSRAFIVGFLIFIQFVILMGAIWKVSEDFIYVYFLFIFISIVVFIYIVSRKDNPSYKLAWAVPVLLVPVFGGLFYLIFGGNKTSKKFRKQIKASYDETAHLLYNDRKVLDELEEQDKSIANQSRYIADYSQFPVYKNTTTEYLSPGEVFFERLKEELKKAKHYIFMEYFIVHEGVMWNSILEILEEKVKEGVEVRFVYDDMGCLGTLPYKYNEVLEAKGIKCMVFNPFVPLLSLRMNNRDHRKITVIDGHTGFTGGINLADEYINEIVRFGHWKDASIMIKGDAVWNLTVMFLQIWNFYSERKEQYEKYYPYFHHEDEFESDGYVQPYGDSPLDDEIVGENVYLNIINKAKDYVYINTPYLIIDNELVTALTLAAKSGIDVRIVTPHIEDKWYAHIVTRAYYPQLIESGVKIYEYTPGFIHSKTFVSDDEIGIVGTINMDYRSLYLHFECGVWLYKTKSVGQIKDDFLKTLEKCQRITLEDCAKVKVPTRILRSIIRVFAPLM

SEQ ID NO: 99050 - DNA, 1452 bp, Clostridium perfringens ATCC 13124
  CDS (1)..(1452): transl_table=11
atgatttttacttttttctctaacttagttcatattataaatttattaactattttttatatgatttttaaagaaaatcgttcttctaaaagtataatttcttggacattagttttatttatattaccatacataggtcttattctatttttaatgttaggaagaaaggttaataataaagatatttttattatgaaaaaatctgaacttaccttatttgataaacatataaaaaaattaaataacaattcaaatgataagtttaaaatatctaatcattctgatatgattaaagctattgaaagtatggaatactcaccttatagagataatgttgaaactaaagtattttttgatggcaaagaattatttaatgatattttagaaagcttaaagaaagctcaaaaaagtataaatatagaattttacatatttaaaaatgatgatattggttcaaaaattttagatattcttaaagaaaaggctaaagctggcgttgaagtaagattattatatgactctgtaggaagtagaactaccaatagaaaaaaacttcaatctgtaatagatgctggtgtaaaagttggtgaattcttcccttccctacttagattaataaacataaacatgaactttagaaatcatcgtaaaataatcgttatagataatgaaataggctatgttggcggctttaacgttggagatgaatatttaggtaaagaccctaagtttggttactggagagatactcatataaaattcatgggtgactcagtaagagacttagatttaaggttttgggctgattggaaatacgctacaaaagaagatattgatttaatccacttaatggattataaaaatgaacaagccccttctaaaatggctaattattcaaaatgtggtatgcaaataatatctagtggacctaaccctgataatttttatgaaattaaattatcatatttagaaatgattcaaaaagcaaaaaaatatatttatatacaatcaccatacttaattttagatgatagtctaactgacagtttaaaacttgcatctatttctggagttgatgtaagaataatgataccgggtaaaggtgatcacccctttgtttattgggcaaatctaaaatatgctggagatttactaaactttggagtaaaaatatatcattatgacaagaatgctttccttcactctaaaaccttagttatagatgatgaagtatgttcaataggaactgccaatatggatacaagaagctttgaactaaactttgaagtaattgctatgctatactcagatgaaatagcaaaaatacaacgtaaacagtttgaaaaggacatgcttatttcaaaagaattgactagggaagagtatcttaagagaggaacttcagtgaaaattaaagaatcattttcaaaactcttctcagctttactttaa

SEQ ID NO: 99051 - protein, 483 aa, Clostridium perfringens ATCC 13124
MIFTFFSNLVHIINLLTIFYMIFKENRSSKSIISWTLVLFILPYIGLILFLMLGRKVNNKDIFIMKKSELTLFDKHIKKLNNNSNDKFKISNHSDMIKAIESMEYSPYRDNVETKVFFDGKELFNDILESLKKAQKSINIEFYIFKNDDIGSKILDILKEKAKAGVEVRLLYDSVGSRTTNRKKLQSVIDAGVKVGEFFPSLLRLININMNFRNHRKIIVIDNEIGYVGGFNVGDEYLGKDPKFGYWRDTHIKFMGDSVRDLDLRFWADWKYATKEDIDLIHLMDYKNEQAPSKMANYSKCGMQIISSGPNPDNFYEIKLSYLEMIQKAKKYIYIQSPYLILDDSLTDSLKLASISGVDVRIMIPGKGDHPFVYWANLKYAGDLLNFGVKIYHYDKNAFLHSKTLVIDDEVCSIGTANMDTRSFELNFEVIAMLYSDEIAKIQRKQFEKDMLISKELTREEYLKRGTSVKIKESFSKLFSALL

SEQ ID NO: 99052 - DNA, 1434 bp, Alkalilimnicola ehrlichei MLHE-1
  CDS (1)..(1434): transl_table=11
atggaaccgcttaccctactgctggctctgctgagtatcgcccaggccgtggtcggtccgatcgccgccggccacgccctgctcaacaaacgcgagccctccgtggccatggcgtggatcgccgtctgcctggccttcccggtagccggcccgctgatctactttttcttcggcatcaaccgggtacgcacccgtgcccgcaagctgctctcgccgggcgccgaggtgccggacgttccggcggcacacgcctccccctgcccggccggcggtgcggccagttgttccgaactggtccgcagcgccgatgccatcaccggacggatgctctaccagggcaaccacctggaagccctgcagaacggcgagcaggcctatccgcgcatgctgcaggccattgaccaggcccgccaccggctctatctcagcacctacatctttaacaacagccccaccggccggcgcttcgtccgggccctggcccacgcccaccggcgcggggtcgatgtgcgggtgctggtggacggcttcggcgagtggtacaccttcccccacctcccccggatcagccgcctgctctaccgtcagggtattccccacgcccgcttcctcgcgccccgactcctgcccccggagatctacgtcaatctgcgcaaccaccgcaaactgctggtggccgacggcgagacggccttcaccggcggcatgaacatcagcgagcaccacctcaccggcgttggggccggccgccgcccggtgcaggatctgcatttccgggtcaccggcccggtggtggccaacctggagcaggtctttctggaggactgggccttcgccaccggcagtgaacagagcgtgccccccgtcccgcttcagccccagggccaggcggcctgccgcgccattgtcgacggccccaatgaagatctggaccggctgttgatgattatggtggcggccatcagcgccgcgcgggagtccgtatggatcatgaccccctatttcctgcccccccgccccctcaccaccgccctgcaggcggcggcgcttcggggcgtagaggtgaatatcctgctcccccggcgcagcaacctgccttacgtggactgggccagtcgccacatgctctgggagctgcttcactggggggtgaaggtctggtatcagccggcaccgtttaaccataccaaactgttaatcatcgatgagcattacacccacatcggctccgccaatctggacccgcgcagcctgcggctgaactttgagctcaccctggagacgcacgatcgcagctttgccgggcagatggtggcacactgccgggagacccagcacaggagcgagcccgccgacgccgcgcaactacatgagcgcactctgccggtgaaggcccgggatgccctgttctggctgctgagcccttatctgtga

SEQ ID NO: 99053 - protein, 477 aa, Alkalilimnicola ehrlichei MLHE-1
MEPLTLLLALLSIAQAVVGPIAAGHALLNKREPSVAMAWIAVCLAFPVAGPLIYFFFGINRVRTRARKLLSPGAEVPDVPAAHASPCPAGGAASCSELVRSADAITGRMLYQGNHLEALQNGEQAYPRMLQAIDQARHRLYLSTYIFNNSPTGRRFVRALAHAHRRGVDVRVLVDGFGEWYTFPHLPRISRLLYRQGIPHARFLAPRLLPPEIYVNLRNHRKLLVADGETAFTGGMNISEHHLTGVGAGRRPVQDLHFRVTGPVVANLEQVFLEDWAFATGSEQSVPPVPLQPQGQAACRAIVDGPNEDLDRLLMIMVAAISAARESVWIMTPYFLPPRPLTTALQAAALRGVEVNILLPRRSNLPYVDWASRHMLWELLHWGVKVWYQPAPFNHTKLLIIDEHYTHIGSANLDPRSLRLNFELTLETHDRSFAGQMVAHCRETQHRSEPADAAQLHERTLPVKARDALFWLLSPYL

SEQ ID NO: 99054 - DNA, 1464 bp, Rhizobium leguminosarum bv. viciae 3841
  CDS (1)..(1464): transl_table=11
atgttctatctcctgtcgacctactggccgcatatcctctttgtcgtctcggtcgccatgggggccgcggcggcgatccatgccgccatgaccaaggaggaggtgcgtgccgcgatcggctgggtcggcgtcatcatcctgtctccgatcatcggcgcggtgctctatgcgattgccggcatcaaccgcatccgccgcaaatcgttgagcgtgcgccgcgacgcgctgctgcttgcggccgaattcgacgagttggagaccttcgacgccgaggcagagacggtgatcagccagttcggccgccgctttgcggcgctgcagacgctcggcgaccgggtgacgcgcaatccgctgacctcaggcaatacgatcgacatgctggaaaccggcgacgaggcctatgcggcgatgaaatcaagcatcgacgaggcggcgcgcagcatcctgctcgaaacctatatcttcgaccgcgatgctgtcggccttcgcatcgccgacgcgctgattgcggcggccaggcgcggtgtggaagtccgggtgctgatcgacgcggtcggagcgcgttattcggtgccgagcattctcggccatctgagggaaggtggcgtcaccgttgccgtcttcaacggcaacgtcatcatggggctgcggctgccctatgccaatctgcgcacccaccgcaagatcctcatcgtcgacgggaaaattgcgctcacgggcggaatgaacatcagggcgggcttcagcgaggaggcgacgggcgagagctttgctcacgacacgcatttcaccgtcaccggccctgtcgtcgccgacctcttcgatctcgccgccgaagactggcgcttctccacgcaggaattgttgaacgacgagccctggcgcatcgaaccgccgcagcgcagccccggcgatcccatcctgatgcgcgtcgtcgcctccggcccggaccgcagcgtcgagaccaaccacaagatgctgatgggcgccttttccgtggcgcgccaatcgatccgcatcatgtcgccctatttcctgccggaccgtgaactcatcagtgccctggtaacggcggcgcggcgcggcgtcgaggtcgatatcgtcgtgcctgctgtcaacaacctcgtgctggtcgaccgggcgatgacggcgcaattcgatcagattctcaagaactactgccgcatctggcgctccaccggcagctttagccattcgaagctgctgacgatcgacggcacctgggcctatgtcggctcttccaatctcgacccgcgctcactgcggctgaatttcgaggtcgatctcgaagtgctgaacgagggtttcgccgccgagatcgacgagcatatcgaggaaaccctgaaaacggcaacgcctgtgacgcttgaagggctgcaggcgcgacccttcgcggtgcggctgctcgagaaggtgctatggctggggtcgccttatctctga

SEQ ID NO: 99055 - protein, 487 aa, Rhizobium leguminosarum bv. viciae 3841
MFYLLSTYWPHILFVVSVAMGAAAAIHAAMTKEEVRAAIGWVGVIILSPIIGAVLYAIAGINRIRRKSLSVRRDALLLAAEFDELETFDAEAETVISQFGRRFAALQTLGDRVTRNPLTSGNTIDMLETGDEAYAAMKSSIDEAARSILLETYIFDRDAVGLRIADALIAAARRGVEVRVLIDAVGARYSVPSILGHLREGGVTVAVFNGNVIMGLRLPYANLRTHRKILIVDGKIALTGGMNIRAGFSEEATGESFAHDTHFTVTGPVVADLFDLAAEDWRFSTQELLNDEPWRIEPPQRSPGDPILMRVVASGPDRSVETNHKMLMGAFSVARQSIRIMSPYFLPDRELISALVTAARRGVEVDIVVPAVNNLVLVDRAMTAQFDQILKNYCRIWRSTGSFSHSKLLTIDGTWAYVGSSNLDPRSLRLNFEVDLEVLNEGFAAEIDEHIEETLKTATPVTLEGLQARPFAVRLLEKVLWLGSPYL

SEQ ID NO: 99056 - DNA, 1158 bp, Azoarcus sp. BH72
  CDS (1)..(1158): transl_table=11
ttgacggtgctggtcgaaggcaacgcgatcgcgctgctggagaacggtctgcagtacttcccggcgctggaagcggagatcgacagcgcccggcacgagatcttcctcgaaacctacatcttcagccgtgacgtggtcgggcgccgcattgccgcggcgttggtgcgtgcagccgcgcgcggcgtgcgcgtgcgggtgctggtcgatggcttcggcgggcgcgagttcgttcgcgacctgatgccggggctgctcgccgacggcgtcgaggtgctgatcttccgccgcgaactgcggctcacctcgctgcggcgccatcggctgcggcgcatgcaccgcaagatcgcgttgatcgacgcgcgcgttgccttcgtcggcggcatcaacatcaccgacgacttcgaactatccggcccaccgcatccccgctacgactacgccgtacgggtggagggaccgctgctcgcggagatcgccgaggcggtgcaccgcctgtggcggctggtgtcgtgggccagcctgcagcgccggctgcaggaggcgatgcgcctgccgcggcgcggtccgcccgcgggcgggctgcgcgcggcgtttctggtgcgcgacaacctgcgtcaccggcgcgacatcgaggacgcctaccttgccgcgatcgggcgcgcgcgcgaggagatcgtgatcgccaacgcgtacttcttccccgggcggcagttccgccaggccctgctggaggccgccgcgcgcggggtgcgggtcacgctggtgctgcaggggctggccgaccacccggtgctcgctcacgccacgcgtgcgctctacccgcacttcctgcagcgcggcatccgccttttcgagtaccaccgcagctatctgcacgccaaggtggccgtggtggaccggcgctgggccacggtggggtcgagcaacatcgacccgttcagcctgtggctggcgcgcgaggccaacgtggtggtggaagatgccggcttcgccggatcgctgcaccgcagtctggagtccgcagtgcaggagggcgcgcgcgaactgcatcgcgaagactggcggcgccagcggaccttgcggcgggttgcgagctggctggcctaccaggccgtacgcctcgcgatcggcatcgcgggctacggcgggcggcactga

SEQ ID NO: 99057 - protein, 385 aa, Azoarcus sp. BH72
MTVLVEGNAIALLENGLQYFPALEAEIDSARHEIFLETYIFSRDVVGRRIAAALVRAAARGVRVRVLVDGFGGREFVRDLMPGLLADGVEVLIFRRELRLTSLRRHRLRRMHRKIALIDARVAFVGGINITDDFELSGPPHPRYDYAVRVEGPLLAEIAEAVHRLWRLVSWASLQRRLQEAMRLPRRGPPAGGLRAAFLVRDNLRHRRDIEDAYLAAIGRAREEIVIANAYFFPGRQFRQALLEAAARGVRVTLVLQGLADHPVLAHATRALYPHFLQRGIRLFEYHRSYLHAKVAVVDRRWATVGSSNIDPFSLWLAREANVVVEDAGFAGSLHRSLESAVQEGARELHREDWRRQRTLRRVASWLAYQAVRLAIGIAGYGGRH

SEQ ID NO: 99058 - DNA, 1410 bp, Azoarcus sp. BH72
  CDS (1)..(1410): transl_table=11
atgacatcaggatcaagacggcgccgtaagacgccgcgcctcgtcctctgcctcgcggtgctgctggcggcctgcgtcagcggtccggcggtcgatctgccggacgccggcgccgcggtgccgctggcggcggtgcgggtggaggacgaacgtggccccttgggcgctgcgcgcgcacaggccgccatccagcgcatcgcgcgcgaggatgcgtccggcctgctgcgccatcacctcacccatgtcgaaggcgccgtgacccagccgctggtgctcggcaacgaagcccatctcctgatcgacggcccgcagaccgaggccgccatgttcgccgcgatcggcgcggcacgccgctcggtggacatcgaaacctacatcctggaagcggagggcgcgggcgcgaggcttgccgcgctgctcgaaaaacgccgcgccgagggcatccgggtgcgcgtgctgtacgacagcgtcgggtcgctggcgaccccgcgcgagtacttcgaccgcctgcgcgccgtcggcgtcgcggtgtgcgaattcaacccggtcaatccgctgcaactgcagcgccacagccggctcaacatcaataaccgcgaccatcgcaagctgatggtggtggacggcagcaccgccttcaccggcggcatcaacatcagcgcggtgtacagctccggctccttcagccgcaagaagcgcgcgccgcccgatcccaaggccggctggcgcgacacccacgtgatggcgcgcggtccggtcgcgatgcagttccagcagctgttcgacgacgcatggcgcacccagggctgccacccggcggactccggcctgcgcgaagccgccgcgccggcccgcgccgggaacatggcgatgcgcacggtggcggccgatccgctgatggagcgcagcgaactctacgtggcgctgctgtcggcgatcgaccacgcgcgccggcgggtgtggctgacctacggctatttcgtgccggacgagcgcaccgtggcggcgctgcagtcggccgccggccgcggcgtggatgtgcgcatggtgctgccgggcttcagcgatttctgggcgcccttccatgccgggcgctcgcactacagcgcgctgcttgaagccggggtgcgcatctacgagcgccgcgacgcgctgctgcatgccaagaccgcggtcatcgacggggtgtggtccagcgtgggctccaccaatctcgactggcgcagcttcgtgcacaacttcgaggtggatctgctggtgctcgacggcgacttcgccgacgagctggagcagcttttccgcatggacatggacgcctcgcacgaggtgagcgcgcgcgaatggaaacggcgcgacatcggcacccggatgctggagtggttcgcgcggcgctgggagtacctgctgtga

SEQ ID NO: 99059 - protein, 469 aa, Azoarcus sp. BH72
MTSGSRRRRKTPRLVLCLAVLLAACVSGPAVDLPDAGAAVPLAAVRVEDERGPLGAARAQAAIQRIAREDASGLLRHHLTHVEGAVTQPLVLGNEAHLLIDGPQTEAAMFAAIGAARRSVDIETYILEAEGAGARLAALLEKRRAEGIRVRVLYDSVGSLATPREYFDRLRAVGVAVCEFNPVNPLQLQRHSRLNINNRDHRKLMVVDGSTAFTGGINISAVYSSGSFSRKKRAPPDPKAGWRDTHVMARGPVAMQFQQLFDDAWRTQGCHPADSGLREAAAPARAGNMAMRTVAADPLMERSELYVALLSAIDHARRRVWLTYGYFVPDERTVAALQSAAGRGVDVRMVLPGFSDFWAPFHAGRSHYSALLEAGVRIYERRDALLHAKTAVIDGVWSSVGSTNLDWRSFVHNFEVDLLVLDGDFADELEQLFRMDMDASHEVSAREWKRRDIGTRMLEWFARRWEYLL

SEQ ID NO: 99060 - DNA, 1404 bp, Acidovorax sp. JS42
  CDS (1)..(1404): transl_table=11
atgatccgcgtggccgtgctctcgggcctgggccacgcgatcttcgtggccgtggggctgctggtgtacgtgatgggcacgcgcatcggccaccagcgccgccatccctcggccgcgatgggctgggtgctgggcatcgtcacgtttccctatctggtcgtaccgctgttcctcttgttcggcacgcgcaagttcgcgcggcccgcacgtcgcccgcacggcccgccgctggaggcaacggaaggcgggccgccctgggccacgcggctgctggccagcctggagctggcgcccgccgtgcgcaatgcgcaggtggtgctgcatgccgacggcacgcaggcgctgcaggggctactggccaccattgcgtcggcccgccaccggctggacctgtgcacctacgtgtttgcctacgacgaggtggggcgcgaggtggcgcgcgcgctgctggactgcgtgcaccgcggcgtgcgcgtgcgcctgctggtggacgccatgggcagcatgcgcacgccacccggcatgctgcgcgccctgcggcgccagggcctgcaggtgcgccgcttcatgccgctgctgcacaacccgctgcgcgggcgcaccaacctgcgcaaccaccgcaagctggtcgtggccgacggcgagcggctgtggagcggcggacgcaacctggcctgcgagtacttcatcgaccggccgggccaccccgcctgggcggacttgagctacgaggtccatggcccgctggccgcgcaggcgcaggcccagttcgccaccgactggcgtgtggcgcgcggcctggtgctgcgccgccgccgcaaggcacgtagcaccgccgcgccggcgctgcccgctccgcccgcacacggcccgttggcgcagtggctgcccagcggtcccgaccatgccgacgacaccgtgcatgcgctgctgctggcggctgcctaccatgcccagcggcgcatcgtggccgtcacgccgtacttcgtgcccgacgacgcgctgctggacgcctggtgcctggcctgccggcgcggcgtgcaggtcagcgtggtggtgccggcgcgctccaaccaccgcctggcggacctggcccgcgagcgcgcgctgcgccagctggccgccgcgggtgcgcgggtatggctgtccccggccatggtgcatgccaaggcggtgctcatcgacgacgaactggctctcgtcggctcgctcaacctggacgcgcgcagcctgttcctgaactacgaggccatgaccgtgttctacggcccgcaggaactgcactggctggcgcagtggagcgaccagctgctggccagcgcgcgcccctaccacgcgcgtgcgccctcctggctgcgcgacgtcatcgaaggcgtggtgcgctcggtgggctttcagctctag

SEQ ID NO: 99061 - protein, 467 aa, Acidovorax sp. JS42
MIRVAVLSGLGHAIFVAVGLLVYVMGTRIGHQRRHPSAAMGWVLGIVTFPYLVVPLFLLFGTRKFARPARRPHGPPLEATEGGPPWATRLLASLELAPAVRNAQVVLHADGTQALQGLLATIASARHRLDLCTYVFAYDEVGREVARALLDCVHRGVRVRLLVDAMGSMRTPPGMLRALRRQGLQVRRFMPLLHNPLRGRTNLRNHRKLVVADGERLWSGGRNLACEYFIDRPGHPAWADLSYEVHGPLAAQAQAQFATDWRVARGLVLRRRRKARSTAAPALPAPPAHGPLAQWLPSGPDHADDTVHALLLAAAYHAQRRIVAVTPYFVPDDALLDAWCLACRRGVQVSVVVPARSNHRLADLARERALRQLAAAGARVWLSPAMVHAKAVLIDDELALVGSLNLDARSLFLNYEAMTVFYGPQELHWLAQWSDQLLASARPYHARAPSWLRDVIEGVVRSVGFQL

SEQ ID NO: 99062 - DNA, 1440 bp, Fusobacterium nucleatum subsp. vincentii ATCC 49256
  CDS (1)..(1440): transl_table=11
atgcaagatatttctaaaattttattaacatttgtacaatttttcttacagtatgtttgggtggcaaatctattttttataattgttattataatgatagagaaaaaaaatccactatatacaattttatggatatttttattaacacttatgccttatgttggtttttttatttatttattctttggtttaacttttaagaaaaaaagagttgctaataaaatttataaattaaaaaaattaaaaagtaggaaaaatgtttccaaagctgatagagaagaactgagaagatggaaagggcttataacttatcttgaaatgagcactgataactatattacttccaataatgatattgaagcttactttacagggaaggaatttttttctaatttaaaaaaagaaatagctaatgcaaaaaaatttataaatatggaatattttatctttcaatttgatgggataggaaaagaaatagctgatttattaattgaaaaagctaaggaaggaatagaagtcaatctaataatagatggagttaatttagctaatcgtaaacttaatgaatattttaaaaatacaggagttaatttacatctattttttagaacatatattccaatatttaatattagattaaattatagagatcatagaaaagttacaataatagataatagagttgcttttgttggtggaatgaatataggagatgaatatttaggtaaaggggaaataggatattggagagatacttctgtaaaaatttatggagatattgtttctagttttgaaaaagaattttatttctcattaagtatagtaaaaaataaatatttgaaagatgaaaaaccctctaatgaaatttctcttaaatatgaagaagaagatagtgtctatatgcagcttataagttctggacctaattatgaatttccagttataagagataactatattaaacttattcaagaagctagaaaatctgtatttattcaaacaccatattttgttccagatgatttattactggatactttaaagtctgctgttttatcaggtatagatgtaaaaattatgatacctaataaggcagatcatccatttatttattggataaatcaatattatgttgctgaacttttaagattaggtgcaaatatttatagatatgaaaatggttttatacattctaaaactatattagttgatgaagaagtagtttcagttggaacttgtaattttgattatagaagtttctacctaaactttgaaattaatttgaatatctacaataaagatgttgctaattcttttaaaactcaatattataaagatattgcaatatcaaaaaaattgacatttgctgattttaaaaagagaagtatttttacaaaagtaagggaatctgtatttagattactatcacctataatgtag

SEQ ID NO: 99063 - protein, 479 aa, Fusobacterium nucleatum subsp. vincentii ATCC 49256
MQDISKILLTFVQFFLQYVWVANLFFIIVIIMIEKKNPLYTILWIFLLTLMPYVGFFIYLFFGLTFKKKRVANKIYKLKKLKSRKNVSKADREELRRWKGLITYLEMSTDNYITSNNDIEAYFTGKEFFSNLKKEIANAKKFINMEYFIFQFDGIGKEIADLLIEKAKEGIEVNLIIDGVNLANRKLNEYFKNTGVNLHLFFRTYIPIFNIRLNYRDHRKVTIIDNRVAFVGGMNIGDEYLGKGEIGYWRDTSVKIYGDIVSSFEKEFYFSLSIVKNKYLKDEKPSNEISLKYEEEDSVYMQLISSGPNYEFPVIRDNYIKLIQEARKSVFIQTPYFVPDDLLLDTLKSAVLSGIDVKIMIPNKADHPFIYWINQYYVAELLRLGANIYRYENGFIHSKTILVDEEVVSVGTCNFDYRSFYLNFEINLNIYNKDVANSFKTQYYKDIAISKKLTFADFKKRSIFTKVRESVFRLLSPIM

SEQ ID NO: 99064 - DNA, 1515 bp, Listeria monocytogenes str. 4b H7858
  CDS (1)..(1515): transl_table=11
atgcgcaaactgattcaatttctgtttatagcagtagttttatttttagtggaatactttttaatcaatcaagcagctatattattcttagtaacaagtggacttatccaattatgcggattaattattgtgattcggctactactctttgatcaacggaatactagctcaaaagtcgcctggattgcggttattttcattttacctgtacttggaacgattagttaccttgtgtttggtagaaatccagcaactagaaaattcagcacagctcaagtaatggaaaaagctaaattaattaatgcgattcacgcaattccaaacaacactaatgaaaaattaccacgactatctaaaagaattgcgcatttaacgtccatagagccaattaaggggaataaaatcgaaatattaacaaatggcgaagaaacttttccagtgctcttagacgcgcttagaaaggctgaaaaccacattcatattcaatactatattttcaaaacggatgaaatttctacagagattcgtgatattttggtagaaaaggcgaaatccggtgttgaggttaggtttatgtttgatggacttggttcaagcaaacttcataaggcatttttagcgcctctaaaagaagctggagttagtattcatgcgtttgatccaatcacatccccatggattgtaaggactgccaacttgcgaaatcaccgtaaaattgtcgtgattgatggtcaaattggctttacaggcgggcttaatattggagaagaatatcgttctaatacaccagatttccgtgtttggcgcgatacacatattaaaatcacaggccaagctgttatcgaacttcaagaatcttttctaaatgattgggtctatatggaaaaccaagcaggtgctgcagatcaatttattagtgaagctggattacaacaatatttttcaccagttgatgtgggtgacgaatgggcgcaagtgatttacggcggaccatatgataaagaaaaatgggttcgcgattcgatgcttgatttaattgattccgctaaagaatctgtttggattgtgtcgccttactttgttccagatgaggagtcgcttgcagttattcgccgggttgcgatgagcggtgttgacgtgcgagttattattccaggcaaaggtgatcgcgggatttcattccacggaagtaatgcgtatgtgaaaacaatgattgaagcaggcgcgaaaatgtatgcttatgccgatgattcttttgttcatgcgaaggcaatgctagtggacgggacgcgtgcagctataggtactgccaattttgacgtgcgtagttttagattgaatcatgaattaatggtattcttatatgatgaaagcgaggctatgcatcatttaaaacgtgattttgagaaagattttgaagatagccgactgtttacgatgaaagatatggaaaacaaaccattattgactcgtataaaagaagttctatctagtttactatcaccaattttataa

SEQ ID NO: 99065 - protein, 504 aa, Listeria monocytogenes str. 4b H7858
MRKLIQFLFIAVVLFLVEYFLINQAAILFLVTSGLIQLCGLIIVIRLLLFDQRNTSSKVAWIAVIFILPVLGTISYLVFGRNPATRKFSTAQVMEKAKLINAIHAIPNNTNEKLPRLSKRIAHLTSIEPIKGNKIEILTNGEETFPVLLDALRKAENHIHIQYYIFKTDEISTEIRDILVEKAKSGVEVRFMFDGLGSSKLHKAFLAPLKEAGVSIHAFDPITSPWIVRTANLRNHRKIVVIDGQIGFTGGLNIGEEYRSNTPDFRVWRDTHIKITGQAVIELQESFLNDWVYMENQAGAADQFISEAGLQQYFSPVDVGDEWAQVIYGGPYDKEKWVRDSMLDLIDSAKESVWIVSPYFVPDEESLAVIRRVAMSGVDVRVIIPGKGDRGISFHGSNAYVKTMIEAGAKMYAYADDSFVHAKAMLVDGTRAAIGTANFDVRSFRLNHELMVFLYDESEAMHHLKRDFEKDFEDSRLFTMKDMENKPLLTRIKEVLSSLLSPIL

SEQ ID NO: 99066 - DNA, 1515 bp, Listeria monocytogenes str. 1/2a F6854
  CDS (1)..(1515): transl_table=11
atgcgcaaactgattcaatttctgtttatagcagtagttttatttttagtggaatatgttttaatcaatcaagcagctatattattcttagtaacaagtgggattatccaactatgcggggttattatcgccattcgactactcctatttgaccaacggaatactagctcaaaagtcgcctgggttgcggttatttttattttgcctgtactcggaacgattagttaccttgtgttcggtagaaatccagcaactagaaaattcagcacagctcaagtaaaggaaaaaacaaaattaattaatgcgattcatgcaattccaaacaacactaatgaaaaattgccacgactatcaaaaagaatagcgcatttaacgtccatagagccaatcaaggggaataaaatcgaaatattaacaaatggtgaggaaacttttccagtgctcctagacgcgcttagaaaggctgaaaaccacattcacattcaatattacattttcaaaacggatgcgatttctactgaaattcgtgatattttggtggaaaaggcgaaatctggtgttgaggttagatttatgtttgatggtctcggatcaagcaaactgggtaaagcctttttagctcctttgaaagaggctggagttagtattcacgcatttgatccaattgcctccccctggattgtaagaacagccaatttaagaaatcaccgtaaaatcgtggtgattgatggccaaattggctttacaggtgggcttaatattggggaagaatatcgttccaatacacctgattttcgtgtttggcgcgatacacacataaaaataacaggccaagctgtaatcgaactccaagaatccttcctaaacgattgggtatacatggaaaatcaagctggcgccgctgacgggtttattagcgaatctggtttaaaacaatatttttctccagtcgatatgggtgatgaatgggctcaagttatttacggcggaccatatgataaagaaaaatgggttcgggattcgatgcttgatttgattgattccgctaaagaatcagtttggattgtatcaccctatttcgttccagatgaggagtcgcttgcggttattcgccgggttgcgatgagtggtgttgacgtgcgggttattattcctggtaaaggcgatcgcgggatttcattccacggaagtaatgcttatgtaaaaacaatgattgaagcaggcgcgaaaatgtatgcttatgccgatgactcttttgttcatgccaaagcaatgcttgtggacggaacacgtgcggctattggaactgccaattttgacgtgcgtagttttagattgaatcatgaattaatggtattcttatatgatgaaagcgaggctatgcatcatttaaaacgtgacttcaaaaaagattttgaagatagccgactatttacgatgaaagatatggaaaacaaaccattattgactcgtataaaagaagttctatccagtttactatcaccaattttataa

SEQ ID NO: 99067 - protein, 504 aa, Listeria monocytogenes str. 1/2a F6854
MRKLIQFLFIAVVLFLVEYVLINQAAILFLVTSGIIQLCGVIIAIRLLLFDQRNTSSKVAWVAVIFILPVLGTISYLVFGRNPATRKFSTAQVKEKTKLINAIHAIPNNTNEKLPRLSKRIAHLTSIEPIKGNKIEILTNGEETFPVLLDALRKAENHIHIQYYIFKTDAISTEIRDILVEKAKSGVEVRFMFDGLGSSKLGKAFLAPLKEAGVSIHAFDPIASPWIVRTANLRNHRKIVVIDGQIGFTGGLNIGEEYRSNTPDFRVWRDTHIKITGQAVIELQESFLNDWVYMENQAGAADGFISESGLKQYFSPVDMGDEWAQVIYGGPYDKEKWVRDSMLDLIDSAKESVWIVSPYFVPDEESLAVIRRVAMSGVDVRVIIPGKGDRGISFHGSNAYVKTMIEAGAKMYAYADDSFVHAKAMLVDGTRAAIGTANFDVRSFRLNHELMVFLYDESEAMHHLKRDFKKDFEDSRLFTMKDMENKPLLTRIKEVLSSLLSPIL

SEQ ID NO: 99068 - DNA, 1104 bp, Bacillus cereus G9241
  CDS (1)..(1104): transl_table=11
atggctagtgaatatgaattagggaaagttcggtcaggtgaatttcaactgtatacgaacggtgaagaattatatacgaaattatttgaggatatacgcaatgcagaaaaatacatatatatccatttttatattgtaggtaaagacgaaataagcaaagagtttttgcagttgctcgagaaaaaggcatcgggtggagtagaagtgaaattgtcagtcgatcgaataggtggatataagctgaagaaaaagataattcgtcaactaaaaagcaatggtgtccagtttacatttagtaaaaagcctaaactaaaacatatattctactcgttgcatcaacggaaccatagacgcattgttacgatagatggaaaagtatcatacatcggtggttttaatatcggaaaggaataccttggacaaaatccgaaatttggtccgtggcgtgattatcatgtacgagtcaaggggaatggtgccacggatatggaaagaaaattcgcggctgactggaaagaagatacgggtgaaaaaatgcctgtacatgaaagtttacctgtaagtgggaatgtaaaatatcaatatttattttcagacggaaaaggtttatgggaaaaatatggagcgcttttaaagcaggctaaaaagtcattaatcattgctacgccatattttgtaccaagtaaagaaatgatgaaagcgttaaaaaatgcattaaaccgcggtgtcaatgtgaaaattctcgtgccatttaaaagtgatgcagtattgttaaaacaagctgcctacccgtatttgaaagagatgaaccatgctggagcggagatttatcaatatcggaatggattttttcacgggaaagtaaccatcattgatggagaaattgttgatataggtacagcgaattttgataatagaagcttttatttaaattgtgaatctaactgtatcatatatgataaaacagttgttgccgacgtatggaaccaattaaaagaagacttccataaatcaaaaagattttcggaagaagattttgaggaaattagtaaatgggattggtttttagcaagaatagcaaatgttatagcatcatatttatag

SEQ ID NO: 99069 - protein, 367 aa, Bacillus cereus G9241
MASEYELGKVRSGEFQLYTNGEELYTKLFEDIRNAEKYIYIHFYIVGKDEISKEFLQLLEKKASGGVEVKLSVDRIGGYKLKKKIIRQLKSNGVQFTFSKKPKLKHIFYSLHQRNHRRIVTIDGKVSYIGGFNIGKEYLGQNPKFGPWRDYHVRVKGNGATDMERKFAADWKEDTGEKMPVHESLPVSGNVKYQYLFSDGKGLWEKYGALLKQAKKSLIIATPYFVPSKEMMKALKNALNRGVNVKILVPFKSDAVLLKQAAYPYLKEMNHAGAEIYQYRNGFFHGKVTIIDGEIVDIGTANFDNRSFYLNCESNCIIYDKTVVADVWNQLKEDFHKSKRFSEEDFEEISKWDWFLARIANVIASYL

SEQ ID NO: 99070 - DNA, 1530 bp, Bacillus cereus G9241
  CDS (1)..(1530): transl_table=11
atgaagaaacctatcgtccaattactattaatatttacaattgtatctatcgttcttttcctattaaatacatcgtatatttcgttatatacatttgtcggcgttctctggtccatcacaattgtaggaatttcattcgttatttttatcgaaaatagatctcctcaaagtaccttagcgtggtttttagtattagcgcttcttcccgttataggtgtgcttttatactctattttcggacgtagccgttggagaagaaaaaagcatctccatcgttcagaagaacaaagaaaattattccgtgaaatattagaaggaagacggctagagttatcactcaaagtcccattaagtgaacgctctgcccatttaacagaagtcgtacaaaaatttggaggtgggcctgccgcagatagaacaactacaaaacttttaacaaacggagatcaaacattctcagaaattttgcaagcgatcgagcaagcaaaacatcacatacatattcaatactatatttataaatctgatgagattggtacaaaagttcgggatgcgttaataaaaaaagcaaacgctggtgttattgtacgcttcctttatgatggattaggaagtaatacgttaagaagacgctttttaaaacctatgaaagaagctgggattgaaattgttgaatttgaccctattttttctgcttggttacttgaaacagttaattatcgtaaccaccgtaaaatcgtcattgtagatggagaaatcggttttacggggggactcaatgtcggtgatgaatatcttggccgttcaaaaaaatttcccgtttggcgtgatagtcatttaaaaatagaaggaaaagcgttatataaattacaagcaatttttctagaggactggctctatgcatctagtggtttgaaaacttattcttgggatcaatttatgaatagacaatacttcccaggtaaagaaatttcaagtgcagaaggtgcggtgcaaattgtagctagcggaccaagctcagatgataaaagcattcgtaatacgttattagctattatgggctctgcaaaaaaatctatttggattgctacaccatattttattccagatcaagaaactttaacattattacgtttaagtgcaatatctggcatagatgtacgcattttatatcctggtaaaagtgatagtattattagtgatcaagcatcccagtcctacttcactccacttttaaaagctggtgcctccatttatagttataaagatggctttatgcatgcaaaaattgtaattgttgatgataaaattgcaacaatcggaacagcaaatatggatgtacgcagctttgaattgaattacgaaattattagcgtactgtatgaatcagaaactgttcatgatattaaacgtgattttgaagaagactttaaacattccactgaaattaaatggaacgctttccaaaaaagaagtatcaaaaaacgaatattagagtcttttatgaggctcatttctcctttactataa

SEQ ID NO: 99071 - protein, 509 aa, Bacillus cereus G9241
MKKPIVQLLLIFTIVSIVLFLLNTSYISLYTFVGVLWSITIVGISFVIFIENRSPQSTLAWFLVLALLPVIGVLLYSIFGRSRWRRKKHLHRSEEQRKLFREILEGRRLELSLKVPLSERSAHLTEVVQKFGGGPAADRTTTKLLTNGDQTFSEILQAIEQAKHHIHIQYYIYKSDEIGTKVRDALIKKANAGVIVRFLYDGLGSNTLRRRFLKPMKEAGIEIVEFDPIFSAWLLETVNYRNHRKIVIVDGEIGFTGGLNVGDEYLGRSKKFPVWRDSHLKIEGKALYKLQAIFLEDWLYASSGLKTYSWDQFMNRQYFPGKEISSAEGAVQIVASGPSSDDKSIRNTLLAIMGSAKKSIWIATPYFIPDQETLTLLRLSAISGIDVRILYPGKSDSIISDQASQSYFTPLLKAGASIYSYKDGFMHAKIVIVDDKIATIGTANMDVRSFELNYEIISVLYESETVHDIKRDFEEDFKHSTEIKWNAFQKRSIKKRILESFMRLISPLL

SEQ ID NO: 99072 - DNA, 1545 bp, Bacillus cereus G9241
  CDS (1)..(1545): transl_table=11
atgaaaaatacgttaaagttgattttctttgttttactattgttcgcattatttgtttcattacgtatgtttattgatgtagcattttattcggatgtaattgggataaaggatgtttcgattttaggtattattagtattttatttacagtatctgcatttttaattggctgcgttattttcttagagaaccgtcatccgtctaaaacacttacatggctcattgtgttagggatctttccggtatttggattcttcgcttatttattattcggacagaactttcggaggaagagaatgttccaaaagaaggcgttgctcgatgaacaagcgtttttacaatataaggggcatgaagattatgaagaactgattttgcgcaatcataagcatcaagagctgttatttcgtttagcggatcgcttaggcgctttaaatatttcatttcaaactgaaacgagaacattaacaaatggagatgaaacgtttcaggccattttagatggattaaaacgagcaaaacatcacattcatatggaatattacattgtgcgtgatgataagcttggaacagaaattaaagatattttaatacaaaaatcaaaagagggcgtagtcgttcgttttttatatgatgcggttggaagttttaaattatcaaaatcgtatattgaagaattaaacgatgcaggtgtcgaaatgattccgttctttcctgtgcgctttccgattttaaacgataagattaattatcgaaatcaccggaaaatcgttattattgatgggaatgaaggatttgtaggtggattaaatattggtgatgaatatttaggaaaggataagtacttcggcttttggcgagacacgcatttatatttgcgtggggaagctgtacaaagtttgcagcttattttccttcaagattggttttatatgactggtgaggctgtgctagcccctgaatatttacaagcgaaagcagttgagggggagcattggggcggcgtgcagctcgttgcaggtggaccggataataaatgggaaacaattaaacatttatattttgccatgattgcttctgcacgaaaatccatttggattgcaacgccgtatttcatcccggatgatgatattttatccgcattaaaagtagcggcacttgctggtattgatgttcggttgttaatgccgagtaagcctgataagcgaactgtcttttatgcatcgagatcgtacttcccagagcttttagatgcaggggtaaagatatatgaatacgaaaaaggttttctccatagtaaagtagttattgtcgattctgatttagcttcaattgggactgctaatatggatatgagaagttttcatttgaactttgaagtaaatgcctttttatatgatacagatagcattcgaaaacttgttcaagattttaaagatgatttagaagaatcaagtgaaattcacgtcgatcgttttcataaaaggcgtcttcatagacgaattgttgaatcaacgtaccggttattatcgcctttattataa

SEQ ID NO: 99073 - protein, 514 aa, Bacillus cereus G9241
MKNTLKLIFFVLLLFALFVSLRMFIDVAFYSDVIGIKDVSILGIISILFTVSAFLIGCVIFLENRHPSKTLTWLIVLGIFPVFGFFAYLLFGQNFRRKRMFQKKALLDEQAFLQYKGHEDYEELILRNHKHQELLFRLADRLGALNISFQTETRTLTNGDETFQAILDGLKRAKHHIHMEYYIVRDDKLGTEIKDILIQKSKEGVVVRFLYDAVGSFKLSKSYIEELNDAGVEMIPFFPVRFPILNDKINYRNHRKIVIIDGNEGFVGGLNIGDEYLGKDKYFGFWRDTHLYLRGEAVQSLQLIFLQDWFYMTGEAVLAPEYLQAKAVEGEHWGGVQLVAGGPDNKWETIKHLYFAMIASARKSIWIATPYFIPDDDILSALKVAALAGIDVRLLMPSKPDKRTVFYASRSYFPELLDAGVKIYEYEKGFLHSKVVIVDSDLASIGTANMDMRSFHLNFEVNAFLYDTDSIRKLVQDFKDDLEESSEIHVDRFHKRRLHRRIVESTYRLLSPLL

SEQ ID NO: 99074 - DNA, 1194 bp, Bacillus cereus G9241
  CDS (1)..(1194): transl_table=11
atgttcttcttatctctcttattactaggcagcactctctggattgtaattgatttttcttatgggagaattgttcatttaaaagcgttacgttctcgttctttccctttacgtcaaagtgattttcacctttatacatatggaaaagatttgtatgacgctctatttactgatataaaacaggcgaaaacacctgtgcacgttttgttcttcattgtaaaaaacgataagatcagccgggaatttttaaagttacttattgataaggcaaaggaaggaattgaagtaagacttctactcgatcgattgggaggccatcatttatcaaacgaggccattcgctccctacaaaaacatggtgtctctttttcattttgtcacaaagtaaagtttccttttcctttcttttctgcaaatcaaagaaaccatagaaaaattacagttatcgacgggaaaattggttatattggtggatttaatattggggaagaatatttagggcataatcaaaaattaggattatggcgcgattatcatttacgtcttacaggagaaggaatacaagatttacaaaagcaatttttacatgattggctcgacgatacggaccaaaatttattagatgcatctctttatttccctaagcaacaaccgggaagcattattcatcgttttatccctactgatggtgcttatttgcaaaatacatttttatatttaatcgaaagcgcggaaaaagaactctttatcggtacaccatatttcattcctgggaaaaaaattatgaatgcattattagaagcacgaaaacgcggcgttcaaatcacgattctcgttccagaaaaagcggatcacgcccttgttcgagaagcaaaattcccgtattgccgaaagttaatacaagctggatgtaatatttacgcatttcaacaaggtttttttcacgctaaagttattatagttgatgactacatttgtgatatcggaactgcaaactttgatatgagaagtttatatattaaccatgaaatcaactgccttttatatgataaacattttatacaaaccgtaaaaaacaaattccatgaagatctaggaaacgcgtcattactttccttgaaagatgttagcccgaattctcttattgatagaggaaaagaatggataggaacaatacttgctttcttcctatag

SEQ ID NO: 99075 - protein, 397 aa, Bacillus cereus G9241
MFFLSLLLLGSTLWIVIDFSYGRIVHLKALRSRSFPLRQSDFHLYTYGKDLYDALFTDIKQAKTPVHVLFFIVKNDKISREFLKLLIDKAKEGIEVRLLLDRLGGHHLSNEAIRSLQKHGVSFSFCHKVKFPFPFFSANQRNHRKITVIDGKIGYIGGFNIGEEYLGHNQKLGLWRDYHLRLTGEGIQDLQKQFLHDWLDDTDQNLLDASLYFPKQQPGSIIHRFIPTDGAYLQNTFLYLIESAEKELFIGTPYFIPGKKIMNALLEARKRGVQITILVPEKADHALVREAKFPYCRKLIQAGCNIYAFQQGFFHAKVIIVDDYICDIGTANFDMRSLYINHEINCLLYDKHFIQTVKNKFHEDLGNASLLSLKDVSPNSLIDRGKEWIGTILAFFL

SEQ ID NO: 99076 - DNA, 1524 bp, Exiguobacterium sibiricum 255-15
  CDS (1)..(1524): transl_table=11
gtgcgcaatcggattttacagttcgcgctcgtgtttttagtcgcaggcggaatcatttggggactataccaattgggctacctgttttatgttttgacgatttccgcgaccgtcgtacccttggccgtcatcatgatcatcttcatcgaaaaccggacggcggaatcgacgattgcctggtttttagttttgatcttcttaccgattctcggtgtcatcatctggatgatgttcgggcgcaatccgcgccgccgtcgccggaaccggcggtcgcacgatgaacggatgttgctgaaacaggcaatccgtcccgtccggtcgctcgcggtcagtgagttgccgccgaaccacctgaagcttgccaatacgatccgcaactttggtggcggtggggtcgacgtccatacagccagtcaaatcctgacgaacggcaacgagacgttcccggaaattctccggatgatccgctccgccaagcatcatgttcacatccagtattacatttaccggaacgacgagaccgggcaggcaatccgcgaagcattgattgaccggttgaatgacggggtcgaagtccggttcatgtttgacggtcttggcagttacatgctcggcgaaggatttttgaaaccgctccgggaagccggggcaaagattgccgcctatgatcccatctccagtccgttgttcatctttacggcgaacttccgcaatcaccggaaaatcgttgtcgtcgatggcaaaatcggttttaccggtggactgaacgtcggcgacgagtatgacggtaaaagtaagaagttcggcttttggcgcgatacccaccttcggctcgaaggacgggccgtcaaggaactgcaggcaacgttcctcgacgattggctctatgcccatttagaaggcagtgatacgtgggagacgtttgccggcgaaggggcaatcgatcaatacttcccgaaacacgatgtcgagaccgacggcgcggtccagctcgtgacgagtggaccgacgtcaaaagatccggcgatccggaacgcgttgattgccgccatcatctcggcccagcgctcgatctggatttcgacgccgtatctgattccggataacgagacgatgacactgctccgtcttgcggcccgtgccggactggacgtccggattctgacaccgggtaagggagacagttttacctcctactatggaacccggtcctatttcggacctttgttaaaagatggagtcaaaatttatacgtataaccggcacttcatccatgccaaactgttcctcgtcgatggaaagattgccgtcgtcggaacggcgaacatggatatccggagcttcgttttgaactacgaactgatggcctttatgtatgattccgagagtgcggcccggctcgaacgcgatttcatcgatgatttcgacgtctcgattcagttgtcctcggcggattatgtcaaacggccgatgcggttccggatttttgaatcgttctcccgtttgatttcaccattgttatga

SEQ ID NO: 99077 - protein, 507 aa, Exiguobacterium sibiricum 255-15
MRNRILQFALVFLVAGGIIWGLYQLGYLFYVLTISATVVPLAVIMIIFIENRTAESTIAWFLVLIFLPILGVIIWMMFGRNPRRRRRNRRSHDERMLLKQAIRPVRSLAVSELPPNHLKLANTIRNFGGGGVDVHTASQILTNGNETFPEILRMIRSAKHHVHIQYYIYRNDETGQAIREALIDRLNDGVEVRFMFDGLGSYMLGEGFLKPLREAGAKIAAYDPISSPLFIFTANFRNHRKIVVVDGKIGFTGGLNVGDEYDGKSKKFGFWRDTHLRLEGRAVKELQATFLDDWLYAHLEGSDTWETFAGEGAIDQYFPKHDVETDGAVQLVTSGPTSKDPAIRNALIAAIISAQRSIWISTPYLIPDNETMTLLRLAARAGLDVRILTPGKGDSFTSYYGTRSYFGPLLKDGVKIYTYNRHFIHAKLFLVDGKIAVVGTANMDIRSFVLNYELMAFMYDSESAARLERDFIDDFDVSIQLSSADYVKRPMRFRIFESFSRLISPLL

SEQ ID NO: 99078 - DNA, 1440 bp, Exiguobacterium sibiricum 255-15
  CDS (1)..(1440): transl_table=11
atggactataccctaatcctgaagattttgctctatgtcgtgttgattgccaactttgcagcagcaatcgccatcctgttttttgagcggcgcgatgtcagtgcaacctgggcctggctgatgatcctcttgttcctgccggtcatcggctttttgatttacttgttgttcggccgctccttgaaacaggattcgttttatcatgtgccggaagatcgccggttggcgcgcgaacaagaccttaccgaacaggcagctgaagcgattccccccaatacaccactttatccgtaccggaagctgattcaggcgaatcgttcatcaggtgccctgttgacggaggcgacggtcgtccggagcctgttcgacggtcatcagaaattcgatacgttacttgctgacattaaaagcgcgcaagtcgaaatcaatatccagtattttatcttaaaacgtgatccgctcggcgaccgtctgctgaacgctttgttcgaacaggccaagcgcggcgtcaaagtccggattctgtatgacgccgtcggttcgtggaaactgaaagccaaggatttcgcgtcgttcaaacaggacggcggcgaggtccgctcgttcttctcgtcgccgctcggtatcttcaacctgcgcatcaacaaccggaatcaccggaaactctgtacgatcgaccggcaaatcggctatatcggcggctttaacgtcggatcggaatacctcggggaagacgaacagttcggctactggcgggatacccatctgcgggttcttggtccggtcgtcgaagaactcgaatttcatttcgaacaggactgggacgctgcgagcaacgagcggaccgactggtcgaccgcaccgattccgccgcatgctgcagcgacggatcatgtaccggttcaaatcgtgacgtccggtccgacatccgagacggagtatttgaaaaatatgctgattcagatgattcattctgccgaaaaatcggtttacatccagtcgccctacttcattccggatgccagtttcatggacgcctgccagattgccctggcttccggcgtttcgctcaaaatcatgattccgaatcaaccggaccatccctttgtctactgggcgacgtacgcggcagtcggcgaattgattcaacacggggccgaagtctacacgtacgaaatcggcttcatgcatgcgaagacgattgtcgtcgacgggaaaatcgcttcggtcgggacgacgaatatcgatgcccggagcttccggctgaactttgaaatgaatgcgattttgtacgatgcggcgattgcagaagaactggagctgctcttcttatcggacgtcgccgacagtgccttgctgacacgagaaaaatacgccgcccgtccgcggatgatccgctttaaagaaagtatctcgcgtctgttgtcaccgattttgtga

SEQ ID NO: 99079 - protein, 479 aa, Exiguobacterium sibiricum 255-15
MDYTLILKILLYVVLIANFAAAIAILFFERRDVSATWAWLMILLFLPVIGFLIYLLFGRSLKQDSFYHVPEDRRLAREQDLTEQAAEAIPPNTPLYPYRKLIQANRSSGALLTEATVVRSLFDGHQKFDTLLADIKSAQVEINIQYFILKRDPLGDRLLNALFEQAKRGVKVRILYDAVGSWKLKAKDFASFKQDGGEVRSFFSSPLGIFNLRINNRNHRKLCTIDRQIGYIGGFNVGSEYLGEDEQFGYWRDTHLRVLGPVVEELEFHFEQDWDAASNERTDWSTAPIPPHAAATDHVPVQIVTSGPTSETEYLKNMLIQMIHSAEKSVYIQSPYFIPDASFMDACQIALASGVSLKIMIPNQPDHPFVYWATYAAVGELIQHGAEVYTYEIGFMHAKTIVVDGKIASVGTTNIDARSFRLNFEMNAILYDAAIAEELELLFLSDVADSALLTREKYAARPRMIRFKESISRLLSPIL

SEQ ID NO: 99080 - DNA, 1461 bp, Exiguobacterium sibiricum 255-15
  CDS (1)..(1461): transl_table=11
gtgcttgacgtgttgagtacgatgctcgtcatattggcttacggcttgattatcgttaatgtattggcggtcatcaccgtcatttttttagagcggcgggatgtcggcgcaacgtgggcgtgggtcttgattttatattttgttccgttgatcgggtttctgatttatttattttttggacgtctcttgaaaaaaacaaatttttatcacgtcgaacaaacggaacaacaagagcagtcacgccgtgttgctttgcaactgaccgagctcgacaagcatgagacacaacagcgtcatcctgctatcgtccggtatgaccaactgatccggatgaatttagtctcgaacgatgcgttgcttagttttaaaaatgaggtcgtcattttatcggacggcgagcaaaaatttaatcggatgatgaccgacatcgtaaatgcggaacacgaaatcaacatccagtattacatcattcaaaaggattcactgggacaggccttgattgccgctttgacgaacaaagcgaaacagggaatcaaagtccggttgctgtatgatgcggtcggatcccgcgatttaaaacggtccgactttaaggaattaatgaaacatgacggagaagtgtacgcctttttcccgccgacaatcggtttgatcaatttccgtctcaacaaccggaatcaccggaagtcctgtatcgtcgatgggaagattggttatatcggcggctttaacgtcggcacagagtatttgggaattgatgaaaaattcggctactggcgcgacacgcatttccggttggaaggagaggttgttcacgatcaactggaccgattcatcttggattggaaccaggccagcgacagctatacgcctaaaaatactttttattatggcgcccactcgattgaacaggaattgccgatgcagattgtgacgtcgggtccggattcgaaaacggaacatctcaaaaatctgctgattaaaatgatttcatccgcgaaatactcgatttatatccagtcaccttatttcatcccggatacgagttatatggacgcttgtaagatggcattgctgtcgggtgtggaaatccggatcatgattccgaacaaaccggatcatccgtttgtttactgggcgacgacagcggcagccggagaactgattgattatggagcgaaaatctatacgtatgaacccggatttcttcatgccaaaacgattgtcgtcgatcgggaaatcgcctccgtcggaacgacgaatatcgatgcccggagcttccgattgaattttgagatgaactcgatcgtctacgaccggcatgttgctgaagaattagcccgtttgttcgaagcggattgtcttgtctgtgagcaactgaccgctgaaaaatatgcggaacgatcccggttcgttaagtttaaagaaagtatttcccgcttgttgtctccgatcctttga

SEQ ID NO: 99081 - protein, 486 aa, Exiguobacterium sibiricum 255-15
MLDVLSTMLVILAYGLIIVNVLAVITVIFLERRDVGATWAWVLILYFVPLIGFLIYLFFGRLLKKTNFYHVEQTEQQEQSRRVALQLTELDKHETQQRHPAIVRYDQLIRMNLVSNDALLSFKNEVVILSDGEQKFNRMMTDIVNAEHEINIQYYIIQKDSLGQALIAALTNKAKQGIKVRLLYDAVGSRDLKRSDFKELMKHDGEVYAFFPPTIGLINFRLNNRNHRKSCIVDGKIGYIGGFNVGTEYLGIDEKFGYWRDTHFRLEGEVVHDQLDRFILDWNQASDSYTPKNTFYYGAHSIEQELPMQIVTSGPDSKTEHLKNLLIKMISSAKYSIYIQSPYFIPDTSYMDACKMALLSGVEIRIMIPNKPDHPFVYWATTAAAGELIDYGAKIYTYEPGFLHAKTIVVDREIASVGTTNIDARSFRLNFEMNSIVYDRHVAEELARLFEADCLVCEQLTAEKYAERSRFVKFKESISRLLSPIL

SEQ ID NO: 99082 - DNA, 1512 bp, Exiguobacterium sibiricum 255-15
  CDS (1)..(1512): transl_table=11
atgttaaggcgtgtccaattacttatgacgctactgttaaccgtcagtctgatcggctttctttcctattactggagtgtgtacatggtaggatggctctcaatcgtcatcattcttgtcgtactgagtgtttttgtcatcatcctacttgagaatcggaacccggaacgaacgcttgtctgggcgcttgtcatgatggcgcttcccgttgtcggtgttttcgtatatttcacctttggtcaaaattatagacgaaaaaaaatgtttcgtctgaaagcgatgctcgatgaagagtcttacattaaatatcgtacccagtttgatcatggaatacacaatcaagtgttccaacatggacattatacgaaagttgttaaactcatcgactccatcagtcgcctgccgatttcgtataatagtcacacgaaagtattaacgaatggacaagaaaaatttccgctgttattagccgagattcgtcaagcggaacaccacatccatttggaatactatatcgtccgcgatgacgaactggcgctagagttgcaggaagcattaattgaacgggcgaaagccggagtggagatccgtttcttgtatgatgctgtcggttgtttctcgacggataagtcttactttaaaaagatggagctggcgggaatcgaagtccgtccatttttcccggtcgttctgcctttcatctcgagtaaatccaattatcggaatcaccggaaaatcgttgttattgacggtactgtggctttcacgggtggaattaacgttggggacgagtacatgggaaaagataagatgtttggattttggcgggacacgcatttgctcgtcaggggagaggccgtctcggagcttcagttgatttttcttcaggattggtactatatgacgggggaacggttgtttacaccgtattatatgaaaccgctcgaagtcatggaggaatcgacaggaggcgtccaaatcattgcgagcgggccggatgaaccccatgaaacgatgaagtctctctacttcggtttaattacggaagcccggagttctgtttacattgcttctccctatttgattccggacgaggatctgatgactgctttaaagacggcagcgatgtcgggaatcgatgtccggatcttactgccgagttttccggatcataaagtcgttttttatgccagtcgctcttattttgatgacttgttattagcgggtgtaaagatttacgaatacaacaaaggattcatgcactcaaaagtcatcgtggtcgatgatgcgattgcgacgattggcacggcgaatatggacttaagaagttttcacttgaactttgaagtaaatgcctttttgtacgggacaaattccgtccacgaattaacacgtgacttttatgaagacttttccaattcttcacaagttgagcgtcaagtctttattcaaaggagtttcggtcaacgtttgatcgagtccatttcgcggttattttcaccgttactctaa

SEQ ID NO: 99083 - protein, 503 aa, Exiguobacterium sibiricum 255-15
MLRRVQLLMTLLLTVSLIGFLSYYWSVYMVGWLSIVIILVVLSVFVIILLENRNPERTLVWALVMMALPVVGVFVYFTFGQNYRRKKMFRLKAMLDEESYIKYRTQFDHGIHNQVFQHGHYTKVVKLIDSISRLPISYNSHTKVLTNGQEKFPLLLAEIRQAEHHIHLEYYIVRDDELALELQEALIERAKAGVEIRFLYDAVGCFSTDKSYFKKMELAGIEVRPFFPVVLPFISSKSNYRNHRKIVVIDGTVAFTGGINVGDEYMGKDKMFGFWRDTHLLVRGEAVSELQLIFLQDWYYMTGERLFTPYYMKPLEVMEESTGGVQIIASGPDEPHETMKSLYFGLITEARSSVYIASPYLIPDEDLMTALKTAAMSGIDVRILLPSFPDHKVVFYASRSYFDDLLLAGVKIYEYNKGFMHSKVIVVDDAIATIGTANMDLRSFHLNFEVNAFLYGTNSVHELTRDFYEDFSNSSQVERQVFIQRSFGQRLIESISRLFSPLL

SEQ ID NO: 99084 - DNA, 1404 bp, Xylella fastidiosa Dixon
  CDS (1)..(1404): transl_table=11
atggaagggacttggctgtttgcattggattgggtgatccgtttggttgcgttgctttggatcccagcacgaaccacccctagtgctgcgcgcagctggttgttactgattggtttcgtccctgtgtttggcttgccactttacttggtgtttggccatccttggctgtcacgtaagcgtgtgttgcgtcaggcgttggcttctcatgtgatccgtgagtggcagcgtgggttgggtgcattgcgctggcagcctcaggagaatggcgtcgctgcggaattggtacctttggtggagcatcagggcgattttatgccaacacgtggtaacgccttggatctattggatgattaccaagcttcgctgcatttgttgatcaatgatattgattccgcgtgtgaacgtgtgcacttgctgtattacttgatgttcgatgatgcggtgggtgatgcggttgtggctgcattacagcgtgctgcggcgcgtggcgtttcttgccgattgctgctggatgcagtcggtgctaaacgcggtctacgtgcctatcagcagtgccttcgtgcccatggtgtggaggtgcacgctatgttgcctggtgggttgcgctggcgtcgcagtgggcgtatggatttgcgcaaccaccgtaagattgctgtgatcgacaatcgtgtcgcttatatcggttcgcagaatttggcatgcccagattttgtgccgcatttccccaaccgtgaattggtcgcacgcgtgtgcggccctgcggtaagtcatctggaggcggtgttcctcagtgattggtttgttgaaactggtcaacgtttggggatgcgtccagatgttcccatatgtgagcaaaatgttgcggcccagctagtggccagcggtccggcttacccgtacgagaatgcgcgtgatgcggtgaatacaatgatccatttggcacggcggcgtattgtcttgacgacgccgtacttcgtgcctgatgaggccacattcagtgcgttgcgtattgcaggcacgtctggagtagacgtgcagttgatcctgtccgagagtaataaccagtttctgatggcctgggctcaggaggcgtactttgaggagctgttgcgcgcaggaatcaaaattgcgttgtatcgtccccatttcctgcatgccaagcatctgagtgtggatgatgatattgcgttgttcggatcgattaatttggacatccgctcgttcgcgcttaacgctgagattggcatgatttgttacgactcacgtattgtgactcggttacgtgaggtggagagtgattatctggccaatgcgcgccagcttaatttggttgagtggcagcaacgtcccgcttggcgtcgtagccgtgagggtattgcacgcttggcagatgctctgatgtag

SEQ ID NO: 99085 - protein, 467 aa, Xylella fastidiosa Dixon
MEGTWLFALDWVIRLVALLWIPARTTPSAARSWLLLIGFVPVFGLPLYLVFGHPWLSRKRVLRQALASHVIREWQRGLGALRWQPQENGVAAELVPLVEHQGDFMPTRGNALDLLDDYQASLHLLINDIDSACERVHLLYYLMFDDAVGDAVVAALQRAAARGVSCRLLLDAVGAKRGLRAYQQCLRAHGVEVHAMLPGGLRWRRSGRMDLRNHRKIAVIDNRVAYIGSQNLACPDFVPHFPNRELVARVCGPAVSHLEAVFLSDWFVETGQRLGMRPDVPICEQNVAAQLVASGPAYPYENARDAVNTMIHLARRRIVLTTPYFVPDEATFSALRIAGTSGVDVQLILSESNNQFLMAWAQEAYFEELLRAGIKIALYRPHFLHAKHLSVDDDIALFGSINLDIRSFALNAEIGMICYDSRIVTRLREVESDYLANARQLNLVEWQQRPAWRRSREGIARLADALM

SEQ ID NO: 99086 - DNA, 1404 bp, Xylella fastidiosa Ann-1
  CDS (1)..(1404): transl_table=11
atggaagggacttggctgtttgcattggattgggtgatccgtttggttgcgttgctttggatcccggcacgaaccacccctagtgctgcgcgcagctggttgttactgattggtttcgtccctgtgtttggcttgccactttacttggtgtttggccatccttggctgtcacgtaagcgtgtgttgcgtcaggcgttggcttctcatgtgatccgtgagtggcagcgtgggttgagtgcattgcgctggcagcctcaggagaatggcgtcgctgcggaattggtacctttggtggagcatcagggcgattttatgccaacacgtggtaacgccttggatctattggatgattaccaagcttcgctgcatttgttgatcaatgatattgattccgcgtgcgaacgtgtgcacttgctgtattacttgatgttcgatgatgcggtgggtgatgcggttgtggctgcattacagcgtgctgcggcgcgtggcgtttcttgccgattgctgctggatgcagtcggtgctaaacgcggtctacgtgcctatcagcagtgccttcgtgcccatggtgtggaggtgcacgctatgttgcctggtgggttgcgctggcgtcgcagtgggcgtatggatttgcgcaaccaccgtaagattgctgtgatcgacaatcgggtcgcttatatcggttcgcagaatttggcatacccagattttgtgccgcatttccccaaccgtgaattggtcgcacgcgtgtgcggccctgcggtaagtcatctggaggcggtgtttctcagtgattggtttgttgaaactggtcaacgtttggggatgcgtccagatgctcccatatgtgagcaaaatgttgcggcccagctagtggccagcggtccggcttacccgcacgagaatgcgcgtgatgcggtgaatacaatgatccatttggcacggcggcgtattgtcttgacgacgccgtacttcgtgcctgatgaggccacactcagtgcgttgcgtattgcaggcacgtctggagtagacgtgcagttgatcctgtccgagagtaataaccagtttctgatggcctgggctcaggaggcgtactttgaggagctgttgcgcgcaggaatcaaaattgcgttgtatcgtccccatttcctgcatgccaagcatctgagtgtggatgatgatattgcgttgttcggatcgattaatttggacatccgctcgttcgcgcttaacgctgagattggcatgatttgttacgactcacgtattgtgactcggttacgtgaggtggagagtgattatctggccaatgcgcgccagcttaatttggttgagtggcagcaacgtcccgcttggcgtcgtagccgtgagggtattgcacgcttggcagatgctctgatgtag

SEQ ID NO: 99087 - protein, 467 aa, Xylella fastidiosa Ann-1
MEGTWLFALDWVIRLVALLWIPARTTPSAARSWLLLIGFVPVFGLPLYLVFGHPWLSRKRVLRQALASHVIREWQRGLSALRWQPQENGVAAELVPLVEHQGDFMPTRGNALDLLDDYQASLHLLINDIDSACERVHLLYYLMFDDAVGDAVVAALQRAAARGVSCRLLLDAVGAKRGLRAYQQCLRAHGVEVHAMLPGGLRWRRSGRMDLRNHRKIAVIDNRVAYIGSQNLAYPDFVPHFPNRELVARVCGPAVSHLEAVFLSDWFVETGQRLGMRPDAPICEQNVAAQLVASGPAYPHENARDAVNTMIHLARRRIVLTTPYFVPDEATLSALRIAGTSGVDVQLILSESNNQFLMAWAQEAYFEELLRAGIKIALYRPHFLHAKHLSVDDDIALFGSINLDIRSFALNAEIGMICYDSRIVTRLREVESDYLANARQLNLVEWQQRPAWRRSREGIARLADALM

SEQ ID NO: 99088 - DNA, 1548 bp, Streptococcus suis 89/1591
  CDS (1)..(1548): transl_table=11
atggaaaaactttggaaaattatatatagtcggacatttattgtcattagtttgattattctaaccattttccttattctttggttggtaggttcggcagctacctatatgcctgctttattgattattttgcaaattttttcgatttttgtggctatttcaatcatcaatagaccgatgaataccagttttaagttaacctggattatttttgtcattggtattccgatttttggtgctctattctattttattttgcagtccaacattgaaaccaaacgttatcgtaaaaattttcataagcaagcacaaagacttcgggagtatagtaagacgtctgaaaaggtcatgaaggcattggagcaggaagataaggagcaactgaaattagctcacttcatgagtgagtacgttggctacccaattcataccaatacggatgccgtctatttttcaacaggtcaggaaaaatttgaagctctactagaagaattgaaaaaggcagagcagtatattttcatggagtactttattgtcgatatgggatatatgtgggattctatccttgacattttgaaggaaaaggcagcgcaaggggtggaagttcgttttatgtatgatgggatgaattcactgaccaatcttccctataattactataaaaccttgcgaaaatatgggataaaagccaaagtattttctcaaattatcccagccttatctacggtgcaaaataaccgtgaccatagaaaaattgcgattattgatggaaaggttgcctttaccggtggcattaatatcgcagatgaatacatcaacaagaaagtgcgttttggttactggaaagacgcagcgattatgattaggggagaagctgttgcaaactttacgttgatgttccttcaaatgtggaattacaatgaaaagacagagacagatgacctaaaatacctcaaaacgcataaagatttagagacggaaaccgttgatgccgaaggtttcttccttccgtatggcgagaatccatttgatggagatgaggtagccaaacgagtctgcctagacatgattcagtcggcaacggattatatttatatcatgacaccctacctagtgttggatgatgaaatgattgataatttgacttatgcagcgaagcgtggagtcgaggttcgcattctactaccgcatatctacgataaaaaatcagcctatttggctgctcgcactgattttccgacttacttggaagcaggaattgaaatctttgaattccagcctggatttgtccattccaaagttgttttggtcgatgataagaaagctactgttggtacggtgaatatggattttcgctctttttatcttaattttgaatgcggtctctatatttacaatcactcggcagttttggcagctattaaggatgactttactcattccttcaaaaaatcacagcaaattaaccttctaaccttccataaaacgtactcttggtataagcgtttgggaggagccctactacgaattatttcgccgttattataa

SEQ ID NO: 99089 - protein, 515 aa, Streptococcus suis 89/1591
MEKLWKIIYSRTFIVISLIILTIFLILWLVGSAATYMPALLIILQIFSIFVAISIINRPMNTSFKLTWIIFVIGIPIFGALFYFILQSNIETKRYRKNFHKQAQRLREYSKTSEKVMKALEQEDKEQLKLAHFMSEYVGYPIHTNTDAVYFSTGQEKFEALLEELKKAEQYIFMEYFIVDMGYMWDSILDILKEKAAQGVEVRFMYDGMNSLTNLPYNYYKTLRKYGIKAKVFSQIIPALSTVQNNRDHRKIAIIDGKVAFTGGINIADEYINKKVRFGYWKDAAIMIRGEAVANFTLMFLQMWNYNEKTETDDLKYLKTHKDLETETVDAEGFFLPYGENPFDGDEVAKRVCLDMIQSATDYIYIMTPYLVLDDEMIDNLTYAAKRGVEVRILLPHIYDKKSAYLAARTDFPTYLEAGIEIFEFQPGFVHSKVVLVDDKKATVGTVNMDFRSFYLNFECGLYIYNHSAVLAAIKDDFTHSFKKSQQINLLTFHKTYSWYKRLGGALLRIISPLL

SEQ ID NO: 99090 - DNA, 1452 bp, Croceibacter atlanticus HTCC2559
  CDS (1)..(1452): transl_table=11
atgcaatacatacaagataacatttggattattttattaatagtaaattatgctgtggctttggttacagcattttttgtcttgctgcataaccgtaatccttctaggacgttatcttatttcctaatattaattgtgttgccgtttgtaggcatctttgtctactatttttttggtcaagagtacagaaaggaaaaactgtttgataagaaaaaagttatgagtaactctattcttaaaaaatgggaaaagcgccttttagtagatgatacagatattgaaggagagaaaaatgatattatagaaaagcagtctaagcttataaaactcattcaaaacaaaccaagaaagccacttacatataataataaagtagaactgttaattaacggtaataacaccttcgatgctatttttgaagctttaagacaagctaaagatcatatacatttagagtactatatcttttctgcagataagatagggaaacaacttataaatatactttgcgacaaggctaatgaaggagtaagtgttaaagtcatgtatgattacgttggtaatcaattaaaatctccaaatgtagagcagttaaaaagctgtggtgtagaaatacacccatttatgccggtttggtttcctaacctaactagaaaactaaactatagggatcatagaaaaattacagttattgatggtgttgtaggttttttgggaggcgtaaatatttcagacgagtattgtaacgggcagaatgatgtatactggagagacacccatttaaaaattgaaggcgatgctgtaaagtccttacagtcacagtttctgttaaattggagttttgtgacagatcaagaaatagatatagaggagaaatactttccatctgtaaactttaaggcaaatttgccaatacagatcgttgctagtggtccagattcaagatggccatatattatggaagctatttttatggctataaataatgctcaaaaaagtataaaaattacaacaccatattttatacctaatgatcaaattcttacggctttaaaaacagcgagtagaagtggagtagatgtacagataataattcctaaagaaggcgattcttttgcagctaaatatgcaacctattcttatatagaagaacttttagaatctggaattagagtattctgttattgcaaaggtatggtgcatgccaaaaccattgttatcgacgagcaattaagcagtataggaacaagtaatatggactatagaagctttaatataaactttgagataaatgctttactcttcaatgatgactttggtaagcaaatgacagagatgtttgagagagatttggaagatacagaagagttaattcttgagcagtggcgtgacagagcactttcagaaaaacttaaagaatcatttaatcgtctttgggctccactcttataa

SEQ ID NO: 99091 - protein, 483 aa, Croceibacter atlanticus HTCC2559
MQYIQDNIWIILLIVNYAVALVTAFFVLLHNRNPSRTLSYFLILIVLPFVGIFVYYFFGQEYRKEKLFDKKKVMSNSILKKWEKRLLVDDTDIEGEKNDIIEKQSKLIKLIQNKPRKPLTYNNKVELLINGNNTFDAIFEALRQAKDHIHLEYYIFSADKIGKQLINILCDKANEGVSVKVMYDYVGNQLKSPNVEQLKSCGVEIHPFMPVWFPNLTRKLNYRDHRKITVIDGVVGFLGGVNISDEYCNGQNDVYWRDTHLKIEGDAVKSLQSQFLLNWSFVTDQEIDIEEKYFPSVNFKANLPIQIVASGPDSRWPYIMEAIFMAINNAQKSIKITTPYFIPNDQILTALKTASRSGVDVQIIIPKEGDSFAAKYATYSYIEELLESGIRVFCYCKGMVHAKTIVIDEQLSSIGTSNMDYRSFNINFEINALLFNDDFGKQMTEMFERDLEDTEELILEQWRDRALSEKLKESFNRLWAPLL

SEQ ID NO: 99092 - DNA, 1365 bp, Sulfitobacter sp. EE-36
  CDS (1)..(1365): transl_table=11
atgatcgaattcttcatcacccatatagaggtcgttggcgtcatccttttgaccctcggcgtggccttcatcctgcttcagcagcgccgcagcccacaatcaactgccgcctggatcctgtttctggtggtgatgccctatgtcgccgcgcccttgttcttggcgcttggctttcgcaaacagggcaaacgctacgagcctattatctttacccaaaaagaagacccgcaaacgcccgtgcatgcgctggacgagatgttccagagcttcaacctgccccccgcgctggaagcacagcgactgaacctgcatgatacaccgcaaaccgcctatgccgccgcgatggaggtgatcgagagcgcgacacagacgattgatgtgctgttctatatcgtctcggacgatgacaccggcaatcacgtggtcgacgccctgaccgaaaaagcccgcaacggcgtcaaggtgcgcctgctgatggaccggcttggcaccctgcgcggcccctccaaggcggtcaaggcgctgcgcaaggccggcggcgaagtgctgttcttttcgccgatcctgcaactgcccagcagtggccacctaaacctgcgcaatcatcgcaagatgatcatcgccgatcatgcccgtgttttttcaggcgggatgaacattggcgaacactatatgtcagaccacccgcacaccgatcattgggtcgatctggccttcacccttgaagggcaatcggtacagacattctgcgatgtcttccgctcggactgggaagtcgcctgcggtgaagacgtggatcatattaaaacgcctgcccctaccaccgcgggcaatgcgacggtgcagctgatcccctcgggccctgatattatcgaagacccgctgcacgacgggatcattcgcgcgctgcatctggcgaaaacccgtatctggatcgccaccccctatttcgtcccgaccgagccgctggccaatgcgctgcgcatcgcggcgctgcgcggcgtggatgtgcgtattctggtgccgcagaagtcgaaccagcatatcgcggacttcgcccgtggcggctatctgcgcgatgcgcataccgcgggggccaaggtcaaatattttgaacctgcgatgatccacgcgaaagccgcgctgattgacgatgtggggcttgtgggcacggcgaatttcgacgtgcgcagtatgcttttgaactttgaggcgatgttgttcgtttatgatgcacgcagcgtgtcaaccctgtcggactggttcacggcccgcgaagcagactgccacgagaatatgccaagcccgcatttgccccgccgtctggccgagggcgtctttcgcataggagcaccgatcttgtga

SEQ ID NO: 99093 - protein, 454 aa, Sulfitobacter sp. EE-36
MIEFFITHIEVVGVILLTLGVAFILLQQRRSPQSTAAWILFLVVMPYVAAPLFLALGFRKQGKRYEPIIFTQKEDPQTPVHALDEMFQSFNLPPALEAQRLNLHDTPQTAYAAAMEVIESATQTIDVLFYIVSDDDTGNHVVDALTEKARNGVKVRLLMDRLGTLRGPSKAVKALRKAGGEVLFFSPILQLPSSGHLNLRNHRKMIIADHARVFSGGMNIGEHYMSDHPHTDHWVDLAFTLEGQSVQTFCDVFRSDWEVACGEDVDHIKTPAPTTAGNATVQLIPSGPDIIEDPLHDGIIRALHLAKTRIWIATPYFVPTEPLANALRIAALRGVDVRILVPQKSNQHIADFARGGYLRDAHTAGAKVKYFEPAMIHAKAALIDDVGLVGTANFDVRSMLLNFEAMLFVYDARSVSTLSDWFTAREADCHENMPSPHLPRRLAEGVFRIGAPIL

SEQ ID NO: 99094 - DNA, 1452 bp, Photobacterium sp. SKA34
  CDS (1)..(1452): transl_table=11
atggaacaattttatcaagtcttaacgtggattggcgttttcgcctactggttactcatcgcatcggttacagttcgcgtcgtatttaaacgtcgcgttgttggagtatcgctagcgtggatgatgatcatttacatcgtacccatcggtggggtaattgcatatctattatttggtgaattaaatcttggtaaaaagcgagctgagcgtgcacgagaaatgtttttgccttttggtaattggtttaaacaactcaatgattgtccggggcatcaacctcagcaaatgagccttgttgctaagccgatcagtgagttatgtgaaaatcgattaggcatccccggactcattggtaatgacctatccttgcaatcatcaccacaagaaattttacgttcactggttaacgacataaaccatgcacaatattcaatccaccttgaattttatatctggaaccctggtggacttgcagatgaagtaggcgttgctttaattcaagccgctaaacgtgatgttaaagtccgcttattacttgattctgcaggtagtatgcgttttttccaatcgcattggcctaagttaatgcgcggtgctggcatcgaattagttgaagccttagcggtatcaccgtttaggatgttcttccgtcgccttgatttacgtctacaccgtaaaattgttgtcgttgatgatcatatcgcttacacaggctctatgaatttagtcgatccatcattttttaaagtcgatgcgggcgtgggtcaatgggtcgatgtcatggtgcgaatttcaggccctaccgtttcggttttaaattgtattcaagcatgggactgggaagtagaaacagggaaacgctttttacccccactgccttcctgtacctttgatacggcacacaaagacacggtacaagtcataccatcagggccaggtatgccagatgatattattcatcaagcgttgttactcagtatttaccaagcacaaaaatcagtcgttatcacaaccccttacttcgtaccgagtgaacatttacttcatgccatgaaaggagcagctgatcgtggtattgcagtacacattgttattccgcgtaaaaatgattcagttatggtggaatgggcaagccgatcattcttcagtgatttactggaatcaggagtacatatccatcgtttccacggcgggttgttacacacaaaatcggtggtgattgatgatagccattgcctaattggtactgtaaatcttgatatgcgaagcttatggcttaattttgaagtgacgatggctgtcgataatattgatttcacacaagagctaagtcaattacaacaaacctatattgctgattctgacgaaatcgatcgtgagcaatggagtaaacgatcaatgaagaacaaatttatcgagcgttttttctatatgtttagcccactgctttaa

SEQ ID NO: 99095 - protein, 483 aa, Photobacterium sp. SKA34
MEQFYQVLTWIGVFAYWLLIASVTVRVVFKRRVVGVSLAWMMIIYIVPIGGVIAYLLFGELNLGKKRAERAREMFLPFGNWFKQLNDCPGHQPQQMSLVAKPISELCENRLGIPGLIGNDLSLQSSPQEILRSLVNDINHAQYSIHLEFYIWNPGGLADEVGVALIQAAKRDVKVRLLLDSAGSMRFFQSHWPKLMRGAGIELVEALAVSPFRMFFRRLDLRLHRKIVVVDDHIAYTGSMNLVDPSFFKVDAGVGQWVDVMVRISGPTVSVLNCIQAWDWEVETGKRFLPPLPSCTFDTAHKDTVQVIPSGPGMPDDIIHQALLLSIYQAQKSVVITTPYFVPSEHLLHAMKGAADRGIAVHIVIPRKNDSVMVEWASRSFFSDLLESGVHIHRFHGGLLHTKSVVIDDSHCLIGTVNLDMRSLWLNFEVTMAVDNIDFTQELSQLQQTYIADSDEIDREQWSKRSMKNKFIERFFYMFSPLL

SEQ ID NO: 99096 - DNA, 1470 bp, Flavobacteria bacterium BBFL7
  CDS (1)..(1470): transl_table=11
atgttaaactgggttcttagtaattggtttttaagcttgctaatcataaattatgtggtagcattaagtgccgcattttttttaatccgcagtaaccagaatcctcgtaaaacagtttcttctttattatttttagtagccttgccatttttaggtctaggaatttattacttttttggtcttgagtatcgaaaatctaaaatatttaagcgcaaagacttgaatgcaaatgaacttattcaaaactggaataagcgtttacacatatcaaatgatgatctcgataagtatgaagagacatttcttatagatagacttaaaatggttaagcttttaaggcacaaccaggcagcgccacttacactgcgcaataatttagatatattgattaacggaagatcaaaatttgaccgagtttttaaagatgtcaagaatgctaaaaaccatattcatctcgagtattttatattaagtgatgaccacatcggtactgatgtgattaatgccctaatagatgctgcagaacgtggtattgaagttaaaattatttatgattctgtaggtagttctatttctaatgctactaaaaaaagaatgaccgcggccggtattgaatatgaggcttttatgccagtattgttttcaaaatttactcgtaaagcaaattatcgtgatcaccgtaaaatatttatcatagacggcagtataggatatataggtggtgtaaacataagcgatgattatgtgaacgaaccagtaaatcataatgggcaattctggcgcgacacacatttacgtattgaaggtcatgcggtaaaaagtcttcaagcacaatggttattaaattggtattttgtaaaaaggcaagatgaaaattatgaaataccatctagctattttccagagattgattgtccagaaaataaagcggttcagatagcggcaagtggtccagatacagactgggcaaatattatggaagctctatttatagctatcaatacagccgagaaaagcatttatattaccacaccatattttatccctaatgaggctattttaacgagcttaaaaagtgctgcacgtagtggagtagagattcatataatggttcctaaaaaaggagatagttgggctgctcgatatgcatcgcgatcttattttgaaggtttattagaaagcggtatttatgtgcattggtatcataaaggaatgctacacgcaaaaacgatggtcgtggatgatatgttttgtaccataggaacctctaacatggattaccgtagttttgatattaattttgagattaatgcattaatctatgacgaggaaatctctgtagaactgaatgatcaatttcaaaaagatcttgaggattgcgaagaggtgttactagatttgtggataaaaagagataaagtaaataagtttaaagagtctttttgtagattgtgggcacctttattataa

SEQ ID NO: 99097 - protein, 489 aa, Flavobacteria bacterium BBFL7
MLNWVLSNWFLSLLIINYVVALSAAFFLIRSNQNPRKTVSSLLFLVALPFLGLGIYYFFGLEYRKSKIFKRKDLNANELIQNWNKRLHISNDDLDKYEETFLIDRLKMVKLLRHNQAAPLTLRNNLDILINGRSKFDRVFKDVKNAKNHIHLEYFILSDDHIGTDVINALIDAAERGIEVKIIYDSVGSSISNATKKRMTAAGIEYEAFMPVLFSKFTRKANYRDHRKIFIIDGSIGYIGGVNISDDYVNEPVNHNGQFWRDTHLRIEGHAVKSLQAQWLLNWYFVKRQDENYEIPSSYFPEIDCPENKAVQIAASGPDTDWANIMEALFIAINTAEKSIYITTPYFIPNEAILTSLKSAARSGVEIHIMVPKKGDSWAARYASRSYFEGLLESGIYVHWYHKGMLHAKTMVVDDMFCTIGTSNMDYRSFDINFEINALIYDEEISVELNDQFQKDLEDCEEVLLDLWIKRDKVNKFKESFCRLWAPLL

SEQ ID NO: 99098 - DNA, 1530 bp, Desulfitobacterium hafniense DCB-2
  CDS (1)..(1530): transl_table=11
atgaaaaacttgccgatgctttaccgtgtgatctttatcgccttgcttctcctcctgcaaatctttgctctggttatgatcatctggagattcagcagttattttatttatttttataccgtttgcacatcgctcagcatcgttgctctgctttatatattgaacagcaaatctgaccccgcctataagattgcctgggttatcccaatccttatttttcctatctttggcgggctgttttatcttttatttggccgcaataaattaagcaagcgtaaaaagcgcgagatgaaagctgtcaatgaaaaaatgaatcagtccctcatcccgaatcaagccatccttcaggaacttgaggcgcaaaaccaccgtgcagctaatctttcacgttatatcgataaatattcctattgccctgtttatcaaaataccattactgaatatttacccctcggagagctgatgtatgagcgtttgctggaagagttaagaaaggccgaaaaattcatcttcctggaatacttcattattgatgaaggagtcatgtgggattctatcctggagattttagtggagaaagtccaacaaggtgtagatgtccgggttctttacgatgatgtaggcagtctcttcaagctgccctatggctatgaaaagaagctggaggagaaaggaattaagtgcagtgtctttaaccgtctgattcccgttctctccattcacatgaataaccgggatcatcgcaagatcgccgtgatcgatggaaaaacagcctttacaggcggaatcaatctggcggatgaatatattaatgcgtatgatcggtttggtcattggaaggatagcgctatactcatccaaggagaagctgtctggaatttcaccgtgatgttcttatctttatggaattatgagaccgagacggatgaagactacacccggtttaagttacctgtgcatgaggcggaagcctaccccagcgatgggttcgtccagccttttggggatagccccttggatgaagaaccgatgggcgaaaacgtctacctcactctcatcgttcaagctgaacgctatatctatattaacacaccctatcttatccttaataatgtaatgctttcagccctctgctctgccgctaagcgaagtgtcgatgtgcgcatcgtgactccttatcgcggggatcgttggtttgttcattccatgacccgttccaactacgaatttctggtggaaagcggcgtaaaaatctacgaatattcacccggctttatccatgccaaatccatcctgatcgatgacgtccacgctgtggtgggaaccatcaacatggactacaggagcctttacctgcacttcgaatgcggggtctacctctataacacccaaagtgtcctggccgtaaaagaagattatttagcaacgttaaccaaatgccagcaaattaccctggaagactgtcgtgctgtcagatggtaccgtagattagggcgtacaatcctccgtattttcgccccattgatgtag

SEQ ID NO: 99099 - protein, 509 aa, Desulfitobacterium hafniense DCB-2
MKNLPMLYRVIFIALLLLLQIFALVMIIWRFSSYFIYFYTVCTSLSIVALLYILNSKSDPAYKIAWVIPILIFPIFGGLFYLLFGRNKLSKRKKREMKAVNEKMNQSLIPNQAILQELEAQNHRAANLSRYIDKYSYCPVYQNTITEYLPLGELMYERLLEELRKAEKFIFLEYFIIDEGVMWDSILEILVEKVQQGVDVRVLYDDVGSLFKLPYGYEKKLEEKGIKCSVFNRLIPVLSIHMNNRDHRKIAVIDGKTAFTGGINLADEYINAYDRFGHWKDSAILIQGEAVWNFTVMFLSLWNYETETDEDYTRFKLPVHEAEAYPSDGFVQPFGDSPLDEEPMGENVYLTLIVQAERYIYINTPYLILNNVMLSALCSAAKRSVDVRIVTPYRGDRWFVHSMTRSNYEFLVESGVKIYEYSPGFIHAKSILIDDVHAVVGTINMDYRSLYLHFECGVYLYNTQSVLAVKEDYLATLTKCQQITLEDCRAVRWYRRLGRTILRIFAPLM

SEQ ID NO: 99100 - DNA, 1506 bp, Streptococcus pneumoniae TIGR4
  CDS (1)..(1506): transl_table=11
atgtccaagtatggctttagtctttcgattatgctacttgaactttgtcttgtttttggtctctttctttatttaggacgcatggctcccattttatggattactgtcctcattctactgagtatcatcacaatcatttcgatagtcaaccgtaatacgactcctgagaataaggtaacctggttgttagtagcctttgtgccagtatttggtcccttgctctatctgatgtttggtgaaaggcgattgtccaaaaaagaaatcaaacaactgaagaagctaggctctatgcatttccaagaagcaaatagccagctactaaaagagaaattaaaagaaagtgacaaggcagcttatggagtcatcaagtccttattgagtatggataccaatgctgacatctatgatcaaactgcctctacattttttcctaacggagaagctatgtggaaaaagatggtagaagatcttaaaaaggctgagaaatttattttcttggaatattacattatagaagaaggtttgatgtggaatcgcatactagatatactagagcaaaaggtagctcagggtgtagaggttaagatgctctatgatgatatcggctgtatggctactttaacaggagattatgcacatcgacttcgtcagctgggcatcgaggcccataaattcaataaagttattcctcgtttgacagtggcttataataacagagatcatagaaaaatattgattgttgatggtcagatagcctatactggtggggtcaatctggcagatgagtacattaaccacgtcgagagatttggttattggaaggatagtggaattcgcttagacggactagcagtaaaagctctgacacgcttatttttgaccacttggtacattaatcgaggagaaattagtgattttgatcaatatcatttagaaaatcattctatcccgagtgacggtttaaccattccatacggaagtggacccaagccaatttttcgagcgcaggtagggaaaaaagtttatcagagtttaatcaatcaagcaacagaatcggtctatattacgacaccttatttgattatagattatgatttaacagagacaatcaaaaatgcagctatgagaggggtcgatgttcgaattatcaccccttacataccagataagaagttcattcagttagtcacgagaggagcttatcccgaccttctttctgctggtgttcggatttatgagtatagtccaggttttattcatagtaagcagatgttggtagacgaagattttgcggtggtggggacaatcaatctcgactaccggagcttggtacaccattatgaaaatgcagtcttactctataaaactccttctataagggaaatcgcccgagattttcgaaatatatttgcagattctcaggaagtctatcctcattctatcaaaacgagctggtatcaaaagcttgtaaaagaaatcgcccagctattcgcccctatcttataa

SEQ ID NO: 99101 - protein, 501 aa, Streptococcus pneumoniae TIGR4
MSKYGFSLSIMLLELCLVFGLFLYLGRMAPILWITVLILLSIITIISIVNRNTTPENKVTWLLVAFVPVFGPLLYLMFGERRLSKKEIKQLKKLGSMHFQEANSQLLKEKLKESDKAAYGVIKSLLSMDTNADIYDQTASTFFPNGEAMWKKMVEDLKKAEKFIFLEYYIIEEGLMWNRILDILEQKVAQGVEVKMLYDDIGCMATLTGDYAHRLRQLGIEAHKFNKVIPRLTVAYNNRDHRKILIVDGQIAYTGGVNLADEYINHVERFGYWKDSGIRLDGLAVKALTRLFLTTWYINRGEISDFDQYHLENHSIPSDGLTIPYGSGPKPIFRAQVGKKVYQSLINQATESVYITTPYLIIDYDLTETIKNAAMRGVDVRIITPYIPDKKFIQLVTRGAYPDLLSAGVRIYEYSPGFIHSKQMLVDEDFAVVGTINLDYRSLVHHYENAVLLYKTPSIREIARDFRNIFADSQEVYPHSIKTSWYQKLVKEIAQLFAPIL

SEQ ID NO: 99102 - DNA, 1455 bp, Vibrio sp. Ex25
  CDS (1)..(1455): transl_table=11
atggacaagttttatcactttcttactttagctggcatcgggctatattggttactggtcgcaggtgtgaccattcgtgtcgttttaaagcgccgtgcagtgagcgtgtctttagcttggctaatgatcatttatatccttcccgttctgggtgtcgcgtgttatttcctcttcggtgaactgaacttaggcagaaaacgggccgaacgcgcaaaagagatgtttacaccattcgagaagtggttcagtcagttgaacgactgtaacgcgcacaacccagaaacgatgggaaggcacatctaccgaattgatgaactttgtaacaaccgccttggtcttcccgcattgagcggtaatacattgtcgctgcaacagtcacctaatgagattttgcattccattattgaagacatcgaaaacgcgcagagcagtattcgaatggtattctacatttggcatccaggtggtttggctgactctgtcgcttctgcacttatccaagcggctaaacgcggcgtagatgtcaaactattgctcgattcagcaggtagtccacgttttttcagaagtccttggtatcgaatgatgcaggatgctggaattgaagttattcaagcgctagaagtgaagatgtggcgtattttcttacgtcgtcttgatcttcgccaacatcgcaagatcatcgtaattgatgatgaaattgcttatacaggttcaatgaacttggttgacccggcttacttcaaacaaaacagtggcgtcgggcattgggtggacatcatggttcgcattacgggaccaacggtaaacgtattgagtgctatccactgttgggattgggaagtcgaaactggcgaacgtcatttaccgagactacctgaatgcaagatcgatgagagtgaattccaacaccctattcaggttgtgccttctggccctggtatgccggaatatctgatctatcaagtattaacattggcaatcaaccaagccaatcgctcggtacgaattacaacgccatatttcgtgcccaatgcagacttacttgaaacgttaaagatgacagcacaacgaggcattgatgttgaactcattattccacataaaaatgactcgatgatggtgcaatgggcgtcacgcgcgttttatagtgagcttttgtgtgcaggagtcaaaatctatgagttttatggtggtttgctgcatacgaaatccgtcgtaattgacgaccaattctgtttagttggcaccgtaaacatggatatgcgcagcttgtggctgaacttcgaagttaccctcgccgttgacgacgaagagttcacaaagcaaatgtcttggttacaagatagctatattaagcaatctcacactgttgtattggaagaatgggagaaaagaagcctattttctcgattcttagagcgagtgttctatctcttcaatccactcctctaa

SEQ ID NO: 99103 - protein, 484 aa, Vibrio sp. Ex25
MDKFYHFLTLAGIGLYWLLVAGVTIRVVLKRRAVSVSLAWLMIIYILPVLGVACYFLFGELNLGRKRAERAKEMFTPFEKWFSQLNDCNAHNPETMGRHIYRIDELCNNRLGLPALSGNTLSLQQSPNEILHSIIEDIENAQSSIRMVFYIWHPGGLADSVASALIQAAKRGVDVKLLLDSAGSPRFFRSPWYRMMQDAGIEVIQALEVKMWRIFLRRLDLRQHRKIIVIDDEIAYTGSMNLVDPAYFKQNSGVGHWVDIMVRITGPTVNVLSAIHCWDWEVETGERHLPRLPECKIDESEFQHPIQVVPSGPGMPEYLIYQVLTLAINQANRSVRITTPYFVPNADLLETLKMTAQRGIDVELIIPHKNDSMMVQWASRAFYSELLCAGVKIYEFYGGLLHTKSVVIDDQFCLVGTVNMDMRSLWLNFEVTLAVDDEEFTKQMSWLQDSYIKQSHTVVLEEWEKRSLFSRFLERVFYLFNPLL

SEQ ID NO: 99104 - DNA, 1443 bp, Candidatus Desulfococcus oleovorans Hxd3
  CDS (1)..(1443): transl_table=11
atggtaccgtgggacacgattcttatcgttgcgctgtacatctatatcgctgttaccatcgtttatctgcttttagacaaccgggaaaccgcttccaccctctcatggctgctggtttttatctttctccccgttctgggattggtggtctattttcttgtcggccggggcatgcgcaaaaaaaccacccgcaccctggtgcgccaggacctggagacccggctccaggacagccacgaaagcctggtcacccagcagaaagacgaagcggacgcccttcatgtccgttacccctcgccggaaacccgcaagctgatccgcctgcttgatcgcaactccgactccattctgacccggcacaacgaactttcggtctttttcaacggccaggaaaaatttgaggtgctgttcaatgacctgatgcgggcccgtcactatattcacatggagtattttatctggaaggccgatgaccttactgaaatggtggtggccgtactcaaggagaaggcggtccagggcgtggccgtgcgggtgctttatgacgcggtgggaaactatctttcaggccggtacctgcggcggctgcgccgggccggcatccagatttatccctattataattttgtctcccccctcaagatccacaccctgaactaccggaaccaccggaaagtggtggttatcgacggagaaaccgggtacctgggcggcatgaacatgggccaggaatatgtggacgggggaaaacggtttccggtatggcgggatacccacattcgtatccagggcgaagccgtggctgttctggaggaggtgtttgccgtgagctggttcaacaccaccggtgaaaccattgacgtcaaggcgtttgtgccccagccgccgcctgacattacccacattcagatcaccacctccggccccgactcccagtggcactccatcaaacaggtctattttctgctgatctcatcggcggaaaactcggtgtttattcagactccctatttcattcctgatgccagcattctcatggccctgaaaaccgcggcattaagtggcattgatgtccgcatcatgctcaccggcatgctggacaagcgggttccctactgggcggcgttgacctacattgaggagctgctgcaggcaggggtccgtttttattactacaccgaagggttcatgcacgccaaaaccatcgtggtggactccctttgctgctccgttggaacggccaatatggatattcgcagttttgagctgaattacgagatcaatgccctgatctatgacgcaaacgtggcaaaggtgtttgaggccatgttcaggaaggacctggccgcggcccgggagttcacgctggaagactatagccgtatgagccgcctcaaaaagtttcgcaactccctggcccgtctgtttgcgcctctgttgtaa

SEQ ID NO: 99105 - protein, 480 aa, Candidatus Desulfococcus oleovorans Hxd3
MVPWDTILIVALYIYIAVTIVYLLLDNRETASTLSWLLVFIFLPVLGLVVYFLVGRGMRKKTTRTLVRQDLETRLQDSHESLVTQQKDEADALHVRYPSPETRKLIRLLDRNSDSILTRHNELSVFFNGQEKFEVLFNDLMRARHYIHMEYFIWKADDLTEMVVAVLKEKAVQGVAVRVLYDAVGNYLSGRYLRRLRRAGIQIYPYYNFVSPLKIHTLNYRNHRKVVVIDGETGYLGGMNMGQEYVDGGKRFPVWRDTHIRIQGEAVAVLEEVFAVSWFNTTGETIDVKAFVPQPPPDITHIQITTSGPDSQWHSIKQVYFLLISSAENSVFIQTPYFIPDASILMALKTAALSGIDVRIMLTGMLDKRVPYWAALTYIEELLQAGVRFYYYTEGFMHAKTIVVDSLCCSVGTANMDIRSFELNYEINALIYDANVAKVFEAMFRKDLAAAREFTLEDYSRMSRLKKFRNSLARLFAPLL

SEQ ID NO: 99106 - DNA, 1440 bp, Pseudomonas putida GB-1
  CDS (1)..(1440): transl_table=11
atggattaccacagcccctacttctttggttacctactcggcctgatacatctgctgggtatcgtagccgcactgcacgcggtgttcaccgtgcggactgcccaaggcgcgattgcctgggccatgcccttgttcttcatcccctacctcaccttgattccctatctggtcttcggtgcccgatcgttctatgcctacatcaaggcgcggcgccaggccaaccacgaaatgcacgtggccatggccaacctcaactggcggccctgggttgaggaagcccttactgcccgtgagtcggaaagctacgcagccttgcgcgccatgcccaagctgagtcgcatgccatgcctggcaaacaaccaggtgaaactgctgatcaatggccaggccacatttgatgccattttcgctgccatcgagaaagcccgcgatgtggtgctggtgcagttcttcatcattcatgacgacacccttggcaaagcgctgcagcaactgttgttacgcaaggccgccgaaggggtgcaggtgttcgtgctctacgaccgtgtcggcagccacgccttgccggccagttacagccaggtgctgcgtgacggtggtgtgcagatccatgccttcgccacccgccgcggctggttcaatcgtttccaggtcaacttccgcaaccatcgcaagatcgtggtggtggatggcctggtcggtttcatcggcgggcacaacgtgggtgacgagtacctgggtaagcacccgcagctttcaccctggcgcgacacccatgtgcagattagcgggccggtgctggcctgcctgcaagagtcgttcgccgaagactggtactgggccacgcgccagctaccgccactgatcctgccagatgcctacccggacaacggtgtcctgtgccaggccttggccagcggcccggcagacccacaggaaacctgctcgctgttcttccttgaagcaattcactccgccacccgcagagtgtggatcaccagcccttacttcattcctgacgaggccgtgttcgccgccttgcgcctggcggtgttgcgaggggtcgatgtgcgcgtgctgattccatcacggccggaccaccgcattgtctatgccgcctccagcctgttcgcctttgaagcggtacgcgcaggggtgcgcgtgttccgttaccagccagggttcctgcatcagaaggtggtgttggtggatgacgacgtcagtgcgattggcagtgccaacctggacaaccgctcgttccgcctgaacttcgaaattaccctgctgacagtcgaccgcagcttcgccgaccaggtcgagcacatgctgaacgatgactttgaacaggcacgggagattactgcagaggacagccgcgatacgcatcgactgcaacaactggggatgcgcattgcgcggctgatttcaccgattctctaa

SEQ ID NO: 99107 - protein, 479 aa, Pseudomonas putida GB-1
MDYHSPYFFGYLLGLIHLLGIVAALHAVFTVRTAQGAIAWAMPLFFIPYLTLIPYLVFGARSFYAYIKARRQANHEMHVAMANLNWRPWVEEALTARESESYAALRAMPKLSRMPCLANNQVKLLINGQATFDAIFAAIEKARDVVLVQFFIIHDDTLGKALQQLLLRKAAEGVQVFVLYDRVGSHALPASYSQVLRDGGVQIHAFATRRGWFNRFQVNFRNHRKIVVVDGLVGFIGGHNVGDEYLGKHPQLSPWRDTHVQISGPVLACLQESFAEDWYWATRQLPPLILPDAYPDNGVLCQALASGPADPQETCSLFFLEAIHSATRRVWITSPYFIPDEAVFAALRLAVLRGVDVRVLIPSRPDHRIVYAASSLFAFEAVRAGVRVFRYQPGFLHQKVVLVDDDVSAIGSANLDNRSFRLNFEITLLTVDRSFADQVEHMLNDDFEQAREITAEDSRDTHRLQQLGMRIARLISPIL

SEQ ID NO: 99108 - DNA, 1431 bp, Marinobacter sp. ELB17
  CDS (1)..(1431): transl_table=11
atgcccgaattctcactgatcgccgttattgttgctctggtgtatgtggcatctctggtttgcatctaccggatcctgatgacttatcgcacggcacagggagctttggcatgggttttcgccttgctggcactgccgtggattacgctgccattgttcttgcttattgggcgttcgcgctttggtgggtacgttaaagcgcgacgcatgggcgacgaggcactgaccaatctgctgaatcggtttgaacagcaagaaacctcgttacgctcaccagcgcacgaacatttcagcgacgaacttcaggtactcagcaagctggcacgccagccgtttaccgacggcaatcacagcactttactacgcgacggcgaagcgactttcgacgccctgtttgactgcatggaaaatgcccagcactacatcctgctggagttctacattgtgcgctctgaccgtgttgggcagcgcataaagtccattctggaacgcaagctagcggaaggagtggaggtgtggtttttgcacgacaatattggcagctttggcttgcctcgcaaatacatcagggaactgacacaagccggcgcccactccgccgcctttggcgatggcaacgtgcgccgctggcgctttcagatgaattttcgcaatcaccgcaaaattttggtgtgtgatggcaaagtaggctttgttggcggtattaatctggcagacgagtatctgggcgcagccatggaccaggaaccctggcgcgacacccactgccgtattgaaggccccgcggtaaccgggttacaactggcttggttagaagactggaactgggccagcggcacctttccagagctgaactgggcaccccatcacaataccccgggtaacgagcgaattctgattctgcctaccggacccgccgacagctgggaaagctgtacgctgtttttcctcaactgcgtcaacaacgcccgcgagcgagtgtggattgcatcaccctattttgtgcccgatgttcaagtgatgaacgcgttgcagttggcggcgttgagagggatagacgtcagaattttgattccggcaaaatccgacagccgcatcattggcctggcggcctattcctatctggtacaggcctgccaggccggcattcagatttatcgctatcagcccggcttcatgcaccagaaggtgattctggtggacgaccgctacaccgcggtcggcacggccaatctggacaaccgctccatgcgcctgaatttcgaaattacggcaatcagcacatcaggcaagtttgtagaggaagtggacgcgatgctgaccgaggacttcaaacagtcccacttgatggacgagcgagattatcgcgaccgttccttggcgtttcgcattacctgccgcgccatacgcctggccgcaccgctgctgtaa

SEQ ID NO: 99109 - protein, 476 aa, Marinobacter sp. ELB17
MPEFSLIAVIVALVYVASLVCIYRILMTYRTAQGALAWVFALLALPWITLPLFLLIGRSRFGGYVKARRMGDEALTNLLNRFEQQETSLRSPAHEHFSDELQVLSKLARQPFTDGNHSTLLRDGEATFDALFDCMENAQHYILLEFYIVRSDRVGQRIKSILERKLAEGVEVWFLHDNIGSFGLPRKYIRELTQAGAHSAAFGDGNVRRWRFQMNFRNHRKILVCDGKVGFVGGINLADEYLGAAMDQEPWRDTHCRIEGPAVTGLQLAWLEDWNWASGTFPELNWAPHHNTPGNERILILPTGPADSWESCTLFFLNCVNNARERVWIASPYFVPDVQVMNALQLAALRGIDVRILIPAKSDSRIIGLAAYSYLVQACQAGIQIYRYQPGFMHQKVILVDDRYTAVGTANLDNRSMRLNFEITAISTSGKFVEEVDAMLTEDFKQSHLMDERDYRDRSLAFRITCRAIRLAAPLL

SEQ ID NO: 99110 - DNA, 1494 bp, Bacillus cereus
  CDS (1)..(1494): transl_table=11
ttggagtggattttttatctatacctgttaaatacgttctttatcttattcatagcaatttgggaagttcgtcggcctgccaaggctttgaattggataataatcgtcctttttttacctgtcattggtttctggctatatcttagcatatcaaaccctaagtttattcatcgaaaaagattgacctgttctaaaaatgaatctaacaaattacctgagacattcggtgcttcagcatcggtaattgccaatgctttacggcatttcactgtgaatgggcttcgaatgggccaagtccaagtgtttaacaatgggatagcaaaatatgatcaactccttgtatccctgcaaaaagcccaagaaaccattgatctggaatatttcatctatcggaacgaccaaattggtaatcgaatcacagaactgctaatcgaaaaagcattaaatggagtgcaggttcgttttatgagagatagcttggggagttataaattcccgcgtgaaaaaatccggcagatggttgaagcagggatagaatgcaggacaatatttcctctgcgatttccctggattttgtccaattggaattatcgggatcattgtaagattgtgacgattgacagaaaggaatcctttactggcggtatgaacgttgggtatgaatatacaggattaaagccagacgtaggattttggagggacactcatttgcaaattataggggaagcaacaggcgacttgcagactgtttttgatgttcattgggaaatcgctgtgccggaaaggataaaatcaaaaacaaatttgaaaacaaaatcagaggtaacgaaaatcaattcaatcggcagagcagatcattccaaatggtcagccgaattgggatcagagttgagcacccttgatgataaaaaaatggacatatccggaaaaactaggacattgcataaagcgtatatccatacgttggaaggaaaccctggaattcctaccccagtcattcggcaagcttactttatatgtataacacaggcgaccaagactattgatttaacaacaccctattttgtaccagaaacggatattatcatggcattaaagacagcagtaactcgtggtgtccgtgtaagattgctggttcctcgccacaataatcaaaaaatcgtgggtcttgcaagccgtacttattacggagaacttatagaagctggagttcaaatctaccagtacgacaaaggaatgatacatgcgaaggtgttgaccatcgatgaggagattgctgccgtaggctcagcaaactatgatatgagaagttttcgcctgaattatgaggtgtgtcaagtcgtgtacagtgctgatgtgacaagggaactcacagagcagttcgagagggatcttactgattctgtaccattaagaattgaagacttggtgcaacgatccctgaccgagcgcattgttgaacagggtgctcgcgtgctttctccattattataa

SEQ ID NO: 99111 - protein, 497 aa, Bacillus cereus
MEWIFYLYLLNTFFILFIAIWEVRRPAKALNWIIIVLFLPVIGFWLYLSISNPKFIHRKRLTCSKNESNKLPETFGASASVIANALRHFTVNGLRMGQVQVFNNGIAKYDQLLVSLQKAQETIDLEYFIYRNDQIGNRITELLIEKALNGVQVRFMRDSLGSYKFPREKIRQMVEAGIECRTIFPLRFPWILSNWNYRDHCKIVTIDRKESFTGGMNVGYEYTGLKPDVGFWRDTHLQIIGEATGDLQTVFDVHWEIAVPERIKSKTNLKTKSEVTKINSIGRADHSKWSAELGSELSTLDDKKMDISGKTRTLHKAYIHTLEGNPGIPTPVIRQAYFICITQATKTIDLTTPYFVPETDIIMALKTAVTRGVRVRLLVPRHNNQKIVGLASRTYYGELIEAGVQIYQYDKGMIHAKVLTIDEEIAAVGSANYDMRSFRLNYEVCQVVYSADVTRELTEQFERDLTDSVPLRIEDLVQRSLTERIVEQGARVLSPLL

SEQ ID NO: 99112 - DNA, 1539 bp, Spiroplasma citri
  CDS (1)..(1539): transl_table=4
atgaaaaattgattaaaaattattttatcaatgatttttttatttggtatggcgattatgggattacttgttgtcgttgttattttcaatgttaaattcttatatatttttttaggaattcttattattgatttaattttctcattctttttctttttttccaaacgacgttatgaagttaaattttcttgaattatttttattaattttgtgccatttattggtttatgttcatatgttttttttggacgaaaatatcactattcaaataaaaaatcattattgtacaatcatttaaataagttagaatatgatacttattataaaaaaaataaaacatgtttaataaaatatactgctcctaatcaaaaatttgggaatgttgttgaattattaatgcgacatgcaaataaaccattatatcaaaataataaaattaaaataatcacaaatgggacacgtgtttttaaatcattattaacagatttacaacaagcacaagaatatattttattaacttattttattattgctgatggtgaactatttgaatcttttttagcagttttaaaagagcgaattgctgctggtgtccgagtttatatgatttatgaccatgttggtagttattttaaaattagtaaaaagagtattaaaaaattagttaaagctggtattcgggttcataaatatttgccaattatcacaccttttattagtgggaatgctaattatcgtaatcatcgtaaagatgttattattgatggtttgattggttatactggtggaattaatctagccgatttatatgctgataaatcatgaaaatttggaatttttcatgatacacaagtgcgaattgaaggtgaagcggttcgagctttagaagtgatttttgctgatgactgattttttgcaactaaacgacatgaaataatcacagatttagagccagctattttagcaccaaaacaatataatgttaagggtaagtcacatttacaaattgttaatcatagccctagtattgatcattcaattacgaaagatttatatatttcattaattaacaaagctcgaaaacgagtttgattatcaacgccttattttattccaccagatgatcttattcaagctttggttcttgcagcacgcgctggagttgatgttcgtttaacaattccaggtttgacggataaaatttttgttttagatataacaaaaagttattgtaaacctttacttgccagtggtgttaaaatttatgaaatgaataatacttttagtcataataaaattgctatttttgatgatgatattgctgtgattgggacttgcaatttggattatcgtagtttcttttctgatcatcaaacaacagcagttatttatgatccagaagtagtggcaagctttattccacgttgggaatgagattatgaacattcaattttatgacatgaatgaccaattaaatataaacctttaagctatcggttgttgttaacatgtttaaaattagtagcaccaattttataa

SEQ ID NO: 99113 - protein, 512 aa, Spiroplasma citri
MKNWLKIILSMIFLFGMAIMGLLVVVVIFNVKFLYIFLGILIIDLIFSFFFFFSKRRYEVKFSWIIFINFVPFIGLCSYVFFGRKYHYSNKKSLLYNHLNKLEYDTYYKKNKTCLIKYTAPNQKFGNVVELLMRHANKPLYQNNKIKIITNGTRVFKSLLTDLQQAQEYILLTYFIIADGELFESFLAVLKERIAAGVRVYMIYDHVGSYFKISKKSIKKLVKAGIRVHKYLPIITPFISGNANYRNHRKDVIIDGLIGYTGGINLADLYADKSWKFGIFHDTQVRIEGEAVRALEVIFADDWFFATKRHEIITDLEPAILAPKQYNVKGKSHLQIVNHSPSIDHSITKDLYISLINKARKRVWLSTPYFIPPDDLIQALVLAARAGVDVRLTIPGLTDKIFVLDITKSYCKPLLASGVKIYEMNNTFSHNKIAIFDDDIAVIGTCNLDYRSFFSDHQTTAVIYDPEVVASFIPRWEWDYEHSILWHEWPIKYKPLSYRLLLTCLKLVAPIL

SEQ ID NO: 99114 - DNA, 1440 bp, Pseudomonas putida
  CDS (1)..(1440): transl_table=11
  misc_feature (923)..(923): n is a, g, c or t
atggattaccacagcccctacttctttggttacctactcggcctgatccatctgctgggtatagtcgccgcactgcatgcgctgttcaccgtgcggacagctcagggtgccattgcgtgggcgatgcccttgctcttcatcccctacctcaccttgatcccctacctgatcttcggcgcccgctcgttctacgcctacatcaaggctcggcgtcaggccaaccaggaaatgcacgtggccatggccaacctcaactggcgaccttgggttgaagaagcccttaccgcccgcgagtccgaaagctacgccgcgttgcgagcgatgcccaagctgggtcgcatgccatgcctggcaaataaccaggtaaaactgctgatcaatggcaaggccaccttcgatgccatcttcgcagccatcgaaaaagcacgcgatgtggtattggtgcagttcttcatcattcatgacgacaccctcggcaaggcactgcagcaacttttgctacgcaaagccgccgaaggcgtgcaggtgttcgtgctgtacgaccgtgtcggcagccacgccttgccggccagctacagccagatcctgcgtgacggcggcgtgcagatccatgcattcgccccccgtcgcggctggttcaaccgcttccaggtgaacttccgcaaccatcgcaagattgtggtggtggatggcttgctcggcttcattggcggtcacaacgtgggagacgagtatttgggtgaacacccacagctttcaccctggcgtgacacccacgtacagatcagcgggccggtactggcctgcctgcaagagtcgttcgccgaggactggtattgggccacgcgccagctaccgccgctgatcctgcccgatacgtacccggacaacggagtgctgtgtcaggccttggccagcggccnggcagacccacaagaaacctgctcgctgttcttccttgaggcgattcattcggccacccgcagggtgtggatcaccagcccctacttcatccctgacgaggccgtgttcgccgccttgcggctggcggtactacgaggagtcgatgtgcgggtgctcatcccgtcacggccggaccaccgcatcgtctacgccgcctccagcctgtttgccttcgaagcggtgcgcgcgggggtacgtatgttccgttaccaacccgggtttctgcatcagaaggtggtgctggtggatgatgacgtcagcgcgattgggagtgccaacctggacaaccgctcgttccgtctgaacttcgagattaccctgctgacagtcgatcgcggcttcgccgaccaggtcgagcacatgctccacgaagacttcgaacacgcacgggaaattactgcagaagacacccaagacacccatcgactacagcagttggggatgcggattgcgcggctgatatcgccgattctttaa

SEQ ID NO: 99115 - protein, 479 aa, Pseudomonas putida
  misc_feature (308)..(308): The Xaa at location 308 stands for Arg, Gln, Leu, or Pro.
MDYHSPYFFGYLLGLIHLLGIVAALHALFTVRTAQGAIAWAMPLLFIPYLTLIPYLIFGARSFYAYIKARRQANQEMHVAMANLNWRPWVEEALTARESESYAALRAMPKLGRMPCLANNQVKLLINGKATFDAIFAAIEKARDVVLVQFFIIHDDTLGKALQQLLLRKAAEGVQVFVLYDRVGSHALPASYSQILRDGGVQIHAFAPRRGWFNRFQVNFRNHRKIVVVDGLLGFIGGHNVGDEYLGEHPQLSPWRDTHVQISGPVLACLQESFAEDWYWATRQLPPLILPDTYPDNGVLCQALASGXADPQETCSLFFLEAIHSATRRVWITSPYFIPDEAVFAALRLAVLRGVDVRVLIPSRPDHRIVYAASSLFAFEAVRAGVRMFRYQPGFLHQKVVLVDDDVSAIGSANLDNRSFRLNFEITLLTVDRGFADQVEHMLHEDFEHAREITAEDTQDTHRLQQLGMRIARLISPIL

SEQ ID NO: 99116 - DNA, 1428 bp, Lactobacillus reuteri
  CDS (1)..(1428): transl_table=11
atggcattaacatggacaattatttggtggtgtttgctactggttattctcgtcaatgaaattgcggccatttatactgttttccgtgaaaagcgggatattgctgcaacttgggcatggttattggtgctaacgctgattcctggttttggctttatattatatgcattctttggacgaaaattaccacataaacaattagcccgaataaaatcccaaacgcaactaaaattaaaacaagcactagaaaggcagaagcaacaattcatcaatatgccgaagcctaaagatcaaatcgtccagatttatcggcggaccatcatgctttttcaaagtattgatgactcatttttaacgcggcacaatgccgttaatatttttacaaatggtaatgcgctttttaagaaaatgtttgatgatattgcagcagcaaaaaagagtatccatattgagttttatacaatttataatgatcaaattggtaatgaattacggacgttacttgaacaaaaggccgctgagggagtaaaagtgcgagttctctacgattcatgggggtcgatgggagtctggccaagtttttatgatcatttacgtgaagtcggtggttatgcggccccgttcctgatgtcgcgaagtaacttctttgattttcggataaactaccgtgaccaccggaaaatcgttgttattgatggtgagattgggtatgttggtggttttaatgttggcgatcaatacctaggacgcgttcctaaatttggtccatggcgtgatacccaccttcgaattgtcggtggtggtgtttatggtcttcagcgacggtttatcggcgactggaatgcatcaatgaaaaaggatgaagataagattgtgcattaccatccttactttcaaccaattagagttcatggggacgttgcattgcagactgtctctagtggtcctgaagcgccattggaaaaaattaaaatggggtacttacgtctaattaatgcagcgcaggaccatatttggatccaaactccctatctgatccccgacgatagtatattggatgcgttaaaagtggcagctcattcaggaatcgatgtacggataatgattccttcaatgccagatcatgcttttgtatatcgggcaacgcagtattatgctcgtgagctcgctaatcatggtgtaacaatttattactatcaaaaaggtttccttcatgccaaaacaatgatgattgatggtcggatggcttctgttggatctgctaaccttgactttcggagttttaaattaaacttcgaaattaatgcctttatttacaatcaaaatacggtagacgatcttgagcgaatttttgttaatgatattcgtaactgtgcgggtgattacaccagcaatgtttgcagagcaaccacgctggttgaagtttaa

SEQ ID NO: 99117 - protein, 475 aa, Lactobacillus reuteri
MALTWTIIWWCLLLVILVNEIAAIYTVFREKRDIAATWAWLLVLTLIPGFGFILYAFFGRKLPHKQLARIKSQTQLKLKQALERQKQQFINMPKPKDQIVQIYRRTIMLFQSIDDSFLTRHNAVNIFTNGNALFKKMFDDIAAAKKSIHIEFYTIYNDQIGNELRTLLEQKAAEGVKVRVLYDSWGSMGVWPSFYDHLREVGGYAAPFLMSRSNFFDFRINYRDHRKIVVIDGEIGYVGGFNVGDQYLGRVPKFGPWRDTHLRIVGGGVYGLQRRFIGDWNASMKKDEDKIVHYHPYFQPIRVHGDVALQTVSSGPEAPLEKIKMGYLRLINAAQDHIWIQTPYLIPDDSILDALKVAAHSGIDVRIMIPSMPDHAFVYRATQYYARELANHGVTIYYYQKGFLHAKTMMIDGRMASVGSANLDFRSFKLNFEINAFIYNQNTVDDLERIFVNDIRNCAGDYTSNVCRATTLVEV

SEQ ID NO: 99118 - DNA, 1515 bp, Listeria monocytogenes
  CDS (1)..(1515): transl_table=11
atgcgcaaactgattcaatttctgtttatagcagtagttttatttttagtggaatatgttttaatcaatcaagcagctatattattcttagtaacaagtgggattatccaactatgcggggttattatcgccattcgactactcctatttgaccaacggaatactagctcaaaagtcgcctgggttgcggttatttttattttgcctgtactcggaacgattagttaccttgtgttcggtagaaatccagcaactagaaaattcagcacagctcaagtaaaggaaaaaacaaaattaattaatgcgattcatgcaattccaaacaacactaatgaaaaattgccacgactatcaaaaagaatagcgcatttaacgtccatagagccaatcaaggggaataaaatcgaaatattaacaaatggtgaggaaacttttccagtgctcctagacgcgcttagaaaggctgaaaaccacattcacattcaatattacattttcaaaacggatgcgatttctactgaaattcgtgatattttggtggaaaaggcgaaatctggtgttgaggttagatttatgtttgatggtctcggatcaagcaaactgggtaaagcctttttagctcctttgaaagaggctggagttagtattcacgcatttgatccaattgcctccccctggattgtaagaacagccaatttaagaaatcaccgtaaaatcgtggtgattgatggccaaattggctttacaggtgggcttaatattggggaagaatatcgttccaatacacctgattttcgtgtttggcgcgatacacacataaaaataacaggccaagctgtaatcgaactccaagaatccttcctaaacgattgggtatacatggaaaatcaagctggcgccgctgacgggtttattagcgaatctggttcaaaacaatatttttctccagtcgatatgggtgatgaatgggctcaagttatttacggcggaccatatgataaagaaaaatgggttcgggattcgatgcttgatttgattgattccgctaaagaatcagtttggattgtatcaccctatttcgttccagatgaggagtcgcttgcggttattcgccgggttgcgatgagtggtgttgacgtgcgggttattattcctggtaaaggcgatcgcgggacttcattccacggaagtaatgcttatgtaaaaacaatgattgaagcaggcgcgaaaatgtatgcttatgccgatgactcttttgttcatgccaaagcaatgcttgtggacggaacacgtgcggctattggaactgccaattttgacgtgcgtagttttagattgaatcatgaattaatggtattcttatatgatgaaagcgaggctatgcatcatttaaaacgtgacttcaaaaaagattttgaagatagccgactatttacgatgaaagatatggaaaacaaaccattattgactcgtataaaagaagttctatccagtttactatcaccaattttataa

SEQ ID NO: 99119 - protein, 504 aa, Listeria monocytogenes
MRKLIQFLFIAVVLFLVEYVLINQAAILFLVTSGIIQLCGVIIAIRLLLFDQRNTSSKVAWVAVIFILPVLGTISYLVFGRNPATRKFSTAQVKEKTKLINAIHAIPNNTNEKLPRLSKRIAHLTSIEPIKGNKIEILTNGEETFPVLLDALRKAENHIHIQYYIFKTDAISTEIRDILVEKAKSGVEVRFMFDGLGSSKLGKAFLAPLKEAGVSIHAFDPIASPWIVRTANLRNHRKIVVIDGQIGFTGGLNIGEEYRSNTPDFRVWRDTHIKITGQAVIELQESFLNDWVYMENQAGAADGFISESGSKQYFSPVDMGDEWAQVIYGGPYDKEKWVRDSMLDLIDSAKESVWIVSPYFVPDEESLAVIRRVAMSGVDVRVIIPGKGDRGTSFHGSNAYVKTMIEAGAKMYAYADDSFVHAKAMLVDGTRAAIGTANFDVRSFRLNHELMVFLYDESEAMHHLKRDFKKDFEDSRLFTMKDMENKPLLTRIKEVLSSLLSPIL

SEQ ID NO: 99120 - DNA, 1401 bp, Zymomonas mobilis
  CDS (1)..(1401): transl_table=11
atgaccttaatgacgcttggtagtttttatgaagtagtcgcgtggctgatacgcttgacgatgctcgtcatcgttcccatgcgccggacaccacaagccgccagtagctggctgctgctgattttttttcaaccggctctgggcttgcttctttatttgatgattggtcaggcacgttttccgtcatggcgcgcagaacgttttgccaatctcaaatcttttctggaagaacaaaggcaaaaattacaaaattcggtagcctctctccctgcagaagcggccttggctgccgatcttgctgaaaatcttggtcatatgcccgccttatcgggtaaccggatgctttatatttctgattatcaggcgctttttgatcatctcgccgccgatattgataaagccgaacaacatgttcatctcgttatctatatttttgatagcgaccgctccggccaacagattattgccgccttgggacgcgccgcgaaaagaggcgttaattgtcagatattgattgatgccttgggatcacgccgctccggtaaacaggttatccagcaactaaaaaaccttggagttgatgcaagggaagccctgccctttcgcctgttaagagggcggacacgcggggatatgagaaatcatcgaaaattattcattatagacggcaaaattggctatgctggatcacaaaatattatcaatcgcgactggcggccgggcgttgttaatcaggaactaacagtcagggtcgaagggcccatcgtttttgaaatggaaacgctcttcgcgataaactggtatctcgaaagcggggcattacctgatagaatgagggacacacctcatttggtgccccccaaagaaggtagccatattttacagctgttacccagcggggcagattaccgtttggccggtttcgaaacgatgctggttaccggcatttacgccgcaaaaacacagatagtgctcgttacaccctatcttattcctgatagcgatttactagcggctttaaaaacggcggccttacgcggggtcaggatagacattattgtctcgaaaattgccgaccaaatcttggttagcatggcacaaaaaagctattatcaagaattgctaagcgccggtattcatatccatcgctacagagacaagctcctccatgccaagcatatcagtgttgataacaaattggcgatggttggctccagtaatgtcgatattcgctctttcttgctcaatgaagaagtcagcctaatcatttacgataaagaagccattgcccagcttcaaaatatcgaaatggattatctaaaaaatgccgatgaagtcagtaaggcagcatggcgcctgcgccctgctattgtaaagtcatggaaaatctggcgcgattag

SEQ ID NO: 99121 - protein, 466 aa, Zymomonas mobilis
MTLMTLGSFYEVVAWLIRLTMLVIVPMRRTPQAASSWLLLIFFQPALGLLLYLMIGQARFPSWRAERFANLKSFLEEQRQKLQNSVASLPAEAALAADLAENLGHMPALSGNRMLYISDYQALFDHLAADIDKAEQHVHLVIYIFDSDRSGQQIIAALGRAAKRGVNCQILIDALGSRRSGKQVIQQLKNLGVDAREALPFRLLRGRTRGDMRNHRKLFIIDGKIGYAGSQNIINRDWRPGVVNQELTVRVEGPIVFEMETLFAINWYLESGALPDRMRDTPHLVPPKEGSHILQLLPSGADYRLAGFETMLVTGIYAAKTQIVLVTPYLIPDSDLLAALKTAALRGVRIDIIVSKIADQILVSMAQKSYYQELLSAGIHIHRYRDKLLHAKHISVDNKLAMVGSSNVDIRSFLLNEEVSLIIYDKEAIAQLQNIEMDYLKNADEVSKAAWRLRPAIVKSWKIWRD

SEQ ID NO: 99122 - DNA, 1530 bp, Bacillus anthracis
  CDS (1)..(1530): transl_table=11
atgaagaaacctatcatccaattactattaatatttacaattgtatctatcgttcctttcctattaaatacatcttatatttcgttatatacatttgtcggcgttctctggtccatcacaattgtaggaatttcattcgttatttttatcgaaaatagatctcctcaaagtaccttagcctggtttttagtattagcacttcttcccgttgtaggtgtgcttttatactctattttcgggcgtagccgttggagaagaaaaaaacatctccatcgttcagaagagcaaagaaagttattccgtgaaatattagaaggaagacgactagagttatcactcaaagtcccattaagtgaacgctctgtccatttaacagaagtcgtacaaaaatttggaggcgggcctgcagcagatagaacgactaccaaacttttaacaaacggagatcaaacattctcagaaattttgcaagcgatcgagcaagcaaaacatcacatacatattcaatactatatttataaatctgatgagattggtacaaaagttcgggatgcgttaatcaaaaaggcaaaagatggtgttattgtacgcttcctttatgatggactcggaagtaatacgttgagaagacggtttttacaacctatgaaagaagctggaattgaaattgttgaatttgatcctattttttcagcttggttacttgaaaccgtcaattatcgtaaccaccgtaaaatcgtcattgtagatggagaaatcggttttactggtggactcaacgtcggtgatgaatatcttggtcgttcaaaaaaatttcccgtttggcgtgacagtcatttaaaagtagaaggaaaagcgctatataaattacaagcaatctttctagaggattggctctatgcatctagtggattgaatacttattcttgggatccatttatgaatagacaatacttccctggtaaagaaatttcaaacgcagaaggtgctgtgcaaattgtagcgagcggaccaagctcagatgataaaagcattcgcaatacattattagctgttatgggctcggcaaaaaaatctatttggattgctacaccctactttattccagatcaagaaactttaacattattacgtttaagtgcaatatctggcatagatgtacgcattttatatcctggtaaaagcgatagtattattagtgaccaagcatctcagtcctacttcactccacttttaaaagctggtgcctccatttatagttataaagatggctttatgcatgcaaaaattttacttgttgatgataaaatcgcaacaatcggaacagcaaatatggacgtacgcagctttgaattgaattacgaaattattagcgtactgtatgaatcagaaactgttcatgatattaaacgtgattttgaagatgactttaagcattctactgaaattaaatggaacgctttccaaaagagaagtatcaaaaaacgaatattagaatcttttatgaggctcatttctcctttactataa

SEQ ID NO: 99123 - protein, 509 aa, Bacillus anthracis
MKKPIIQLLLIFTIVSIVPFLLNTSYISLYTFVGVLWSITIVGISFVIFIENRSPQSTLAWFLVLALLPVVGVLLYSIFGRSRWRRKKHLHRSEEQRKLFREILEGRRLELSLKVPLSERSVHLTEVVQKFGGGPAADRTTTKLLTNGDQTFSEILQAIEQAKHHIHIQYYIYKSDEIGTKVRDALIKKAKDGVIVRFLYDGLGSNTLRRRFLQPMKEAGIEIVEFDPIFSAWLLETVNYRNHRKIVIVDGEIGFTGGLNVGDEYLGRSKKFPVWRDSHLKVEGKALYKLQAIFLEDWLYASSGLNTYSWDPFMNRQYFPGKEISNAEGAVQIVASGPSSDDKSIRNTLLAVMGSAKKSIWIATPYFIPDQETLTLLRLSAISGIDVRILYPGKSDSIISDQASQSYFTPLLKAGASIYSYKDGFMHAKILLVDDKIATIGTANMDVRSFELNYEIISVLYESETVHDIKRDFEDDFKHSTEIKWNAFQKRSIKKRILESFMRLISPLL

SEQ ID NO: 99124 - DNA, 1530 bp, Bacillus cereus
  CDS (1)..(1530): transl_table=11
atgaagaagcctatcgttcaattactattaatatttacaattgtatctatcgttctgttcctattaaatacatcgtatatctcgttatatacatttgtcggtgctctatggtccatcacaatcgtaggaatttcattcgttatttttatagaaaatagatctccacaaagtacattagcatggtttttagtattagcacttcttcctattataggtgtgcttttatacgctattttcggacgcagccgctggagaagaaaaaaacatctccatcgttcagaagaacaaagaaaattattccgtgaaatattagaaggaagaagactagagttattactcacagtcccactaaatgaacgttccatacatttaacagaagtcatacaaaaatttggaggcggtcctgccgcagatagaacaactacaaaacttttaacaaacggagatcaaacattttcagaaattttgcgagctatagagcaagcaaaacatcatatacatattcaatactacatttataaatctgatgaaattggtacaaaagttcgagatgctttaatacaaaaagcaaaagatggtgttattgtacgcttcctttatgatggccttggaagtaatacgttaagaagacgatttttacaacctatgaaagaagctgggattgaaattgtagaatttgaccctattttttcagcttggttacttgaaactgtcaattatcgtaaccatcgaaaaattgttattgtagatggcgaaattggttttaccggaggactcaatgtcggtgatgaatatcttggccgttccaagaaatttcctgtttggcgtgatagtcatttaaaaatagaaggaaaagcattatataaattacaagcaatctttctagaagactggctctatgcctctagtggtttaaatacttattcctgggatcaattcatgaatagacaatacttcccaggtaaagagatttcaaatgcagaaggtgctgttcaaatcgtagcaagcggaccaagctccgatgataaaagtattcgtaatacattattagctgttatgggctctgcaaaaaaatccatttggatcgctacaccctactttattccagatcaagaaactttaacattattacgcttaagtgcaattgccggaatagatgtacggattttatatccaggtaaaagtgatagcatcattagtgatcaagcatctcaatcctatttcactccgcttttaaaagctggtgcttctatttacagttataaagatggttttatgcatgcaaaaattgtactcgttgatgatacaattgcaactattggaacagcgaacatggatgtacgtagctttgaattgaattacgaaattattagtgtactttatgaatcaaaaacagttcacgatattaaacgtgattttgaagaagattttaaacattcaactgaaattaaatggaactctttccaaaaaagaagtataaaaaaacgcatattggagtctttcatgaggcttatttctcctttactgtag

SEQ ID NO: 99125 - protein, 509 aa, Bacillus cereus
MKKPIVQLLLIFTIVSIVLFLLNTSYISLYTFVGALWSITIVGISFVIFIENRSPQSTLAWFLVLALLPIIGVLLYAIFGRSRWRRKKHLHRSEEQRKLFREILEGRRLELLLTVPLNERSIHLTEVIQKFGGGPAADRTTTKLLTNGDQTFSEILRAIEQAKHHIHIQYYIYKSDEIGTKVRDALIQKAKDGVIVRFLYDGLGSNTLRRRFLQPMKEAGIEIVEFDPIFSAWLLETVNYRNHRKIVIVDGEIGFTGGLNVGDEYLGRSKKFPVWRDSHLKIEGKALYKLQAIFLEDWLYASSGLNTYSWDQFMNRQYFPGKEISNAEGAVQIVASGPSSDDKSIRNTLLAVMGSAKKSIWIATPYFIPDQETLTLLRLSAIAGIDVRILYPGKSDSIISDQASQSYFTPLLKAGASIYSYKDGFMHAKIVLVDDTIATIGTANMDVRSFELNYEIISVLYESKTVHDIKRDFEEDFKHSTEIKWNSFQKRSIKKRILESFMRLISPLL

SEQ ID NO: 99126 - DNA, 1503 bp, Bacillus subtilis
  CDS (1)..(1503): transl_table=11
atgctgaaaaggagactggaatttttctttttatatatgatgctcatcggggcatatgtcatttggttttttccggtttccagacttgagttttacggaggattgctttgctatataagcattattttgttcagcatctattcattaattcttgaaaaccgcacctcgcagcacacgctgctatggatccatattcttgtcttttttccaatcgtcggctacgtgttttatctgttttcgggacagctttatgtaaagggaaagctgtttaagacaaaacgaatgtacaacagggaaaagctcaggaagctgtttgacaaggaggaaacgcccgaagtgacagggctgaaggacaatcaagagaggttctttacatattccatcagggctgcccatatgaatatcaatacgaaaagcaacatcaaagtgctgaaaaacggcgaagaaaccttcccggacattttcaaagcaatgagaaaagcggaatcttacatacatattgaatactacatgtttaaatcagacatgctcggacgcggcatgatggatattatgatggagaaagcgcgccagggtgtcgaggtgaggtttttatacgatgcggcaggaagcatgaagctggcaagaagagatattatgagaatgaaacaagcgggggtggacatcgtcccgttttctccgctgaaatacgggtttttcaaccagaagctgaatttcagaaatcaccggaaaatcgtgatcatcgatgggaaaaccggttttgtgggtggattaaatgtcgggaaggaatatatcagcagagatccgtacatcggattttggagagatacacacctgcggcttgagggggaaattgtgcaaacgctccacgctatctttatgctggattgggaatatgtctccaatgaagtgctaattgatcaagaggagtacaataccccggttcccgtggaaggaggaggcatttatcaaattgtcgcgacaggccctgacatgaaggaaagcatgagcgacctttattatgaaatgatttcttcagcgcagaaatcaatatggatcgccacgccctattttgtccccaatgaatccattcgcacggcgctaaaagcagcggcgacaaagggggtagaggtaagggttatggtgccggagaagaacgacagctttttgacccaatacgcgtcgaggtcctatttcccggagctgctccttgagggcattgaagtgtactcctaccaaaaaggcttcatgcatcaaaaagtcatgatcattgatggcgatctcgcctccgtcggtaccgcgaatatggacatgcgcagctttcagctcaactttgaagtgaatgtgttcttcacggatgccgaagcgatccgaacccttgaggcccattttgaagaggatatgcaggaaagtgaaaagctcagccctgtcggcttttataaaagaggtgtggctgaccggacaaaagagtcgtttgcccgcctgttttcaggtgttctgtaa

SEQ ID NO: 99127 - protein, 500 aa, Bacillus subtilis
MLKRRLEFFFLYMMLIGAYVIWFFPVSRLEFYGGLLCYISIILFSIYSLILENRTSQHTLLWIHILVFFPIVGYVFYLFSGQLYVKGKLFKTKRMYNREKLRKLFDKEETPEVTGLKDNQERFFTYSIRAAHMNINTKSNIKVLKNGEETFPDIFKAMRKAESYIHIEYYMFKSDMLGRGMMDIMMEKARQGVEVRFLYDAAGSMKLARRDIMRMKQAGVDIVPFSPLKYGFFNQKLNFRNHRKIVIIDGKTGFVGGLNVGKEYISRDPYIGFWRDTHLRLEGEIVQTLHAIFMLDWEYVSNEVLIDQEEYNTPVPVEGGGIYQIVATGPDMKESMSDLYYEMISSAQKSIWIATPYFVPNESIRTALKAAATKGVEVRVMVPEKNDSFLTQYASRSYFPELLLEGIEVYSYQKGFMHQKVMIIDGDLASVGTANMDMRSFQLNFEVNVFFTDAEAIRTLEAHFEEDMQESEKLSPVGFYKRGVADRTKESFARLFSGVL

SEQ ID NO: 99128 - DNA, 1482 bp, Staphylococcus aureus
  CDS (1)..(1482): transl_table=11
atgcgatttacattttcaaacgatttaggaacgttatttactattattttagccattggattcatcattaatttagtattggcttttattattatctttttagaaagaaataggcgtacagcgagttcaacttgggcatggctatttgtactttttgtcttaccattgattggttttattctttacttgttttttggtagaaccgtttcggcacgcaaattgaataaaaacaatggtaacgtgttaacggatttcgatggacttttaaaacaacaaatagaaagctttgataaaggtaattatggtactgataacaaacaagttcaaaaacatcatgatttagtacgtatgcttttgatggatcaagatggttttttaactgaaaataataaagttgatcatttcattgatggaaatgatttatatgatcaagttttaaaagatattaaaaatgcaaaagaatatatccatttagagtactatactttcgctttagatggtttaggtaaaagaattttacatgctttagaagaaaaattgaaacaaggtctagaagtaaaaatattatatgatgatgttggatctaaaaatgttaagatggcaaattttgatcattttaaatcgttaggtggagaagttgaagcattttttgcttcaaaattaccgttattgaatttcagaatgaataatagaaatcatagaaaaatcatcgtaatcgatggtcaactaggttatgtcggaggatttaacattggtgatgaatatctaggattaggaaaattaggatattggagagatacgcatttacgtatacaaggggatgcggttgatgcactgcagttgcgatttattttagactggaattcgcaagcgcaccgtccacaatttgaatatgatgttaagtatttccctaaaaagaacggaccattgggcaattcaccaattcaaatagctgcaagtggcccggctagtgactggcatcaaattgaatacggttatacaaaaatgattatgagtgcaaagaaatctgtatatttacaatcaccatatttcattccggataattcatatataaatgccattaaaattgctgctaaatcaggtgtagatgtacatttaatgattccatgtaagccagatcatccattagtatattgggcgacattttcaaatgcctctgacttattatcaagtggtgttaaaatttatacgtatgaaaatggatttatacattctaaaatgtgcttaattgatgatgaaatcgtatcagtgggcacagcaaatatggactttagaagttttgaattaaattttgaagtaaatgcctttgtatatgatgaaaatcttgctaaagatttaagggtggcttatgaacatgatattacaaaatcaaaacaactaaccaaagaatcatatgccaatagaccgctgtctgttaaattcaaagaatcgttagcaaaattagtttcgccaattttataa

SEQ ID NO: 99129 - protein, 493 aa, Staphylococcus aureus
MRFTFSNDLGTLFTIILAIGFIINLVLAFIIIFLERNRRTASSTWAWLFVLFVLPLIGFILYLFFGRTVSARKLNKNNGNVLTDFDGLLKQQIESFDKGNYGTDNKQVQKHHDLVRMLLMDQDGFLTENNKVDHFIDGNDLYDQVLKDIKNAKEYIHLEYYTFALDGLGKRILHALEEKLKQGLEVKILYDDVGSKNVKMANFDHFKSLGGEVEAFFASKLPLLNFRMNNRNHRKIIVIDGQLGYVGGFNIGDEYLGLGKLGYWRDTHLRIQGDAVDALQLRFILDWNSQAHRPQFEYDVKYFPKKNGPLGNSPIQIAASGPASDWHQIEYGYTKMIMSAKKSVYLQSPYFIPDNSYINAIKIAAKSGVDVHLMIPCKPDHPLVYWATFSNASDLLSSGVKIYTYENGFIHSKMCLIDDEIVSVGTANMDFRSFELNFEVNAFVYDENLAKDLRVAYEHDITKSKQLTKESYANRPLSVKFKESLAKLVSPIL

SEQ ID NO: 99130 - DNA, 1482 bp, Staphylococcus aureus
  CDS (1)..(1482): transl_table=11
atgcaattttcattttcaaacgatttaggaacgttatttactattattttagccattggattcatcattaatttagtattagcttttattattatctttttagaaagaaataggcgtacagcgagttcaacttgggcatggctatttgtactttttgtcttacccttgattggttttattctttacttgttttttggtagaaccgtttcggcacgcaaattgaataaaaacaatggtaacgtgttaacggatttcgatggacttttgaaacaacaaatagaaagctttgataaaggtaattatggtactgataacaaacaagttcaaaaacatcatgatttagtacgtatgcttttgatggatcaagatggttttttaactgaaaataataaagttgatcatttcattgacggtaatgatttatacgatcaagttttaaaagatattaaaaatgcaaaagaatatatccatttagaatactatactttcgctttagatggtttaggtaaaagaattttacatgctttagaagaaaaattgaaacaaggtttagaagtaaaaatattatatgatgatgttggttctaaaaatgttaagatggcaaattttgatcactttaaatcattaggtggcgaagttgaagcattttttgcgtctaaactaccattattaaatttccgtatgaataacagaaatcatagaaaaatcattattattgatggtcaattaggttatgtcggaggatttaacattggagatgaataccttggtttaggtaaactaggatattggagagatacacatttacgaattcaaggagatgcagttgatgcattacaattgcgctttattttagactggaattcgcaagcacatcgacctcaatttgaatatgatgttaagtatttccctaaaaagaacggaccattgggtaattcaccaattcaaatagctgcaagtggcccagctagtgactggcatcaaattgaatatggttatacaaaaatgattatgagcgctaagaagtcggtatatttgcaatcgccttatttcattccggataattcatatataaatgccattaaaattgcagctaaatcaggtgtagatgtacatttaatgattccatgtaagccagatcatcctttagtttattgggcgacattttcaaatgcctctgacttattatcaagtggtgttaaaatttatacgtatgaaaatggatttatacattctaaaatgtgcttaattgatgatgaaatcgtatcagtgggcacagcaaatatggactttagaagttttgaattaaattttgaagtaaatgcctttgtatatgatgaaaatcttgctaaagatttaagggtggcttatgaacatgatattacaaaatcaaaacaacttactgaagaatcatatgccaatagaccgctgtctgttaaattcaaagaatcgttagctaaattagtttcgccaattttataa

SEQ ID NO: 99131 - protein, 493 aa, Staphylococcus aureus
MQFSFSNDLGTLFTIILAIGFIINLVLAFIIIFLERNRRTASSTWAWLFVLFVLPLIGFILYLFFGRTVSARKLNKNNGNVLTDFDGLLKQQIESFDKGNYGTDNKQVQKHHDLVRMLLMDQDGFLTENNKVDHFIDGNDLYDQVLKDIKNAKEYIHLEYYTFALDGLGKRILHALEEKLKQGLEVKILYDDVGSKNVKMANFDHFKSLGGEVEAFFASKLPLLNFRMNNRNHRKIIIIDGQLGYVGGFNIGDEYLGLGKLGYWRDTHLRIQGDAVDALQLRFILDWNSQAHRPQFEYDVKYFPKKNGPLGNSPIQIAASGPASDWHQIEYGYTKMIMSAKKSVYLQSPYFIPDNSYINAIKIAAKSGVDVHLMIPCKPDHPLVYWATFSNASDLLSSGVKIYTYENGFIHSKMCLIDDEIVSVGTANMDFRSFELNFEVNAFVYDENLAKDLRVAYEHDITKSKQLTEESYANRPLSVKFKESLAKLVSPIL

SEQ ID NO: 99132 - DNA, 1473 bp, Staphylococcus epidermidis
  CDS (1)..(1473): transl_table=11
atgaattttggatttttgggtaccattttaactatattgttagtagttgggtttataactaacgtagtattggcatttgttatcatcttccttgaacgtgatcgacgtactgccagttcaacttgggcgtggttattcgtattattcgttcttcctgtcattggatttattttgtatctatttttaggacgaacggtttccaagaaaaagatggaaaaaaataacggtgatgaattacatgcatttgaagatttagttcaagatcaaatcgacagttttgataaacataattatggttatatcaatgatcaagtcattaaacaccgtgatttaatacgtatgttgttaatgaaacaagatgcctttttaacagaaaataataaaatcgatttatttacagatggtcataagctttatgaaaaagtacttgaggatatttacaatgctcaagactatatacatttagagtactatacctttgaacttgatggattaggtaaaagaatcttagatgcacttgaaactaaacttaaagaaggtttagaagttaaacttttgtatgacgatgttggttctaagaaggttagattatcaaaatttaaacatttcagagcattaggtggagaagttgaagcattttttccttcgaaagtacctttaatcaatttcagaatgaataatcgaaatcatagaaagattatcattatagatggacaaattggttacattggcggttttaatgtcggcgatgattatttaggattaggtaagttaggttactggagagatacacatacacgtgttcaaggtgaagttatcgatgcactacaattaagatttattttagactggaattcacagtcgcatcgtccacaatttaaatttgatcaaaaatacttccctaaaaaaattggggacaaagggaacgcggctattcaaatcgcttctagtggacctgcatttgatttacatcaaatagaatatggttatacaaaaatgataatgagcgctaaaaagtctatctatctacaaagcccttattttattccagaccaatcatacattaatgcattaaaaatggctgctaatagtggcgttgaagtaaaccttatgataccgtgtaaacctgatcatccattcgtttattgggctacattttcaaatgcagctgatttattagatagcggagttaatatttacacttatcaaaatggatttattcattctaaaatattaatgattgatgatgaaatttcttcaattggtagtgcaaacatggactttagaagctttgagctgaatttcgaagtgaacgcatttatatatgatgaagatattgctaaacagttacgtcaagcatttgaaaaagatattgagcaatctaaattacttacaaaaaaagtatacgacaagcgtccattatcaattaaatttaaagaaggactagcaaaattaatatctccaattttataa

SEQ ID NO: 99133 - protein, 490 aa, Staphylococcus epidermidis
MNFGFLGTILTILLVVGFITNVVLAFVIIFLERDRRTASSTWAWLFVLFVLPVIGFILYLFLGRTVSKKKMEKNNGDELHAFEDLVQDQIDSFDKHNYGYINDQVIKHRDLIRMLLMKQDAFLTENNKIDLFTDGHKLYEKVLEDIYNAQDYIHLEYYTFELDGLGKRILDALETKLKEGLEVKLLYDDVGSKKVRLSKFKHFRALGGEVEAFFPSKVPLINFRMNNRNHRKIIIIDGQIGYIGGFNVGDDYLGLGKLGYWRDTHTRVQGEVIDALQLRFILDWNSQSHRPQFKFDQKYFPKKIGDKGNAAIQIASSGPAFDLHQIEYGYTKMIMSAKKSIYLQSPYFIPDQSYINALKMAANSGVEVNLMIPCKPDHPFVYWATFSNAADLLDSGVNIYTYQNGFIHSKILMIDDEISSIGSANMDFRSFELNFEVNAFIYDEDIAKQLRQAFEKDIEQSKLLTKKVYDKRPLSIKFKEGLAKLISPIL

SEQ ID NO: 99134 - DNA, 1473 bp, Staphylococcus epidermidis
  CDS (1)..(1473): transl_table=11
atgaattttggatttttgggtactattttaactatattgttagtagttgggtttataactaacgtagtattggcatttgtcatcatcttccttgaacgtgatcgacgtactgccagttcaacttgggcgtggttattcgtattattcgttcttcctgtcattggatttattttgtatctatttttaggacgaacggtttccaagaaaaagatggaaaaaaataacggtgatgaattaaatgcatttgaagatttagttcaagaccaaatcgacagttttgataaacataattatggttatatcaatgatcaagtcattaaacaccgtgatttaatacgtatgttgttaatgaaacaagatgcctttttaacagaaaataataaaatcgatttatttacagatggtcataagctttatgaaaaagtacttgaggatatttacaatgctcaagactatatacatctagagtactatacctttgaacttgatggattaggtaaaagaatcttagatgcacttgaaactaaacttaaagaaggtttagaagttaaacttttgtatgacgatgttggttctaaaaaggttagattatcaaaatttaaacatttcagagcattaggtggagaagttgaagcatttttcccttcgaaagtacctttaatcaatttcagaatgaataatcgaaatcatagaaagattatcattatagatggacaaattggttacgttggcggttttaatgtcggcgatgattatttaggattaggtaagttaggttactggagagatacacatacacgtgttcaaggtgaaggcatcgatgcactacaattaagatttattttagactggaattcacagtcgcatcgtccacaatttaaatttgatcaaaaatacttccctaaaaaaattggggacaaaggaaacgcggctattcaaatcgcttctagtggacctgcatttgatttacatcaaatagaatatggttatacaaaaatgataatgagcgctaaaaagtctatctatctacaaagcccttactttattccagaccaatcatacattaatgcattaaaaatggctgctaatagcggcgttgaagtcaaccttatgataccgtgtaaacctgatcatccattcgtttattgggctacattttcaaatgcagctgatttattagatagcggagttaatatttacacttatcaaaatggatttattcattctaaaatattaatgattgatgatgaaatttcttcaattggtagtgcaaacatggactttagaagctttgagctgaatttcgaagtgaacgcatttatatatgatgaagatatagctaaacagttacgtcaagcatttgaaaaagatattgagcaatctaaattacttacaaaagaagtatacgacaagcgtccattatcaattaaatttaaagaaggactagcaaaattaatatctccaattttataa

SEQ ID NO: 99135 - protein, 490 aa, Staphylococcus epidermidis
MNFGFLGTILTILLVVGFITNVVLAFVIIFLERDRRTASSTWAWLFVLFVLPVIGFILYLFLGRTVSKKKMEKNNGDELNAFEDLVQDQIDSFDKHNYGYINDQVIKHRDLIRMLLMKQDAFLTENNKIDLFTDGHKLYEKVLEDIYNAQDYIHLEYYTFELDGLGKRILDALETKLKEGLEVKLLYDDVGSKKVRLSKFKHFRALGGEVEAFFPSKVPLINFRMNNRNHRKIIIIDGQIGYVGGFNVGDDYLGLGKLGYWRDTHTRVQGEGIDALQLRFILDWNSQSHRPQFKFDQKYFPKKIGDKGNAAIQIASSGPAFDLHQIEYGYTKMIMSAKKSIYLQSPYFIPDQSYINALKMAANSGVEVNLMIPCKPDHPFVYWATFSNAADLLDSGVNIYTYQNGFIHSKILMIDDEISSIGSANMDFRSFELNFEVNAFIYDEDIAKQLRQAFEKDIEQSKLLTKEVYDKRPLSIKFKEGLAKLISPIL

SEQ ID NO: 99136 - DNA, 1545 bp, Bacillus anthracis
  CDS (1)..(1545): transl_table=11
atgaaaaatacgttaaagttgattttctttgttttactattgttcgcattatttgtttcattacgtatgtttattgatgtggcattttattcggatgtaattgggataaaagatgtttcaattttaggtattattagtattttatttacggtatctgcatttttaattggctgcgttattttcttagagaaccgtcatccgtcaaaaacacttacatggctcattgtgttaggtatttttccggtatttggattcttcgcttatttattattcggacaaaactttcgtaggaagagaatgttccaaaagaaggcgttgctcgatgaacaagcgtttttacaatataaggggcatgaagattacgaagaacggattttgcgcaatcataagcatcaagagctgttatttcgtttagcggatcgcttaggcgctttaaatatttcatttcaaactgaaacgagaacattaacaaatggagatgaaacgtttcaggccattttagatggattaaaacgagcgaaacatcacattcatatggaatattacattgtgcgtgatgataagcttggaacagaaattaaagatattttaatacaaaaatcaaaagagggcgtagtcgttcgttttttatatgatgcggtgggaagttttaaattatcaaaatcgtatattgaagaattaaacgatgcaggtgtcgaaatgattccgttcttccctgtgcgctttccgattttaaacgataagattaattatcgaaaccaccgaaaaatcgttattattgatggaaatgaagggtttgtaggtggattaaatattggtgatgaatatttagggaaggataagtacttcggcttttggcgagacacacatttatatttgcgtggtgaagctgtacaaagtttgcaacttattttccttcaagattggttttatatgactggtgaggctgtgctagcccctgaatatttacaagcgaaagcagttgagggagagcattggggaggcgtgcagctcgttgcaggtgggccggataataaatgggaaacaatcaaacatttatattttgctatgattgcttctgcgcggaaatccatttggattgcaacgccgtatttcattccggatgatgatattttatccgcattaaaggtagctgcgcttgctggtatcgatgttcgtttgttaatgccgagtaagcctgataagcgcactgtcttttacgcatcgagatcgtatttcccagagcttttagatgcaggggtaaagatatatgaatacgaaaaaggttttctccatagtaaagttgtcattgtcgattctgatttagcttcaattgggacagcgaatatggatatgagaagttttcatttgaactttgaagtaaatgcctttttatatgatacagatagcattcgaaaacttgttcaagattttaaagacgatttagaagaatcaagtgaaattcatgtcgatcgttttcataaaaggcgtcttcatagacgaattgttgaatcaacgtaccggttattatcacctttattataa

SEQ ID NO: 99137 - protein, 514 aa, Bacillus anthracis
MKNTLKLIFFVLLLFALFVSLRMFIDVAFYSDVIGIKDVSILGIISILFTVSAFLIGCVIFLENRHPSKTLTWLIVLGIFPVFGFFAYLLFGQNFRRKRMFQKKALLDEQAFLQYKGHEDYEERILRNHKHQELLFRLADRLGALNISFQTETRTLTNGDETFQAILDGLKRAKHHIHMEYYIVRDDKLGTEIKDILIQKSKEGVVVRFLYDAVGSFKLSKSYIEELNDAGVEMIPFFPVRFPILNDKINYRNHRKIVIIDGNEGFVGGLNIGDEYLGKDKYFGFWRDTHLYLRGEAVQSLQLIFLQDWFYMTGEAVLAPEYLQAKAVEGEHWGGVQLVAGGPDNKWETIKHLYFAMIASARKSIWIATPYFIPDDDILSALKVAALAGIDVRLLMPSKPDKRTVFYASRSYFPELLDAGVKIYEYEKGFLHSKVVIVDSDLASIGTANMDMRSFHLNFEVNAFLYDTDSIRKLVQDFKDDLEESSEIHVDRFHKRRLHRRIVESTYRLLSPLL

SEQ ID NO: 99138 - DNA, 1545 bp, Bacillus cereus
  CDS (1)..(1545): transl_table=11
atgaaaaatacgttaaagctgattttctttatactgctattgttcgcattatttgtttcgttacgtatgtttattgatgtagcattttattcagatgtgattgggataaaagatgtttcgattttaggtattattagtattttatttacagtatctgcgtttttaattggttgcgttattttcttagaaaatcgacatccatctaaaacacttacatggttaattgttttaggaatttttccggtatttggtttctttgcttatttattattcggacaaaattttcgaagaaaaagaatgttccaaaagaaggcgttacttgatgaacaggcgtttttacaatataaagggcatgaagattacgaagaacgaattttacgcaatcataagcatcaagaactgttatttcgtttagcggatcgattaggagctttaaatatttcatttcaaactgaaacgaggacattaacaaatggagatgaaacgtttcgggctattttaaatgggttaaaacgagcgaaacatcacattcatatggaatattacattgtgcgtgatgataaattaggaacagaaattaaagatattttaatacaaaaatcgaaagaaggcgttgttgttcgctttttatatgatgcggttggaagttttaagttatcgaaatcgtatattgaagaattaaacgatgcaggtgtagaaatgattccattctttcctgtgcgctttccgattttaaacgataagattaattatcgaaatcataggaaaattgttgtgattgatgggaacgaaggatttgtaggcggattaaatatcggtgatgagtatttagggaaaaataaatattttggcttttggcgagatacgcatttgtatttacgtggtgaagcggttcaaagtttacaacttattttccttcaagactggttttatatgactggagaggctgtgctagcccctgaatatttacaagcaaaagcagttgagggtgatcattggggaggagtgcagctagttgcaggtggccccgataataagtgggaaacgattaagcatttatatttcgcaatgatcgcttctgctcggaaatcaatttggattgcaacgccgtattttattccggatgatgatattttatccgcattaaaggttgctgcacttgctggtattgatgttcgtttattaatgccgagtaaaccggataagcgtactgtcttttacgcatcgagatcgtacttcccagagcttttagatgcaggagtaaagatatatgaatacgaaaaaggttttcttcatagtaaaattgtcatcgttgattctgatttagcttcaattgggacagctaatatggatatgagaagttttcatttgaattttgaagtaaatgcctttttatatgatacagatagcattcgaaaacttgttcaagactttaaagatgatttagaagaatcaagtgaaattcatggtgatcattttcataaaagacgtcttcatagacgaattgttgaatcaacgtaccgattattatcacctttattataa

SEQ ID NO: 99139 - protein, 514 aa, Bacillus cereus
MKNTLKLIFFILLLFALFVSLRMFIDVAFYSDVIGIKDVSILGIISILFTVSAFLIGCVIFLENRHPSKTLTWLIVLGIFPVFGFFAYLLFGQNFRRKRMFQKKALLDEQAFLQYKGHEDYEERILRNHKHQELLFRLADRLGALNISFQTETRTLTNGDETFRAILNGLKRAKHHIHMEYYIVRDDKLGTEIKDILIQKSKEGVVVRFLYDAVGSFKLSKSYIEELNDAGVEMIPFFPVRFPILNDKINYRNHRKIVVIDGNEGFVGGLNIGDEYLGKNKYFGFWRDTHLYLRGEAVQSLQLIFLQDWFYMTGEAVLAPEYLQAKAVEGDHWGGVQLVAGGPDNKWETIKHLYFAMIASARKSIWIATPYFIPDDDILSALKVAALAGIDVRLLMPSKPDKRTVFYASRSYFPELLDAGVKIYEYEKGFLHSKIVIVDSDLASIGTANMDMRSFHLNFEVNAFLYDTDSIRKLVQDFKDDLEESSEIHGDHFHKRRLHRRIVESTYRLLSPLL

SEQ ID NO: 99140 - DNA, 1449 bp, Bacillus subtilis
  CDS (1)..(1449): transl_table=11
gtgagtatttcttccatccttttatcactttttttcattttaaatattcttttggccatcattgtcatcttcaaagaacggcgcgatgccagtgcatcttgggcgtggctgcttgttcttttctttattcccgttttaggctttattttatacttattattcggccataatctcagacgcaagcatttgtttcaatgggaagaccggaaaaagattggaattgaaaggctgctgaagcatcagcttgaagatttagaaaccaagcaatttcagtttaacaaccgggcaacctttgataacaaagatttaatttatatgctgattatgaataaccatgctgtgtttacagaggataattcagttgacgtcattacagatggacgggataaatttcagcggctgctgagtgacatttcaaaggctaaggatcatatccatttacagtattatatttataaaggcgatgaattaggcaaaaaattgcgggacgctctcatccaaaaggcgaaagaaggtgttcaggtcagagtgctttatgatgaactcgggtccagaacgctgagaaaaaagttttttaaagagcttcgcgaggctggcgggcatgtggaggtctttttcccgtcaaagctcaggccgattaacctgcggctgaattaccggaaccatcgaaagcttgtgatcatagacggtatgaccggttatgtcggaggctttaacgtcggagatgagtatctagggcttaatccgaaattcggttattggcgggatacgcatatccggctgcaaggaacggccgtgcacgccatccaaacacgattcatccttgactggaaccaagcttctcatcaccatacgctgacatatattccaaatcactttcctgattacggcccaaaaggcaacgtcgggatgcagattgtcacaagcggccctgattcggaatgggaacaaattaaaaatggctacatcaaaatgatttcgaacgccaagcgttccattttgatacaaacaccttattttatcccagatgcaagcctgctggatgctttaaggatcgcttgcctttcgggcattgacgttaacattatgattccgaacaagcccgatcacgcctttgtatactgggcgacactttcgtatatcggcgatctgctgaaagccggagccactgtctatatttacgataacggctttattcacgcgaaaaccatcgtggtggatgacgaaatcgcttcagtcggcacagcgaacattgatgtccgaagcttcaggctgaattttgaggttaatgcatttatttacgatatcaccattgctaaaaaactggtttcaacttttaaagaagatttgctagtatccagaaaattcacctatgaggagtatctgcagcgcccgttgtggattcgaataaaagaatccgtctcgcggctgttgtcgccgatcttataa

SEQ ID NO: 99141 - protein, 482 aa, Bacillus subtilis
MSISSILLSLFFILNILLAIIVIFKERRDASASWAWLLVLFFIPVLGFILYLLFGHNLRRKHLFQWEDRKKIGIERLLKHQLEDLETKQFQFNNRATFDNKDLIYMLIMNNHAVFTEDNSVDVITDGRDKFQRLLSDISKAKDHIHLQYYIYKGDELGKKLRDALIQKAKEGVQVRVLYDELGSRTLRKKFFKELREAGGHVEVFFPSKLRPINLRLNYRNHRKLVIIDGMTGYVGGFNVGDEYLGLNPKFGYWRDTHIRLQGTAVHAIQTRFILDWNQASHHHTLTYIPNHFPDYGPKGNVGMQIVTSGPDSEWEQIKNGYIKMISNAKRSILIQTPYFIPDASLLDALRIACLSGIDVNIMIPNKPDHAFVYWATLSYIGDLLKAGATVYIYDNGFIHAKTIVVDDEIASVGTANIDVRSFRLNFEVNAFIYDITIAKKLVSTFKEDLLVSRKFTYEEYLQRPLWIRIKESVSRLLSPIL

SEQ ID NO: 99142 - DNA, 1485 bp, Staphylococcus aureus
  CDS (1)..(1485): transl_table=11
atgatagagttattatccattgcactcaagcattctaatattattttaaattcaatatttattggtgcatttattttaaacttattattcgcctttaccattattttcatggaaagacgttctgccaattctatctgggcttggttactagtcttagttttcttgcctttattcggcttcattttatacttactattaggacgacaaattcaacgtgaccaaattttcaaaattgataaggaagataaaaaaggattagagttaatcgttgatgagcaattagctgctttaaaaaatgaaaacttttcaaattccaattatcaaattgtaaaatttaaagaaatgattcaaatgttgttatataataacgcagcatttttaacaacagacaacgatttaaaaatatacacagacggccaagaaaaatttgatgacctaatacaagacatccgtaatgctactgattatattcattttcagtactatattattcaaaatgatgaattaggtcgtaccattttaaatgaacttggtaaaaaagcggaacaaggtgtagaagttaaaattctttatgatgacatgggttctcgtggactgcgtaaaaaaggcttacgcccgtttcgcaataaaggtggacatgctgaagcatttttcccatcaaaattacctttaattaacttgcgtatgaacaatcgaaaccatcgaaaaattgttgtaatagatgggcaaattggatatgttggtggttttaatgttggtgatgagtacttaggtaaatcaaaaaaattcggctattggcgagatacgcatttacgaattgtcggggatgcagtgaatgcattgcaattacgatttattctagattggaattcacaagccacacgtgaccacatctcctatgatgatcgttatttcccagatgtaaattctggtggaacaattggcgttcaaatagcttctagtggtcctgacgaagaatgggaacagattaaatacggctatttgaaaatgatttcatctgctaaaaaatcgatttatattcaatctccctatttcatacctgatcaagcctttttagattctattaaaattgcggcattaggtggtgttgatgtcaatatcatgattcctaataaacctgaccatccgtttgttttttgggctactttaaaaaatgcagcatccttattagatgccggtgttaaagtatttcactacgacaatggctttttacactcaaaaacacttgttatagatgatgaaattgcaagtgtgggaacagctaatatggaccatcgcagtttcacattgaatttcgaagtcaacgcttttatttatgaccaacaaattgccaaaaaattaaaacaagcttttatagatgatttagcagtatcttctgaattaacaaaagcacgttatgctaagcgaagtctttggattaaatttaaagaaggtatttcacaattattgtcacctatcttataa

SEQ ID NO: 99143 - protein, 494 aa, Staphylococcus aureus
MIELLSIALKHSNIILNSIFIGAFILNLLFAFTIIFMERRSANSIWAWLLVLVFLPLFGFILYLLLGRQIQRDQIFKIDKEDKKGLELIVDEQLAALKNENFSNSNYQIVKFKEMIQMLLYNNAAFLTTDNDLKIYTDGQEKFDDLIQDIRNATDYIHFQYYIIQNDELGRTILNELGKKAEQGVEVKILYDDMGSRGLRKKGLRPFRNKGGHAEAFFPSKLPLINLRMNNRNHRKIVVIDGQIGYVGGFNVGDEYLGKSKKFGYWRDTHLRIVGDAVNALQLRFILDWNSQATRDHISYDDRYFPDVNSGGTIGVQIASSGPDEEWEQIKYGYLKMISSAKKSIYIQSPYFIPDQAFLDSIKIAALGGVDVNIMIPNKPDHPFVFWATLKNAASLLDAGVKVFHYDNGFLHSKTLVIDDEIASVGTANMDHRSFTLNFEVNAFIYDQQIAKKLKQAFIDDLAVSSELTKARYAKRSLWIKFKEGISQLLSPIL

SEQ ID NO: 99144 - DNA, 1485 bp, Staphylococcus aureus
  CDS (1)..(1485): transl_table=11
atgatagagttattatccattgcactcaagcattctaatattattttaaattccatatttattggtgcatttattttaaacttattattcgcctttaccattattttcatggaaagacgttctgccaattctatctgggcttggttactagtcttagttttcttgcctttattcggcttcattttatacttactattaggacgacaaattcaacgcgaccaaattttcaaaattgataaggaagataaaaaaggattagagttaatcgttgatgagcaattagccgctttaaaaaatgaaaacttttcaaattccaattatcaaattgtaaaatttaaagaaatgattcaaatgttgttatataataacgcagcatttttaacaacagacaacgatttaaaagtatacacagacggccaagaaaaatttgatgacttaatacaagacatccgtaatgctactgattatattcattttcagtactatattattcaaaatgatgaattaggtcgtaccattttaaatgaacttggaaaaaaagcggaacaaggtgtagaagttaaaattctttatgatgacatgggttctcgtggactgcgtaaaaaaggcttacacccgtttcgcaataaaggtggacatgctgaagcatttttcccatcaaaattacctttaattaacttgcgtatgaacaatcgaaaccatcgaaaaattgttgtaatagatggacaaattggatatgttggtggttttaatgttggtgatgagtacttaggtaaatcaaaaaaattcggctattggcgagatacgcatttacgaattgtcggggatgcagtgaatgcattgcaattacgatttattctagattggaattcacaagccacacgtgaccacatctcctatgatgatcgttatttcccagatgtaaattctggcggaacgattggcgtacaaatagcttctagtggtcctgacgaagaatgggaacagattaaatatggttacttgaaaatgatttcatctgctaaaaaatcgatttatattcaatctccctatttcatacctgatcaagcctttttagattctattaaaattgcggcattaggtggtgttgatgtcaatatcatgattcctaataaacctgaccatccgtttgttttttgggctactttaaaaaatgcagcatccttattagatgccggtgttaaagtatttcactacgacaatggctttttacactcaaaaacacttgttatagatgatgaaattgcaagtgttggaacagctaatatggaccatcgcagtttcacgttgaatttcgaagtcaacgcctttatttatgaccaacaaattgccaaaaaattaaaacaagcttttatagatgatttagcagtatcttctgaattaacaaaagcacgttatgctaagcgaagtctttggattaaatttaaagaaggtatttcacaattattgtcacctatcttataa

SEQ ID NO: 99145 - protein, 494 aa, Staphylococcus aureus
MIELLSIALKHSNIILNSIFIGAFILNLLFAFTIIFMERRSANSIWAWLLVLVFLPLFGFILYLLLGRQIQRDQIFKIDKEDKKGLELIVDEQLAALKNENFSNSNYQIVKFKEMIQMLLYNNAAFLTTDNDLKVYTDGQEKFDDLIQDIRNATDYIHFQYYIIQNDELGRTILNELGKKAEQGVEVKILYDDMGSRGLRKKGLHPFRNKGGHAEAFFPSKLPLINLRMNNRNHRKIVVIDGQIGYVGGFNVGDEYLGKSKKFGYWRDTHLRIVGDAVNALQLRFILDWNSQATRDHISYDDRYFPDVNSGGTIGVQIASSGPDEEWEQIKYGYLKMISSAKKSIYIQSPYFIPDQAFLDSIKIAALGGVDVNIMIPNKPDHPFVFWATLKNAASLLDAGVKVFHYDNGFLHSKTLVIDDEIASVGTANMDHRSFTLNFEVNAFIYDQQIAKKLKQAFIDDLAVSSELTKARYAKRSLWIKFKEGISQLLSPIL

SEQ ID NO: 99146 - DNA, 1467 bp, Staphylococcus epidermidis
  CDS (1)..(1467): transl_table=11
atggcacttcatcaatctaatattataattaatattttattagttagtgcctttttattaaatttagtttttgcattcattattattttcatggagaggcgtacagcaaattctatatgggcgtggttattggttttagtttttctacctttagtaggattcatattgtatttattattaggtcgccaaatacagagagaacatatatttaaactcgccaaagaggataaagttggtcttgaaatgattgttgacgagcaattagaggcattgaaaaagcaagacttttctaagggtaatcatcaaattgttaaatttaaagaaatggtacaaatgttactttataataatgctgcttttttaacaactgataatgatctaacaatttatacagatggtcatcagaagttcgatgatttaattaatgatattagacacgcacaatcatatattcacatccaatactacattattcatagtgataatctcggaaagcaattgttacatgaattagaaaaaaaagctgaagaaggtatagaagttaaaatgctatacgacgatatgggctcaagagatttacgaaagaaagatctaaaaaagtttcgtcaaaaaggcggtcacgctgaatctttctttccatcaaaattaccacttattaatttaagaatgaataatagaaaccacagaaaaatagtagtcattgacggtacgattggatatgttggtggttttaatgtaggagatgaatatataggtaaatctaagaaatttggttattggagggacacacacttacgtattaaaggtgacgcggtaaatgcccttcaacttagattcatcttagattggaactcacaatcaactcgtgacaatttaacttatgaatctcgatattttcctgatgttgactctggtggtacgataggcatacaaattgcttcaagtgggcctgatgaagattgggaacaaattaaatatggttatttaaaaatgatttcatcagccaaagaatctatatacattcaatcaccatacttcattcccgatcaagcttttttagattcgattaaaattgcagcgcttggtggtgtggatgttaacatcatggttcctaacaaacgtgatcatccctttgtttattgggctacgcttaaaaacgtagcgtctttacttgaagctggcgttaatgtctatcattatgataatggttttctacattcaaaaacacttgtcattgatgatgaggtagcaagtgtaggaactgccaatatggataatcgaagctttacattaaactttgaggtcaatgcttttatttatgatgaaggcgtagcacgatcattaaaacaagctttcattaatgatatgaaattatctaacaagctcacttctgaagaatatgctaaacgaaatctgctagttaaattcaaagaagggatttcacaactactttctccaattttataa

SEQ ID NO: 99147 - protein, 488 aa, Staphylococcus epidermidis
MALHQSNIIINILLVSAFLLNLVFAFIIIFMERRTANSIWAWLLVLVFLPLVGFILYLLLGRQIQREHIFKLAKEDKVGLEMIVDEQLEALKKQDFSKGNHQIVKFKEMVQMLLYNNAAFLTTDNDLTIYTDGHQKFDDLINDIRHAQSYIHIQYYIIHSDNLGKQLLHELEKKAEEGIEVKMLYDDMGSRDLRKKDLKKFRQKGGHAESFFPSKLPLINLRMNNRNHRKIVVIDGTIGYVGGFNVGDEYIGKSKKFGYWRDTHLRIKGDAVNALQLRFILDWNSQSTRDNLTYESRYFPDVDSGGTIGIQIASSGPDEDWEQIKYGYLKMISSAKESIYIQSPYFIPDQAFLDSIKIAALGGVDVNIMVPNKRDHPFVYWATLKNVASLLEAGVNVYHYDNGFLHSKTLVIDDEVASVGTANMDNRSFTLNFEVNAFIYDEGVARSLKQAFINDMKLSNKLTSEEYAKRNLLVKFKEGISQLLSPIL

SEQ ID NO: 99148 - DNA, 1512 bp, Bacillus halodurans
  CDS (1)..(1512): transl_table=11
atgaaaaatcggttaaacgtcttactctttttattgatcctttcgacaggtttgtaccttacccgttcgttttggcaaggctggattgtcggagcttttagtgtactcattaccatcacggttgtctttataggtatcgttatatttttagaaaaccgtcacccgacaaaaacgttaacatggttaatggtgcttgccgtgtttccagtcgttggcttcatcttttatttgatgttcggacaaaatcatcgaaaaagtaaaacctttatgaaaaaggcattatcagatgaagaggcatttgaaaaaatagagggaaatcgtcagctaaatgaagaacagttacagaaaatgggtggtcatcaacaactgttgtttcgactggctcatcgactagcgaacaatccgatttcattttcaaccaatacgaaagtgctgacagacgggaaagaaacgtttgcccatattaaacaagcgttacgaatggcaacgcatcatattcatctcgaatattatattgttcgtgatgatgaaattggtcaggaaattaaagagatcctaatgcagaaagcgaaggaaggaattcatgtacgttttctttatgacggtgtaggtagctggaagctctctaaatcttatattcaggatctgaagcaggccggagtagagattgttccgtttgcccctgtaaagctaccgtttattaatcatacgatcaattaccgcaatcaccgaaagattatcgtcatcgacggaaccgtgggcttcgtaggtggtttaaatattggcgatgaatatttaggaaaagacccatatttcggattttggcgagatacccatctgtatgttcgcggagaagctgtacgtacattacagctcattttcctccgggattgggcccacgaaacaggagaaacgattttgaagccatcttacctatccccagcattgacaaatatgaaggatgatggcggtgtccagatgattgcgagtggtcctgatactcgttgggaaattaataaaaagctattcttttccatgatcacatcagcgaagaaatcgatttggatcaccagtccatatttcatcccggatgaagatattttaagtgctttaaaaattgctgccctaagtggtattgatgttaggattctcgttcctaatcgtccagataaacggattgtttttcacgcctcccgctcttattttccagagcttcttgaagcgggagtgaaagtatacgaatatacacgaggctttcttcatagcaaaattattatcgtcgataatgagattgcttcgattggaacatcgaacatggatatgcgaagcttccatttgaattttgaagtgaacgcttttctttaccgcacgaaaagtgtaaccacactcgtaagtgattttgtctacgatttggaacatacaaatcaaattcgctttgagcaatttagaaacagagcttggtattatcgcgtacttgaatccacttgtcggctattatcacctttgctatag

SEQ ID NO: 99149 - protein, 503 aa, Bacillus halodurans
MKNRLNVLLFLLILSTGLYLTRSFWQGWIVGAFSVLITITVVFIGIVIFLENRHPTKTLTWLMVLAVFPVVGFIFYLMFGQNHRKSKTFMKKALSDEEAFEKIEGNRQLNEEQLQKMGGHQQLLFRLAHRLANNPISFSTNTKVLTDGKETFAHIKQALRMATHHIHLEYYIVRDDEIGQEIKEILMQKAKEGIHVRFLYDGVGSWKLSKSYIQDLKQAGVEIVPFAPVKLPFINHTINYRNHRKIIVIDGTVGFVGGLNIGDEYLGKDPYFGFWRDTHLYVRGEAVRTLQLIFLRDWAHETGETILKPSYLSPALTNMKDDGGVQMIASGPDTRWEINKKLFFSMITSAKKSIWITSPYFIPDEDILSALKIAALSGIDVRILVPNRPDKRIVFHASRSYFPELLEAGVKVYEYTRGFLHSKIIIVDNEIASIGTSNMDMRSFHLNFEVNAFLYRTKSVTTLVSDFVYDLEHTNQIRFEQFRNRAWYYRVLESTCRLLSPLL

SEQ ID NO: 99150 - DNA, 1512 bp, Bacillus pseudofirmus
  CDS (1)..(1512): transl_table=11
atgaaaaacagattaaatgttttagctttttttgcgctattatttgcggccctgtacatttcaagaggttttctgcaaagctggatggtaggaacactgagcgttgtgtttactctatccgttatatttattggcattattattttctttgagaacagacatcctacaaaaacccttacttggcttctagtgttagcggcatttccagtcgtcggctttttcttttatttaatgtttggacaaaatcatagaaaaagtaagcggttttctaaaaaagcaatagaagatgaacgagcctttcaaaaaattgaggggcagcggcagttaaatgaagagcagctgaagaaaatgggagggcatcaacaattattgttccgcttagctcataagttaggcaaaaacccgatctccttttcaagtgaaacgaaagtattaacagatggaaaggaaacctatgctcatatcctgcaagcactaaaaatggcagaacaccatattcatcttgagtattatatcgttcggcatgatgaccttggtaaccaaattaaagatattttaatttctaaagccaaggaaggagttcacgtacgttttttatatgatggggtagggagctggaagctttcgaagtcatatgtcgaagaactgcgggatgcaggagtggaaatggtttcgttctcacctgtaaaattaccttttttaactcatacgattaattatcgtaaccatcgcaagattattgtcatcgatggggtagtaggatttgtcggtggtttaaatatcggtgatgaatatctaggtaaagatgcatactttggttattggagagatacacacttgtatgtaagaggagaagctgttagaacacttcagcttattttcttgcaggactggcattatcagacaggtgaaacgattttaaaccaaacgtatttatctccttcactatcaatgacaaagggcgatggcggcgttcaaatgattgcaagcgggccggatacgaggtgggaagtgaataagaagctattcttttcaatgatcacttctgcaaaaaaatcgatttggattgcaagtccgtatttcattccagatgatgatattttaagtgctttaaaaattgccgctttaagcgggattgatgtccgaatccttgtcccaaaccgtccagacaagcgaattgtttttcatgcctcaaggtcttatttccctgagctgcttgaagcaggagtaaaggtttacgagtataaccgtggttttatgcacagtaaaataattattgtcgatcatgagatagcatcaataggcacatctaatatggatatgagaagttttcatttaaactttgaggtgaatgcctatttatatcgtacgagcagtgtgacaaagcttgtaagtgattatgtttacgatctcgagcattctaaccaaattaacttttcattgtttaaaaaccgaccatttttccatcggcttattgaatcaacctcaaggcttttatcaccattattgtaa

SEQ ID NO: 99151 - protein, 503 aa, Bacillus pseudofirmus
MKNRLNVLAFFALLFAALYISRGFLQSWMVGTLSVVFTLSVIFIGIIIFFENRHPTKTLTWLLVLAAFPVVGFFFYLMFGQNHRKSKRFSKKAIEDERAFQKIEGQRQLNEEQLKKMGGHQQLLFRLAHKLGKNPISFSSETKVLTDGKETYAHILQALKMAEHHIHLEYYIVRHDDLGNQIKDILISKAKEGVHVRFLYDGVGSWKLSKSYVEELRDAGVEMVSFSPVKLPFLTHTINYRNHRKIIVIDGVVGFVGGLNIGDEYLGKDAYFGYWRDTHLYVRGEAVRTLQLIFLQDWHYQTGETILNQTYLSPSLSMTKGDGGVQMIASGPDTRWEVNKKLFFSMITSAKKSIWIASPYFIPDDDILSALKIAALSGIDVRILVPNRPDKRIVFHASRSYFPELLEAGVKVYEYNRGFMHSKIIIVDHEIASIGTSNMDMRSFHLNFEVNAYLYRTSSVTKLVSDYVYDLEHSNQINFSLFKNRPFFHRLIESTSRLLSPLL

SEQ ID NO: 99152 - DNA, 1461 bp, Buchnera aphidicola subsp
  CDS (1)..(1461): transl_table=11
atggatattttctataatttaatcaaatgtttaattttttcaacatattggttactaattgctaatattacctttcgagtcttaattaaacgccgcaatataccttattccatgtcttggttactaacaatttatattattccttttattggtatttctatttggtttttttttggtgagctttatttagggaaaagacaaaaaaaaattgcaaatagaatatggtccatttctaataaatggcttcatgaattaaagtcttgtacatatatttttcaaataaaaaatagtgaagtagctacttctatatttcagttatgtaaaaatagacaaggtctacacggaattaaaagcaagaaaattaaattattaactaataccaagaaaattatgcaaatattaatacgtgatatttatttagcacgtaaaaatattgaaatggttttttatatttggaaaccaggtgggatggcagatgatgtggcaatagctctgattgattctgcaaaacgtggaatacattgtagattaatgcttgattcagcaggaagtattgaattttttcagagcccctgggttgaaattatgagaaaatctggaattcaagtagtagaagctttaaaagtgaatttattacgagtttttttaagacgtgttgatgttagacaacacagaaaaattatattaattgataattatattgcatattctggtagcatgaatcttgtagatccttatttatttaaaaaatcttctgaaattggacaatggattgatctaatgacaagaatagaagggcctattgctacaacaatgggtataatttactcttgtgattgggaaattgaaacaggtttaaaaatcttgcctcaattaccaaataaaaaaatgttagaaaatcaatctaataaaaacgctagtattcaagtaattgcatccggaccgggttttcttaaaaatatgattcatcaagcgttattgacagctatttattcagctaaacgtgaattaatcataactaccccttatttagttcctagtgaagatttattagaagctatttgtactgcagctcaaagaggagtagaagttagcatcattatacctttatataatgattctattttagtaaaatgggccagtagagttttttttagtgagttattagaagcaggtgtaaaaatttttcaatttcaaaaaggattattacatagtaaaagtatattagtagatcaacaactaagtttaattgggactgttaatctagatatgagaagtctttggttaaatttcgaaataactttggttattgatgatagtgattttggacgtaatttgttttgtatacaaaataaatatatttctgattcccagttaatagataaaaaagcttggtctatgcgcgcatattggaaaagaattcttgaaaaaatattttactttttaagtccattattgtaa

SEQ ID NO: 99153 - protein, 486 aa, Buchnera aphidicola subsp
MDIFYNLIKCLIFSTYWLLIANITFRVLIKRRNIPYSMSWLLTIYIIPFIGISIWFFFGELYLGKRQKKIANRIWSISNKWLHELKSCTYIFQIKNSEVATSIFQLCKNRQGLHGIKSKKIKLLTNTKKIMQILIRDIYLARKNIEMVFYIWKPGGMADDVAIALIDSAKRGIHCRLMLDSAGSIEFFQSPWVEIMRKSGIQVVEALKVNLLRVFLRRVDVRQHRKIILIDNYIAYSGSMNLVDPYLFKKSSEIGQWIDLMTRIEGPIATTMGIIYSCDWEIETGLKILPQLPNKKMLENQSNKNASIQVIASGPGFLKNMIHQALLTAIYSAKRELIITTPYLVPSEDLLEAICTAAQRGVEVSIIIPLYNDSILVKWASRVFFSELLEAGVKIFQFQKGLLHSKSILVDQQLSLIGTVNLDMRSLWLNFEITLVIDDSDFGRNLFCIQNKYISDSQLIDKKAWSMRAYWKRILEKIFYFLSPLL

SEQ ID NO: 99154 - DNA, 1431 bp, Clostridium perfringens
  CDS (1)..(1431): transl_table=11
atgcatttatttataaatatgatatttttaataaatattgtatttatcatttccataatcttcattgaaagaagaaatccccaaactacttgggcttggattttaatattaacctttctacccatattaggatttataatctacattttatttggtcaaaatattacccgtgaaaaaaactttaaaagaaaaattctagatgacaagacaaaacaaaaatatttaaattcatttaagtctcactacaaattagataatatttctttaaaatataaagacttaataatgatgaactttaataatgacaactcaacctacactcaacgtaatgatatagatttatattttgatgctaatagtctttttgaagaaatgattgatgaaataaataaagctgaaaaatttattcatatggaattttatatttttaaaagcgacgaaataggcaaaaaaatcttacaagccttaactaagaaagctaaagaaggtgttgaagtaaaattactagtagattctattggtaactctatacacaaaaaagatatagataaattaaaggcagctggtggagattttaaaatattttttcctggcttttgcaaatatataaacttaagaattaactatagaaatcatagaaagatacttattatagatagcaaagttgcttttttaggtggatttaatataggtgatgaatatcttggaaaagataaaaatattggtcattggcgtgatactcatactaaaataaagggccttgctattaatgatctagaaggaagattccttttagattggagttatgctaatgaatcagatttagacatagatttaaaaaaatattttataaatcctcattcaactgatttgccaaagaagattattggagctcaaatagtttcctctggtcctgaccatactgaacaacaaataaaaaatggatattttaaaattataaattcagctaagaaaaatcttttcatacaaactccttattttgtccctgatgaacctatgcttgaagctttaagacttgctgccttatctggagttgatgtaaaaataatgctacctggtaatcctgatcataaatttatgggatggatagcaaactcttattttgaatccttattaaatgctggtgcaaagatctacttatatgaaaagggctttcttcacgctaaaaccatagtggcagactcttctatatgtagtgtaggaacagctaacatggatataagaagcttttctttaaactttgaaagcaatatatttatatataatgaagctatttcaaaatctatggaagaacaattctttaaagacctaaaggtgtgtactaaagtaacccttgaaagttttgaaaaacgatctattatatcacgaattggagaatccataataagattagtatctcctttaatgtag

SEQ ID NO: 99155 - protein, 476 aa, Clostridium perfringens
MHLFINMIFLINIVFIISIIFIERRNPQTTWAWILILTFLPILGFIIYILFGQNITREKNFKRKILDDKTKQKYLNSFKSHYKLDNISLKYKDLIMMNFNNDNSTYTQRNDIDLYFDANSLFEEMIDEINKAEKFIHMEFYIFKSDEIGKKILQALTKKAKEGVEVKLLVDSIGNSIHKKDIDKLKAAGGDFKIFFPGFCKYINLRINYRNHRKILIIDSKVAFLGGFNIGDEYLGKDKNIGHWRDTHTKIKGLAINDLEGRFLLDWSYANESDLDIDLKKYFINPHSTDLPKKIIGAQIVSSGPDHTEQQIKNGYFKIINSAKKNLFIQTPYFVPDEPMLEALRLAALSGVDVKIMLPGNPDHKFMGWIANSYFESLLNAGAKIYLYEKGFLHAKTIVADSSICSVGTANMDIRSFSLNFESNIFIYNEAISKSMEEQFFKDLKVCTKVTLESFEKRSIISRIGESIIRLVSPLM

SEQ ID NO: 99156 - DNA, 1431 bp, Clostridium perfringens
  CDS (1)..(1431): transl_table=11
atgcatttatttataaatatgatatttttaataaatattgtatttatcatttccataatcttcattgaaagaagaaatccccaaactacttgggcttggattttaatattaacctttctacccatattaggatttataatctacattttatttggtcaaaatattacccgtgaaaaaaactttaaaagaaaaattctagatgacaagacaaaacaaaaatatttaaattcatttaagtctcactacaaattagataatatttctttaaaatataaagacttaataatgatgaactttaataatgacaattcaacctacactcaacgtaatgatatagatttatattttgatgctaatagtctttttgaagaaatgattgatgaaataaataaagccgaaaaatttattcatatggaattttatatttttaaaagcgatgaaataggcaaaaaaatcttacaagccttaactaagaaagctaaagaaggtgttgaagtaaaattactagtagattctattggtaactctatacacaaaaaagatatagataaattaaaggcagctggtggagattttaaaatattttttcctggcttttgcaaatatataaacttaagaattaactatagaaatcatagaaagatacttattatagatagcaaagttgcttttttaggtggatttaatataggtgatgaatatcttggaaaagataaaaatattggtcattggcgtgatactcatactaaaataaagggacttgctattaatgatctagaaggaagattccttttagattggagttatgctaatgaatcagatttagacatagatttaaaaaaatattttataaatcctcattcaactgatttgccaaagaagattattggagctcaaatagtttcctctggtcctgaccatactgaacaacaaataaaaaatggatattttaaaattataaattcagctaagaaaaatctttttatacaaacgccttattttgtccctgatgaacctatgcttgaagctttaagacttgctgccttatctggagttgatgtaaaaataatgctacctggtaatcctgatcataaatttatgggatggatagcaaactcttattttgaatccttattaaatgctggtgcaaagatctacttatatgaaaagggctttcttcacgctaaaaccatagtggcagactcttctatatgtagtgtaggaacagctaacatggatataagaagcttttctttaaactttgaaagcaatatatttatatataatgaagctatttcaaaatctatggaagaacaattctttaaagacctaaaggtgtgtactaaagtaacccttgaaagttttgaaaaacgatctattatatcaagaattggagaatccataacaagattagtatctcctttaatgtag

SEQ ID NO: 99157 - protein, 476 aa, Clostridium perfringens
MHLFINMIFLINIVFIISIIFIERRNPQTTWAWILILTFLPILGFIIYILFGQNITREKNFKRKILDDKTKQKYLNSFKSHYKLDNISLKYKDLIMMNFNNDNSTYTQRNDIDLYFDANSLFEEMIDEINKAEKFIHMEFYIFKSDEIGKKILQALTKKAKEGVEVKLLVDSIGNSIHKKDIDKLKAAGGDFKIFFPGFCKYINLRINYRNHRKILIIDSKVAFLGGFNIGDEYLGKDKNIGHWRDTHTKIKGLAINDLEGRFLLDWSYANESDLDIDLKKYFINPHSTDLPKKIIGAQIVSSGPDHTEQQIKNGYFKIINSAKKNLFIQTPYFVPDEPMLEALRLAALSGVDVKIMLPGNPDHKFMGWIANSYFESLLNAGAKIYLYEKGFLHAKTIVADSSICSVGTANMDIRSFSLNFESNIFIYNEAISKSMEEQFFKDLKVCTKVTLESFEKRSIISRIGESITRLVSPLM

SEQ ID NO: 99158 - DNA, 1461 bp, Escherichia coli O157
  CDS (1)..(1461): transl_table=11
  misc_feature (1026)..(1026): n is a, g, c or t
atgacaaccgtttatacgttggtgagttggttggccattctgggatactggttgctcattgcaggcgtaactttacgcattctaatgaaacgacgcgcagttccctccgcgatggcctggctgttgattatttacattctgccgttagtcggaattattgcctatcttgccgttggcgagctccatttaggcaaacgccgcgctgagcgcgccagagcgatgtggccttccaccgcaaaatggcttaacgaccttaaagcctgtaagcatatctttgccgaagaaaatagcagtgtcgctgcgccattattcaagctttgcgagcgtcgtcaggggatcgctggggtcaaagggaatcagctacaactgatgaccgagtcagatgatgtgatgcaggcgttaatccgcgacatccagctcgcgcgccataatattgagatggtgttttatatctggcagcccggcggcatggcggaccaggtggctgaatcattaatggcggctgcgcgacgcggcattcattgccgattgatgctcgactccgccgggagtgtagcttttttccacagcccgtggcccgagctaatgcgtaatgccggtattgaagtggtcgaagccttaaaggtcaatctgatgcgtgtgtttttacgccgtatggacctgcgccaacatcgcaagatgatcatgatcgataattacatcgcgtacaccggcagcatgaatatggtcgaccctcgctacttcaaacaagatgcgggcgtagggcaatggattgatctgatggcgcgtatggaaggccccatcgccaccgcgatggggattatttattcctgcgactgggagattgaaacagggaaacgtattctaccgccaccacctgatgtcaatattatgccgtttgagcaggccagcggtcataccattcacacaattgcttctggccccggctttccggaagatctcattcaccaggcattattgactgcggcttattcggcgcgtgaatatttgatcatgaccacgccntactttgtgccaagcgatgatttacttcatgcgatttgcacggcggcgcagcgcggggtggatgtcagtattatccttccgcgaaaaaatgactcgatgctggtcggctgggccagtcgcgcattctttacggaactgcttgctgctggggttaaagtttatcagtttgaaggcgggttactgcataccaagagcgtgctggtcgatggcgaactaagtctggttggcaccgttaaccttgatatgcgtagtctgtggctgaatttcgagattaccctggcaatcgacgataaaggttttggtgcagaccttgccgccgttcaggacgattatatttcgcgttcacgtctgctcgatgcccgtttatggctaaaacgtccattatggcaacgtgtcgccgagcgactgttttacttcttcagcccgttgctgtaa

SEQ ID NO: 99159 - protein, 486 aa, Escherichia coli O157
MTTVYTLVSWLAILGYWLLIAGVTLRILMKRRAVPSAMAWLLIIYILPLVGIIAYLAVGELHLGKRRAERARAMWPSTAKWLNDLKACKHIFAEENSSVAAPLFKLCERRQGIAGVKGNQLQLMTESDDVMQALIRDIQLARHNIEMVFYIWQPGGMADQVAESLMAAARRGIHCRLMLDSAGSVAFFHSPWPELMRNAGIEVVEALKVNLMRVFLRRMDLRQHRKMIMIDNYIAYTGSMNMVDPRYFKQDAGVGQWIDLMARMEGPIATAMGIIYSCDWEIETGKRILPPPPDVNIMPFEQASGHTIHTIASGPGFPEDLIHQALLTAAYSAREYLIMTTPYFVPSDDLLHAICTAAQRGVDVSIILPRKNDSMLVGWASRAFFTELLAAGVKVYQFEGGLLHTKSVLVDGELSLVGTVNLDMRSLWLNFEITLAIDDKGFGADLAAVQDDYISRSRLLDARLWLKRPLWQRVAERLFYFFSPLL

SEQ ID NO: 99160 - DNA, 1449 bp, Listeria innocua
  CDS (1)..(1449): transl_table=11
atgggactattagcttatttattagtcattttgctgattttaaacgtattctttgcggcagtgacggtcttcttagaaagacgcgatacatccgccacttgggcttggttactagtcttaacttttgttccaatatttggattcattatctatttaatttttgggagaaagctttcagggaaaaagatttttgattggaagggacaagaaaaaatcgggatacaagagtcaacagcaaatcaaatagaaatgatacgtcaaaaagaatttccatttagcgatccaaatgtaaaaaaacatcgcgatttaatttacttattgcttgttaatgatggagctattttgacgcaagataatgaagtagagctttttattgacggtcacgaaaaatttgatgctttaatagcagatattgaaaaagcaaaagatcatattcatctcatctactatattttccattcggatgagcttggaaaccgtttgatgcgagtgcttgaaagaaaagcagcagaaggtttaaatgtaaaaattatttatgatgcaatgggttcacggacgacgaaaaaatcatttttccgtactttcgaaaaaaatggcggtttagtaagaccatttttcccatctaaattaccattaattaatttccgtttaaattatcgtaatcaccgaaaattggcgattattgacggagatgttggttatattggtggctttaatattggtgacgaatatcttggacgttcgaaaaaatttggttattggcgcgatacacatttacgcgtgcatggtaaagcggtatatgctatgcaaacccgatttatcatggactggaattcggcatcatctactcataaaattgactataaagcgagatattttccaacatttcacggtaaaggccatacaagcatgcaaattgtgtctagtggtcctgattccgaatggcaacaaatcaagaatggttatattaaaatgataaatgctgctaaaaaaacgatttacttgcagtctccatattttattccagatgcgagcttgcttgaggcgataaaaattgcagcactttcaggagtcgatgttcgtgtcatgattccgaataaacctgaccatgcttttgtttaccgagcaacaactaattacgccggtgaacttatggaaacaggagctaaaatcttcatttatgataatggttttattcatgcaaagaccttagttgttgatggcgaaattgcttctgtaggaactgccaatatggactttaggagtttccgcttgaattttgaagtcaatgcttttatttatgaaaagaaaatggttcaaaaattagaagatgcatttttagaagatattttgaaatcgtaccaattaacacctgaattatatgcaaaacgatctttatggattaaatttaaagaagcggtaagtcgacttttatcgcctatattatag

SEQ ID NO: 99161 - protein, 482 aa, Listeria innocua
MGLLAYLLVILLILNVFFAAVTVFLERRDTSATWAWLLVLTFVPIFGFIIYLIFGRKLSGKKIFDWKGQEKIGIQESTANQIEMIRQKEFPFSDPNVKKHRDLIYLLLVNDGAILTQDNEVELFIDGHEKFDALIADIEKAKDHIHLIYYIFHSDELGNRLMRVLERKAAEGLNVKIIYDAMGSRTTKKSFFRTFEKNGGLVRPFFPSKLPLINFRLNYRNHRKLAIIDGDVGYIGGFNIGDEYLGRSKKFGYWRDTHLRVHGKAVYAMQTRFIMDWNSASSTHKIDYKARYFPTFHGKGHTSMQIVSSGPDSEWQQIKNGYIKMINAAKKTIYLQSPYFIPDASLLEAIKIAALSGVDVRVMIPNKPDHAFVYRATTNYAGELMETGAKIFIYDNGFIHAKTLVVDGEIASVGTANMDFRSFRLNFEVNAFIYEKKMVQKLEDAFLEDILKSYQLTPELYAKRSLWIKFKEAVSRLLSPIL

SEQ ID NO: 99162 - DNA, 1449 bp, Listeria monocytogenes serotype 4b
  CDS (1)..(1449): transl_table=11
atgggactgttggcttatctgttagtgattttgctaattttaaatgtattctttgcggcagtgacggtcttcttagaaagacgcgatacatccgccacttgggcttggttgctagtcttaacttttgttccgatatttggtttcattatctatttgatttttgggagaaaattatcaggcaaaaagattttcgattggaagggacaagaaaaaattgggatacaggaatctactgccaatcaaatagaaatgatacggcaaaaagaatttccatttagcgatccgaatgtgaaaaagcatcgtgatttaatctatttattactcgtaaacgatggtgctattttaacgcaagacaatgaagtggaactttttgtagatggacatgagaaattcgatgcgctaattgctgatattgaaaaagcgaaagatcatatacatctcatctattatatttttcattctgatgaactaggcaatcgcttaatgcgcgtgctggaaagaaaagcagcagaaggtttaaatgtgaaaattatttatgatgcaatgggttcaaggacaacgaaaaaatcatttttccgtacgtttcaaaaaaatggtggtctagttagacctttttttccgtctaaattaccattgattaactttcgtctcaactaccgaaatcaccggaaattggctataatcgatggagatgttggttatattggtggttttaatattggtgatgaatatcttggggcatcgaagaaatttggttactggcgtgatacacatttacgtgtacacggaaaagctgtttatgcgatgcaaactcgctttattatggactggaattctgcatcatccacacataaaattgattacaaagcgcgatacttcccgacttttcatgggaaaggtcatacaagtatgcaaattgtttcgagtggtcctgattccgaatggcaacaaatcaaaaatggttacatcaaaatgatcaatgctgctaaaaaaacaatttatttacaatcaccttattttattccagatgcaagtttgcttgaagcaatcaaaatcgcagcactttctggggtagatgtcagggttatgattcctaataagcctgaccatgcttttgtttaccgcgcaactactaactacgccggtgaattaatggaaacgggagcgaaaatctttatttatgataatggttttatccacgcgaaaacactcgttgtagatggcgaaattgcttcagttggaaccgcgaatatggatttccggagtttccgacttaattttgaagtaaatgcttttatttatgaaaaacaaatggtgcaaaaactagaagatgcctttttggaagatattctaaaatcgtatcaactaacacctgaattatatgcaaaacgatctttatggattaaatttaaagaagcggtaagccgacttttatcgcctatattatag

SEQ ID NO: 99163 - protein, 482 aa, Listeria monocytogenes serotype 4b
MGLLAYLLVILLILNVFFAAVTVFLERRDTSATWAWLLVLTFVPIFGFIIYLIFGRKLSGKKIFDWKGQEKIGIQESTANQIEMIRQKEFPFSDPNVKKHRDLIYLLLVNDGAILTQDNEVELFVDGHEKFDALIADIEKAKDHIHLIYYIFHSDELGNRLMRVLERKAAEGLNVKIIYDAMGSRTTKKSFFRTFQKNGGLVRPFFPSKLPLINFRLNYRNHRKLAIIDGDVGYIGGFNIGDEYLGASKKFGYWRDTHLRVHGKAVYAMQTRFIMDWNSASSTHKIDYKARYFPTFHGKGHTSMQIVSSGPDSEWQQIKNGYIKMINAAKKTIYLQSPYFIPDASLLEAIKIAALSGVDVRVMIPNKPDHAFVYRATTNYAGELMETGAKIFIYDNGFIHAKTLVVDGEIASVGTANMDFRSFRLNFEVNAFIYEKQMVQKLEDAFLEDILKSYQLTPELYAKRSLWIKFKEAVSRLLSPIL

SEQ ID NO: 99164 - DNA, 1440 bp, Oceanobacillus iheyensis
  CDS (1)..(1440): transl_table=11
atgggaataacctctttgttattaggactaacatttgttttaaatattgctttagctatttcaattatttttcttgaacgtaaagatccaacgtcctcttgggcatgggtaatggtccttttatttatacccatacttggattctttctttatttaatatttggcaaaccaatcagtaatagaaagattttttcttgggataagaagagccgtttgggagtaaagacaacagttcaatctcaattgagactcttagaagaaaatcaatttgaatttaatcaaccagaccttatcgagcataaggatcttgtatatttacatttgaaaaatgatgaagcaatttatacacagaataatggtgttgatatttttacagatggtcaaacgaaatttgatgctttgctagaagatatagaaaaagcgaaaaaacatatacatattcagtactatattatgcgcagtgatggcttaggaaataggcttgcagacatgctaataaaaaaagtaaatgaaggtgtagaagttagagttttatatgatgatatgggatcaagatcgttaaaaaacagttatataaaacgtttaaaaagagcaggagtgatggtcgaggcattcttcccatctcgattcatagtcaatttcaagattaattatcgaaatcaccgtaagctagcgattattgatggatatattggatatttaggtggttttaatgtaggcgatgaatatttagggattaataaaaagtttggatattggagagacacccatcttcgtgtgattggagatgcggtacaaagtatgcaaacacgttttatcctagattggaaccaagcatcgagggatactattttatataatgaagattattatcaaacagtatctgctggaaatgtcggtatgcaaattgttactagtggtcctgattcagaatatgaacaaatcaagaatggttatataaagatgatcatggaggcaaacgattatatttgtatccaaactccttattttattccggatgaaagtttaagggatgcattaaaaattgcagtattatctggggtacatgttaaaattatgataccgaacaaacctgatcatccatttgtatattgggcaacattatcgtattgtggcgatttaattcaagctggtgctgaaatatttatttatcagaatggatttttacatgctaaaacaatcattgtggatggtaggatagcttcagttggaacagctaatattgatgtacgtagtttccgacttaatttcgaagtaaatggcttcttgtatgattctgaagtagtgaatcggcttcaaaatgagttcgacgcagatttggagaaatctacgcaaatgacaaggaaactttatgatcaaagatcgataggaatccgttttaaagaatctatatccaggttgatttcacctgttttataa

SEQ ID NO: 99165 - protein, 479 aa, Oceanobacillus iheyensis
MGITSLLLGLTFVLNIALAISIIFLERKDPTSSWAWVMVLLFIPILGFFLYLIFGKPISNRKIFSWDKKSRLGVKTTVQSQLRLLEENQFEFNQPDLIEHKDLVYLHLKNDEAIYTQNNGVDIFTDGQTKFDALLEDIEKAKKHIHIQYYIMRSDGLGNRLADMLIKKVNEGVEVRVLYDDMGSRSLKNSYIKRLKRAGVMVEAFFPSRFIVNFKINYRNHRKLAIIDGYIGYLGGFNVGDEYLGINKKFGYWRDTHLRVIGDAVQSMQTRFILDWNQASRDTILYNEDYYQTVSAGNVGMQIVTSGPDSEYEQIKNGYIKMIMEANDYICIQTPYFIPDESLRDALKIAVLSGVHVKIMIPNKPDHPFVYWATLSYCGDLIQAGAEIFIYQNGFLHAKTIIVDGRIASVGTANIDVRSFRLNFEVNGFLYDSEVVNRLQNEFDADLEKSTQMTRKLYDQRSIGIRFKESISRLISPVL

SEQ ID NO: 99166 - DNA, 1473 bp, Pseudomonas aeruginosa
  CDS (1)..(1473): transl_table=11
atggccgccaccggagtggacaaggatcgacctcgcgcaatgacctccaccacctacctcggcctgctgctggtcggtatccaggtactcggcttcgtcgccgccatccatgccgtgctcaccgtgcgcaccgcccagggcgcgatcgcctgggccacctcgttggtattcatgccgtacctgaccctgctgccgtacctggtgttcggtcgcagccgtttcgacgcctacatcgaggcgcggcgccaggccaaccgcgagatgcacctggcggccgccgagctggactggcgtccctgggtcgaggaggccctggcggcccgccaggtcagcggctacaaggggctcaaggcgctggtgcggatgacccgcacgccgaccctggcgaacaaccgggtgcgcctgctggtcaacggcgaggccagcttcgaggcgatgttcaaggcgatttccgccgcccgccaggtgatcctggtgcagttcttcatcgtccgcgacgacgccctcggccagcgcctccagcaactgctgctggaacgtgcggccaacggcgtcgaggtgttcttcctctatgacgccatcggcagccacgcgctgccgcaccgctatgtcgagcggctgcgccagggcggcgtgcagatgcatggcttcagcaccggcagcggcatgctcaaccgcttccaggtgaatttccgcaaccaccgcaaggtcgtggtggtggatggcgagtgcggtttcgtcggcgggcacaacgtcggcgtcgagtacctcggcgagaagccgccgctggcgccctggcgcgacactcacatggaactgcgcgggccggcggtggcgtgcctgcaggaaagcttcgccgaggactggtactgggcgacccacagcctgccgccgctgatcctgccgccgcagtacgacagcgagggcgcgctctgccaggtagtcgccagcggtccggcggatgcccaggaaacctgctcgctgttcttcgtcgagatgatcaacgccgcccacgagcgggtctggatcacctcgccgtatttcgttcccgacgaagcggtgatggccgccctgcgcctggcggtgctgcgcggcgtcgacgtgcgcctgctgataccctcgcgcccggaccaccgcacggtgtatgccgcgtccagcctctacgcgctggaggcgatccgtgccggggtcaaggtgttccgctaccagcccggcttcctccaccagaaggtggtgctggtggaccgcgacaccgccgccgtcggcagcgccaacctggacaaccgttcgttccggctgaatttcgaggtgatggtggtgaccgtcgacgagggcttcgccggcgaggtggaggcgatgctcgaggcggacttcgccgagtcgctcgaattcactccggaagaccgccgcagcgtgcgccgcctgcagcaactggggatgcgcgtggcgcggctggtctcgccgatcctctga

SEQ ID NO: 99167 - protein, 490 aa, Pseudomonas aeruginosa
MAATGVDKDRPRAMTSTTYLGLLLVGIQVLGFVAAIHAVLTVRTAQGAIAWATSLVFMPYLTLLPYLVFGRSRFDAYIEARRQANREMHLAAAELDWRPWVEEALAARQVSGYKGLKALVRMTRTPTLANNRVRLLVNGEASFEAMFKAISAARQVILVQFFIVRDDALGQRLQQLLLERAANGVEVFFLYDAIGSHALPHRYVERLRQGGVQMHGFSTGSGMLNRFQVNFRNHRKVVVVDGECGFVGGHNVGVEYLGEKPPLAPWRDTHMELRGPAVACLQESFAEDWYWATHSLPPLILPPQYDSEGALCQVVASGPADAQETCSLFFVEMINAAHERVWITSPYFVPDEAVMAALRLAVLRGVDVRLLIPSRPDHRTVYAASSLYALEAIRAGVKVFRYQPGFLHQKVVLVDRDTAAVGSANLDNRSFRLNFEVMVVTVDEGFAGEVEAMLEADFAESLEFTPEDRRSVRRLQQLGMRVARLVSPIL

SEQ ID NO: 99168 - DNA, 1446 bp, Pseudomonas putida
  CDS (1)..(1446): transl_table=11
atgcatatggattaccacagcccctacttctttggttacctactcggcctgatccatctgctgggtattgtcgccgcactgcatgcgctgttcaccgtgcggacagcccagggcgccattgcttgggcgatgcccttgctcttcatcccctacctcaccttgatcccctacctgatcttcggcgcccgctcgttctatgcctacatcaaggctcggcgccaggccaaccaggaaatgcacgtggccatggccaacctcaactggcggccctgggttgaagaagcccttaccgcccgcgagtcggaaagctacacagccttgcgcgccatgcccaagctgggtcgaatgccatgcctggcaaataaccaggtgaaactgctgatcaatggcaaagccaccttcgatgccatcttcgcagccatcgaaaaagcacgcgatgtggtactggtgcagttcttcatcattcatgacgacaccctcggcaaggcactgcagcaactcttgctacgcaaagccgccgaaggcgtgcaggtgttcgtgctgtacgaccgtgtcggtagccatgccttgccgtccagctacagccaggtgctgcgtgacggcggtgtgcagatccatgcattcgccacacgtcgcggctggttcaaccgcttccaggtgaacttccgcaaccatcgcaagattgtggtggtggatggcttgctcggcttcatcggcggccacaatgtgggagacgagtacctgggtgaacatccacagctttccccttggcgtgacacccacgtacagatcagcgggccagtactggcctgcctgcaagagtcgttcgccgaggactggtactgggccacgcgccagctaccgccgctgatcctgcccgatacatacccggataacggcgtcctgtgtcaggccttggccagcggcccggcagacccacaagaaacctgctcgctgttcttccttgaagcgattcattcggccacccgcagggtgtggatcaccagcccgtacttcatccctgacgaggccgtgttcgccgccttgcggctggcggtgctacgaggagtcgatgtgcgggtgctgatcccgtcacggcctgaccaccgcatcgtctacgccgcctccagcctgtttgccttcgaagcagtgcgcgcgggggtacgtatgttccgttaccaacccgggtttctgcatcagaaggtggtgctggtggatgatgacgtcagcgcaattgggagtgccaacctggacaaccgctcgttccgcctgaacttcgagattaccctgctgacagtcgatcgcggcttcgccgaccaggtcgagcacatgctccaggaagacttcgaacaagcgcgggaaattactgctgaagacacccaagatacccatcgactgcagcaattggggatgcggattgcgcggctgatatcgccgattctttag

SEQ ID NO: 99169 - protein, 481 aa, Pseudomonas putida
MHMDYHSPYFFGYLLGLIHLLGIVAALHALFTVRTAQGAIAWAMPLLFIPYLTLIPYLIFGARSFYAYIKARRQANQEMHVAMANLNWRPWVEEALTARESESYTALRAMPKLGRMPCLANNQVKLLINGKATFDAIFAAIEKARDVVLVQFFIIHDDTLGKALQQLLLRKAAEGVQVFVLYDRVGSHALPSSYSQVLRDGGVQIHAFATRRGWFNRFQVNFRNHRKIVVVDGLLGFIGGHNVGDEYLGEHPQLSPWRDTHVQISGPVLACLQESFAEDWYWATRQLPPLILPDTYPDNGVLCQALASGPADPQETCSLFFLEAIHSATRRVWITSPYFIPDEAVFAALRLAVLRGVDVRVLIPSRPDHRIVYAASSLFAFEAVRAGVRMFRYQPGFLHQKVVLVDDDVSAIGSANLDNRSFRLNFEITLLTVDRGFADQVEHMLQEDFEQAREITAEDTQDTHRLQQLGMRIARLISPIL

SEQ ID NO: 99170 - DNA, 1446 bp, Pseudomonas putida
  CDS (1)..(1446): transl_table=11
atgcatatggattaccacagcccctacttttttggttacctactcggccttatccacctgttgggtgtcgtcgccgcgctccacgcactgttcactgtacgcaccgcccaaggcgcgattgcctgggccatgcccctgttcttcatcccttacctcaccttgatcccctacctgatcttcggcgcccgctcgttctatgcctacatcaaggcccggcgccaggcgaaccaggaaatgcacgtggccatggccaacctaaactggcggccttgggtggaagaagctctcaccgcccgcgagtcggaaagctacgcagccttgcgcgccatgcccaagctggggcgcatgccttgccttgcgaacaaccaagtaaagctattggtcaatggcaaagccacattcgatgccatcttcgcggctatcgaaaaggcacgcgatgtggtgctggtgcagttcttcatcattcatgacgacaccctcggcaaggcactgcagcaactgctgttgcgcaaggccgccgagggggtacaggtgttcgtactgtatgaccgcgtcggcagccatgccttgccggccagctacagccagcaactgcgcaacggtggtgtgcagatccatgccttcgccacccgccgcggctggttcaaccgcttccaggtgaacttccgtaaccatcgcaagattgtggtggtggatggcctgctcggctttatcggcggccacaacgtgggggacgaatacctcggagggcatcctcagctgtcgccttggcgcgacacccatgtgcagatcagcgggccggtgctggcctgcctgcaggagtcgttcgccgaggattggtattgggccacgcgccagctaccgccgctgattctgccggatgcctacccggataacggcgtgctgtgccaggcgttggccagcggccccgccgacccgcaggaaacctgctcgttgttcttcctcgaggcgatccattccgctacccggcgggtatggatcaccagcccttacttcatcccggacgaagcggtctttgctgcactgcgcctggcggtactacggggtgtcgatgtgcgggtactgatcccgtcacggccagaccaccgcatcgtctatgccgcctccagcctgttcgccttcgaagccgtgcgcgcgggtgtgcgcatgttccgctaccagcccggcttcctgcatcagaaggtggtgctggtagatgatgaagtaagcgcaatcggcagtgccaacctggacaaccgttcgttccggctgaacttcgagatcaccctgctaacggtcgaccgcaacttcgccgaccaggtcgaacacatgctgatcaaagactttgaacaggcgcgggagattactgcggaggacagccgcgatacacatcggctacagcaattggggatgcggattgcgcggctgatttcacccattctgtga

SEQ ID NO: 99171 - protein, 481 aa, Pseudomonas putida
MHMDYHSPYFFGYLLGLIHLLGVVAALHALFTVRTAQGAIAWAMPLFFIPYLTLIPYLIFGARSFYAYIKARRQANQEMHVAMANLNWRPWVEEALTARESESYAALRAMPKLGRMPCLANNQVKLLVNGKATFDAIFAAIEKARDVVLVQFFIIHDDTLGKALQQLLLRKAAEGVQVFVLYDRVGSHALPASYSQQLRNGGVQIHAFATRRGWFNRFQVNFRNHRKIVVVDGLLGFIGGHNVGDEYLGGHPQLSPWRDTHVQISGPVLACLQESFAEDWYWATRQLPPLILPDAYPDNGVLCQALASGPADPQETCSLFFLEAIHSATRRVWITSPYFIPDEAVFAALRLAVLRGVDVRVLIPSRPDHRIVYAASSLFAFEAVRAGVRMFRYQPGFLHQKVVLVDDEVSAIGSANLDNRSFRLNFEITLLTVDRNFADQVEHMLIKDFEQAREITAEDSRDTHRLQQLGMRIARLISPIL

SEQ ID NO: 99172 - DNA, 1440 bp, Pseudomonas syringae pv
  CDS (1)..(1440): transl_table=11
atggattatcacgacccgtactttttcggttatgtcctcggtttcattcacctgctgggcacaggtgccgccatccatgcgctgctgacggtgcgcacctcccaaggcgcgatcgcctgggcgatgccgttgctgttcatcccctacttcaccttgctgccttatctgatattcggacgcagctcgttcgacgcgtatatcaaggcccgccgtgaggccaacaaggagatgcgcgcagcgatcggcagcctcaactggcggccctggatagaagaagccgtagccgcacgccgatcagacgcctacgcggcgttgcgtgcaatgcccaggctggggaacatgccggcgctggccaacaacaaggtcaggctgctgatcaatggcgaagagacgttcggcgcgattttccaggcaatccgcgaagcgaaacagacgatcctgattcagttcttcatcattcatgacgacaacctcggccgccagttgcaaacgctgctgctggaaaaagccgcccagggcgtggcgatttttgtgctgtacgaccgcatcggcagccatgcattgccgggcgcctacatcgacacgttgcgcgacggtggtgtgcagataaaagcctttgccacgcgcggcgggtggctcaaccgcttccagatcaactttcgcaaccatcgcaagatcgtggtggtcgacggcctgaaaggttacatcggcgggcataacgtgggcgatgaatacatgggcctgaaaccgccgctggcgccttggcgcgatacacacgtggaagtcatcggcccggtggtcgcctgcttgcaggaatcgttcgccgaagactggttctgggccacccgcgaactaccgccgcttagcctgcccgacgagtttcccgaggacggcgtgctgtgccagttgctgaccagcgggccggccgatgcccaggaaacctgttcactgtttttcgtcgaagccattcatgctgccgaagaacgcgtatggatcaccagcccctatttcatccctgacgaggccgtgagcgccgcgctgaccctggcggtcctgcgcggtgtggacgtgcgcctgctactgccctcgcgcccagaccattacgtggtctacgccgcctccagcctttatgcctttgatgccgtccgtgcgggtgtgcgagtgtttcgctacgagccgggctttctgcatcagaaggtggtgctggtcgacaacgacatcaccgccatcggcagcgccaacctcgacaaccgctcgttccgactcaacttcgaactgatgctgctcaccgtcgacagcgacttctccagccaggtcgaggccatgctcaccgccgacttcgctgcggcgcgcgaaatatccctgcaggaaagccatgaaacccgacgcctgcatcagctcggcatgcgcgtagccaggctgatctcgccgattttgtga

SEQ ID NO: 99173 - protein, 479 aa, Pseudomonas syringae pv
MDYHDPYFFGYVLGFIHLLGTGAAIHALLTVRTSQGAIAWAMPLLFIPYFTLLPYLIFGRSSFDAYIKARREANKEMRAAIGSLNWRPWIEEAVAARRSDAYAALRAMPRLGNMPALANNKVRLLINGEETFGAIFQAIREAKQTILIQFFIIHDDNLGRQLQTLLLEKAAQGVAIFVLYDRIGSHALPGAYIDTLRDGGVQIKAFATRGGWLNRFQINFRNHRKIVVVDGLKGYIGGHNVGDEYMGLKPPLAPWRDTHVEVIGPVVACLQESFAEDWFWATRELPPLSLPDEFPEDGVLCQLLTSGPADAQETCSLFFVEAIHAAEERVWITSPYFIPDEAVSAALTLAVLRGVDVRLLLPSRPDHYVVYAASSLYAFDAVRAGVRVFRYEPGFLHQKVVLVDNDITAIGSANLDNRSFRLNFELMLLTVDSDFSSQVEAMLTADFAAAREISLQESHETRRLHQLGMRVARLISPIL

SEQ ID NO: 99174 - DNA, 1461 bp, Shigella flexneri
  CDS (1)..(1461): transl_table=11
atgacaaccgtttatacgttggtgagttggttggccattctgggatactggttgctcattgcaggcgtaactttacgcattctaatgaaacgacgcgcagttccctccgcgatggcctggctgttgattatttacattctgccgttagtcggaattattgcctatcttgccgttggcgagctccatttaggcaaacgccgcgctgagcgcgccagagcgatgtggccttccaccgcaaaatggcttaacgaccttaaagcctgtaagcatatcttcgccgaagaaaatagcagtgtcgctgcgccattattcaagctttgcgagcgtcgtcaggggatcgctggggtcaaagggaatcagctacagctgatgaccgagtcagatgatgtgatgcaggcgttaatccgcgacatccagctcgcgcgccataatattgagatggtgttttatatctggcagcccggcggcatggcggaccaggtggctgaatcattaatggcggctgcacggcgtggtattcattgccgattgatgctcgactccgccgggagtgtggcttttttccgcagcccgtggcccgagctaatgcgtaatgccggtattgaagtggtcgaagccttaaaggtcaatctgatgcgtgtgtttttacgccgtatggacctgcgccaacatcgcaagatgatcatgatcgataattacatcgcgtacaccggcagcatgaatatggtcgatcctcgctacttcaaacaagatgcgggcgtagggcaatggattgatctgatggcgcgtatggaaggccccatcgccaccgcgatggggattatttattcctgcgactgggagattgaaaccggaaaacgtattctgccgccaccaccagatgtcaatattatgccgtttgaacaggccagcggtcacaccattcacacaattgcttctggccccggctttccggaagatctcattcaccaggcattattgactgcggcttattcggcgcatgaatatttgatcatgaccacgccctactttgtgccaagcgatgatttacttcatgcgatttgcacggcggcgcagcgcggggtggatgtcagtattatccttccgcgaaaaaatgactcgatgctggtcggctgggccagtcgcgcattctttacggaactgcttgctgctggggttaaaatttatcagtttgaaggcgggttactgcataccaagagcgtgctggtcgatggcgaactaagtctggttggcaccgttaaccttgatatgcgtagtctgtggctgaatttcgagattaccttggcaatcgacgataaaggttttggtgcagaccttgccgccgttcaggacgattatatttcgcgttcacgtctgctcgatgcccgtttatggctaaaacgtccattatggcaacgtgtcgccgagcgactgttttacttcttcagcccgttgctgtaa

SEQ ID NO: 99175 - protein, 486 aa, Shigella flexneri
MTTVYTLVSWLAILGYWLLIAGVTLRILMKRRAVPSAMAWLLIIYILPLVGIIAYLAVGELHLGKRRAERARAMWPSTAKWLNDLKACKHIFAEENSSVAAPLFKLCERRQGIAGVKGNQLQLMTESDDVMQALIRDIQLARHNIEMVFYIWQPGGMADQVAESLMAAARRGIHCRLMLDSAGSVAFFRSPWPELMRNAGIEVVEALKVNLMRVFLRRMDLRQHRKMIMIDNYIAYTGSMNMVDPRYFKQDAGVGQWIDLMARMEGPIATAMGIIYSCDWEIETGKRILPPPPDVNIMPFEQASGHTIHTIASGPGFPEDLIHQALLTAAYSAHEYLIMTTPYFVPSDDLLHAICTAAQRGVDVSIILPRKNDSMLVGWASRAFFTELLAAGVKIYQFEGGLLHTKSVLVDGELSLVGTVNLDMRSLWLNFEITLAIDDKGFGADLAAVQDDYISRSRLLDARLWLKRPLWQRVAERLFYFFSPLL

SEQ ID NO: 99176 - DNA, 1488 bp, Wigglesworthia glossinidia brevipalpis
  CDS (1)..(1488): transl_table=11
atgttaataaattttttttcttcaattgaagtattatttgtaataattaaatggatattattattaggatattggtggttgattacagaagtaactataagaattctatttaaaagaagaactgtgccttcagctatggcatggttgttaattatttatgttgttccttttattggagctataatatatttattactaggagagttaaatttagaaaaaaaaagaataaaaagaagcaagataatttggatttctgcgctaaaaaaaataaaaaaattaaaaaactataaagaaatttttactacaaaaaatagtcatattgctcgttctttgttcagattatgtaaacatagacaaggaataggaggtgttaaaagtgaaaaaattaatattcttaatgatcctgataacgtgatgcaatccgtaataaatgatattaatttagctaaaattagtatagaaatgattttttatatttggcatcctggaggatggacaaattatgtggtggaagttttaataaaagcagctaatagaggagttaagtgtagattaattttagattctgctggtagtaaaaattttttaaaaagcatacaagtcaaaataatgcgtaaatctggcattaagatagtagaagctttaaatttaaatattttacaaatatttcttagaagaatggatttaaggcagcatagaaaaatgatattaattgataattatattggatatacaggaagcatgaatatgatagatcctaaattttttaagaaaaacagaaaaataggagaatggatagatattatgataagaatggaaggacctgtagcttctgcaatgagaataatattttcttgtgattgggaaatagaaacaggagaaaatattttttatgctccctatgatacaaaaaaatgtaatataattaaaaaagataataattataaaactcaagtaattccttctggcccaggtgtttccgaaggagttattcatcaagttttattaactgctatttattctgcaaaaaaaatattaatcatgacaactccatatttagtgccaagtgatgatatattgcatgctatttgcacagcttctcaaagaggagtatctgtttatattataattcctaaatttatagattctattttagtgaaatgggctagtagatcatttttttctgaattattacatgctggagtattaatatatcaatttgaaggaggtttattgcatactaaaagtatattagtagatgatcagttaagcttggtaggtactgtaaatttagatatgagaagtttatggttaaattttgaaattactttaatggtagataatcgtaattttggtaaaaaattaaaaaaaatacaaacaaattatatgtctctttcaaaagttctacatttaaaagaatggtctaaaagaccttattggaaacgtataattgaaagatttttttatttctttagcccacttctttaa

SEQ ID NO: 99177 - protein, 495 aa, Wigglesworthia glossinidia brevipalpis
MLINFFSSIEVLFVIIKWILLLGYWWLITEVTIRILFKRRTVPSAMAWLLIIYVVPFIGAIIYLLLGELNLEKKRIKRSKIIWISALKKIKKLKNYKEIFTTKNSHIARSLFRLCKHRQGIGGVKSEKINILNDPDNVMQSVINDINLAKISIEMIFYIWHPGGWTNYVVEVLIKAANRGVKCRLILDSAGSKNFLKSIQVKIMRKSGIKIVEALNLNILQIFLRRMDLRQHRKMILIDNYIGYTGSMNMIDPKFFKKNRKIGEWIDIMIRMEGPVASAMRIIFSCDWEIETGENIFYAPYDTKKCNIIKKDNNYKTQVIPSGPGVSEGVIHQVLLTAIYSAKKILIMTTPYLVPSDDILHAICTASQRGVSVYIIIPKFIDSILVKWASRSFFSELLHAGVLIYQFEGGLLHTKSILVDDQLSLVGTVNLDMRSLWLNFEITLMVDNRNFGKKLKKIQTNYMSLSKVLHLKEWSKRPYWKRIIERFFYFFSPLL

SEQ ID NO: 99178 - DNA, 1461 bp, Yersinia pestis
  CDS (1)..(1461): transl_table=11
atgacgacattttataccgtaatcagttggctttccgtttttggctactggttactcattgccggggtaacattgcgtattctgatgaaacgcagggccgttccttctgctatggcttggttactgattatctacattctgccattggtggggataattgcttacctttcattcggtgaattgcatttgggtaagcggcgtgctgaacgagctaaagccatgtggccatcgaccgctcgctggctgagtgaactcaaggaatgccaacatatctttgctaactctaatagcgaagttgccagcccactgtttcaattatgtgaacggcgtcaaggaataaacggtgttaaaggaaatcaactacaactattaacaacaaccgatgacacactaaaagcgctagtacgagatattgaactcgcccgccacaatatagaaatggtgttttatatttggcaacctggtggtctggtcgatcaggtggctgaatcgttgatggctgcggctcgacgcggcgttcattgccggctgttactcgattcagcgggtagcaagcaatttttccgcagcccttatcccgcaatgatgcgtaatgcaggtattgaggtggttgaggcacttaaagttaatgtatttcgtatgttcttgcgccgaatggatctgcgccaacatcggaaaattgtgttaatcgacaactatgttgcttataccggcagtatgaacatggtagatccccggttcttcaaacaagatgccggggttggtcagtggattgatatgatggcgcgcatggaaggcccggtagccacaaccctaggtattgtttatgcctgtgactgggaaattgaaacaggcaaacgtattttacccccgccccccgacgcgaatattatgccattcgaagaagagactggtcatacgattcaagtcatcgcttctggccctggtttcccagaagaaatgatccaccaggcattattaacagctgtgtatgccgcacgtgaacagttaattatgactacgccatattttgtccccagtgatgacttattacatgccatctgtaccgcggcacaacgcggggttgatgtcagtattattgtcccgcgtgagaatgattcgatgatggttcgctgggccagccgagcattcttcaccgaattgctgaatgcaggcgttaaaatttatcagtttgaaggcggcctattacacagtaaaagtgttctggtcgatggacagctaagtttagtcggcactgttaatctggatatgcgcagtttgtggctgaattttgaaatcacactggtgattgatgatgatggctttggggctgatttagcacaagttcaggatgattatatcgcccgctctgccttattggatggtgaacggtggaacaagcgccctctttggcaccgagtaactgagcgtttattctattttttcagcccattattgtaa

SEQ ID NO: 99179 - protein, 486 aa, Yersinia pestis
MTTFYTVISWLSVFGYWLLIAGVTLRILMKRRAVPSAMAWLLIIYILPLVGIIAYLSFGELHLGKRRAERAKAMWPSTARWLSELKECQHIFANSNSEVASPLFQLCERRQGINGVKGNQLQLLTTTDDTLKALVRDIELARHNIEMVFYIWQPGGLVDQVAESLMAAARRGVHCRLLLDSAGSKQFFRSPYPAMMRNAGIEVVEALKVNVFRMFLRRMDLRQHRKIVLIDNYVAYTGSMNMVDPRFFKQDAGVGQWIDMMARMEGPVATTLGIVYACDWEIETGKRILPPPPDANIMPFEEETGHTIQVIASGPGFPEEMIHQALLTAVYAAREQLIMTTPYFVPSDDLLHAICTAAQRGVDVSIIVPRENDSMMVRWASRAFFTELLNAGVKIYQFEGGLLHSKSVLVDGQLSLVGTVNLDMRSLWLNFEITLVIDDDGFGADLAQVQDDYIARSALLDGERWNKRPLWHRVTERLFYFFSPLL

SEQ ID NO: 99180 - DNA, 1386 bp, Streptococcus mutans
  CDS (1)..(1386): transl_table=11
atgataggatctgttctttatcttgtgaatagtcagatggatacgctttcgattattacttggcttttggttattttgccttttcctattttaggaacactttttttaatctatacaaagcaagattggggttatcgtgagttgaaatcgcttatcaaaaaatcaacacaagctattaaaccttattttcagtatgatcaacgtattttgtataaactaaaagaaagtcacgctagaacttataatttagcccaatatctccatagaagcggaggatttcctgtttacaaaaacaccaaagtcacgtactttccgaatggacaatctaaatttgaagagatgaaaaaacagttgctaaaagctgaaaaattcatctttttagaatatttcattatagctgaaggattgatgtggggtgaaattctttctattttagaacaaaaagttcaagaaggagtagaagttagggtgatgtatgatggcatgttagaattatcaacgctttcttttgactatgctaaaagactggaaaaaattgggataaaagccaaggttttttcacccataactccatttgtgtctacctattacaattaccgagaccatcgtaaaattttagttattgataataaggtcgcttttaatggggggattaatcttgcggatgaatatatcaatcaaattgaacgatttggttactggaaagatactgctgttatgctggaaggtgaaggtgtcgcttcttttactttaatgtttttacaaatgtggtctactaccaataaagattatgaatttgcaccttatttaacccaaaattttcatgagattgttgctaatggttatgtcattccctacagtgattcaccgcttgaccatgaaaaagtaggtgaaaatgtttacattgatatcctcaatcaagcgcgggattatgtttacattatgacgccttatttaattttagatagtgaaatggagcatgctttacaatttgctgctgaacgtggtgttgatgttaaaattattatgccaggtattcctgataagaaggttccctttgccttagctaagcgctattttcctgctcttcttgatgcgggagtcaagatttatgaattcacgccaggatttgtacatgctaaagtttttatagctgatgatataaaagcagtagtagggacaataaacttagattatcgtagtctttatcatcattttgaatgtgcgacttatatgtatcagacggattgtcttgttgatattaaagccgattttaaagaaactttaaaacaatcaagacgagtaacacgatcaactttacaaaaagaaaaaatttcgacaaaattaattggtttggttgttaagttggtagcccccctcttgtga

SEQ ID NO: 99181 - protein, 461 aa, Streptococcus mutans
MIGSVLYLVNSQMDTLSIITWLLVILPFPILGTLFLIYTKQDWGYRELKSLIKKSTQAIKPYFQYDQRILYKLKESHARTYNLAQYLHRSGGFPVYKNTKVTYFPNGQSKFEEMKKQLLKAEKFIFLEYFIIAEGLMWGEILSILEQKVQEGVEVRVMYDGMLELSTLSFDYAKRLEKIGIKAKVFSPITPFVSTYYNYRDHRKILVIDNKVAFNGGINLADEYINQIERFGYWKDTAVMLEGEGVASFTLMFLQMWSTTNKDYEFAPYLTQNFHEIVANGYVIPYSDSPLDHEKVGENVYIDILNQARDYVYIMTPYLILDSEMEHALQFAAERGVDVKIIMPGIPDKKVPFALAKRYFPALLDAGVKIYEFTPGFVHAKVFIADDIKAVVGTINLDYRSLYHHFECATYMYQTDCLVDIKADFKETLKQSRRVTRSTLQKEKISTKLIGLVVKLVAPLL

SEQ ID NO: 99182 - DNA, 24 bp, Artificial sequence
  primer
atgacaaccgtttatacgttggtg

SEQ ID NO: 99183 - DNA, 24 bp, Artificial sequence
  primer
ttacagcaacggactgaagaagta

SEQ ID NO: 99184 - protein, 500 aa, Artificial sequence
  consensus sequence
  Variant (2)..(4): Xaa in position 2 to 4 is any amino acid
  Variant (5)..(8): Xaa in position 5 to 8 is any or no amino acid
  Variant (10)..(10): Xaa in position 10 is any amino acid
  Variant (11)..(19): Xaa in position 11 to 19 is any or no amino acid
  Variant (21)..(43): Xaa in position 21 to 43 is any amino acid
  Variant (44)..(116): Xaa in position 44 to 116 is any or no amino acid
  Variant (118)..(126): Xaa in position 118 to 126 is any amino acid
  Variant (128)..(140): Xaa in position 128 to 140 is any amino acid
  Variant (142)..(146): Xaa in position 142 to 146 is any amino acid
  Variant (147)..(147): Xaa in position 147 is any or no amino acid
  Variant (150)..(155): Xaa in position 150 to 155 is any amino acid
  Variant (157)..(158): Xaa in position 157 to 158 is any amino acid
  Variant (160)..(168): Xaa in position 160 to 168 is any amino acid
  Variant (169)..(187): Xaa in position 169 to 187 is any or no amino acid
  Variant (189)..(205): Xaa in position 189 to 205 is any amino acid
  Variant (206)..(213): Xaa in position 206 to 213 is any or no amino acid
  Variant (215)..(215): Xaa in position 215 is any amino acid
  Variant (219)..(222): Xaa in position 219 to 222 is any amino acid
  Variant (224)..(229): Xaa in position 224 to 229 is any amino acid
  Variant (232)..(232): Xaa in position 232 is any amino acid
  Variant (234)..(241): Xaa in position 234 to 241 is any amino acid
  Variant (242)..(258): Xaa in position 242 to 258 is any or no amino acid
  Variant (260)..(260): Xaa in position 260 is any amino acid
  Variant (262)..(267): Xaa in position 262 to 267 is any amino acid
  Variant (269)..(277): Xaa in position 269 to 277 is any amino acid
  Variant (279)..(281): Xaa in position 279 to 281 is any amino acid
  Variant (283)..(309): Xaa in position 283 to 309 is any amino acid
  Variant (310)..(352): Xaa in position 310 to 352 is any or no amino acid
  Variant (354)..(365): Xaa in position 354 to 365 is any amino acid
  Variant (366)..(376): Xaa in position 366 to 376 is any or no amino acid
  Variant (378)..(385): Xaa in position 378 to 385 is any amino acid
  Variant (388)..(389): Xaa in position 388 to 389 is any amino acid
  Variant (391)..(399): Xaa in position 391 to 399 is any amino acid
  Variant (400)..(401): Xaa in position 400 to 401 is any or no amino acid
  Variant (403)..(405): Xaa in position 403 to 405 is any amino acid
  Variant (406)..(406): Xaa in position 406 is any or no amino acid
  Variant (408)..(409): Xaa in position 408 to 409 is any amino acid
  Variant (411)..(414): Xaa in position 411 to 414 is any amino acid
  Variant (416)..(416): Xaa in position 416 is any amino acid
  Variant (417)..(418): Xaa in position 417 to 418 is any or no amino acid
  Variant (420)..(437): Xaa in position 420 to 437 is any amino acid
  Variant (438)..(439): Xaa in position 438 to 439 is any or no amino acid
  Variant (441)..(450): Xaa in position 441 to 450 is any amino acid
  Variant (451)..(464): Xaa in position 451 to 464 is any or no amino acid
  Variant (466)..(466): Xaa in position 466 is any amino acid
  Variant (468)..(471): Xaa in position 468 to 471 is any amino acid
  Variant (473)..(477): Xaa in position 473 to 477 is any amino acid
  Variant (478)..(485): Xaa in position 478 to 485 is any or no amino acid
  Variant (487)..(488): Xaa in position 487 to 488 is any amino acid
  Variant (490)..(490): Xaa in position 490 is any amino acid
  Variant (492)..(492): Xaa in position 492 is any amino acid
  Variant (495)..(497): Xaa in position 495 to 497 is any amino acid
  Variant (499)..(499): Xaa in position 499 is any amino acid
WXXXXXXXPXXXXXXXXXXGXXXXXXXXXXXXXXXXXXXXXXXXXXXXXXXXXXXXXXXXXXXXXXXXXXXXXXXXXXXXXXXXXXXXXXXXXXXXXXXXXXXXXXXXXXXXXXXXAXXXXXXXXXIXXXXXXXXXXXXXLXXXXXXGVXXXXXXDXXGXXXXXXXXXXXXXXXXXXXXXXXXXXXXGXXXXXXXXXXXXXXXXXXXXXXXXXRXHRKXXXXDXXXXXXGGXNXXXXXXXXXXXXXXXXXXXXXXXXXWXDXXXXXXGXXXXXXXXXFXXXWXXXXXXXXXXXXXXXXXXXXXXXXXXXXXXXXXXXXXXXXXXXXXXXXXXXXXXXXXXXXXXXXXXXXXXPXXXXXXXXXXXXXXXXXXXXXXXAXXXXXXXXPYXXPXXXXXXXXXXXAXXXXGXXVXXXXPXXXDXXXXXXXXXXXXXXXXXXXXGXXXXXXXXXXXXXXXXXXXXXXXXHXKXXXXDXXXXXXXXXXXXXGXXNXDXRSXXXNXE

SEQ ID NO: 99185 - protein, 24 aa, Artificial sequence
  protein pattern
  Variant (2)..(2): Xaa in position 2 is any amino acid
  Variant (3)..(6): Xaa in position 3 to 6 is any or no amino acid
  Variant (10)..(10): Xaa in position 10 is Ile, Leu or Met
  Variant (11)..(11): Xaa in position 11 is any amino acid
  Variant (12)..(12): Xaa in position 12 is Ile, Leu, Met or Val
  Variant (13)..(13): Xaa in position 13 is any amino acid
  Variant (15)..(20): Xaa in position 15 to 20 is any amino acid
  Variant (22)..(22): Xaa in position 22 is Gly or Ser
  Variant (23)..(23): Xaa in position 23 is any amino acid
RXXXXXHRKXXXXDXXXXXXGXXN

SEQ ID NO: 99186 - protein, 17 aa, Artificial sequence
  protein pattern
  Variant (2)..(2): Xaa in position 2 is Ser or Thr
  Variant (3)..(3): Xaa in position 3 is any amino acid
  Variant (5)..(5): Xaa in position 5 is Phe, Ile, Leu or Met
  Variant (7)..(7): Xaa in position 7 is any amino acid
  Variant (10)..(11): Xaa in position 10 to 11 is any or no amino acid
  Variant (13)..(14): Xaa in position 13 to 14 is any amino acid
  Variant (15)..(16): Xaa in position 15 to 16 is any or no amino acid
GXXNXDXRSXXLXXXXE

SEQ ID NO: 99187 - protein, 24 aa, Artificial sequence
  protein pattern
  Variant (2)..(2): Xaa in position 2 is Phe or Leu
  Variant (3)..(3): Xaa in position 3 is Ile, Leu or Val
  Variant (4)..(4): Xaa in position 4 is Ile, Leu or Pro
  Variant (5)..(5): Xaa in position 5 is Asp, Gly, Asn, Pro, Ser or Thr
  Variant (6)..(14): Xaa in position 6 to 14 is any amino acid
  Variant (16)..(18): Xaa in position 16 to 18 is any amino acid
  Variant (20)..(21): Xaa in position 20 to 21 is any or no amino acid
  Variant (23)..(23): Xaa in position 23 is any amino acid
  Variant (24)..(24): Xaa in position 24 is Ile, Leu or Val
YXXXXXXXXXXXXXAXXXGXXVXX

SEQ ID NO: 99188 - DNA, 240 bp, Escherichia coli
  CDS (1)..(240): transl_table=11
atggcgcctgccagaggtgatgcgatggcacaagtaatctttaatgaagagtggatggttgaatacggcctgatgcttcgcactggtctgggggccagacaaattgaagcataccgccagaactgttgggtggagggcttccacttcaaacgagtatctcctttaggtaagccagacagcaaacgagggattatctggtacaactatccaaagataaatcagtttatcaaagactcataa

SEQ ID NO: 99189 - protein, 79 aa, Escherichia coli
MAPARGDAMAQVIFNEEWMVEYGLMLRTGLGARQIEAYRQNCWVEGFHFKRVSPLGKPDSKRGIIWYNYPKINQFIKDS

SEQ ID NO: 99190 - DNA, 168 bp, Shigella flexneri 2a str. 301
  CDS (1)..(168): transl_table=11
atgcttcgcactggtctgggtgccagacaaattgaagcataccgccagaactgttgggtggaaggcttccacttcaaacgagtatctcctttagggaagccagacagtaagcgagggattatctggtacaactatccgaagataaatcagtttatcaaagactcatga

SEQ ID NO: 99191 - protein, 55 aa, Shigella flexneri 2a str. 301
MLRTGLGARQIEAYRQNCWVEGFHFKRVSPLGKPDSKRGIIWYNYPKINQFIKDS

SEQ ID NO: 99192 - DNA, 216 bp, Escherichia coli
  CDS (1)..(216): transl_table=11
atggcacaagtaatctttaatgaagagtggatggttgaatacggcctgatgcttcgcactggtctgggggccagacaaattgaagcataccgccagaactgttgggtggaaggcttccacttcaaacgagtatctcctttagggaagccagacagtaagcgagggattatctggtacaactatccaaagataaatcagtttatcaaagactcatga

SEQ ID NO: 99193 - protein, 71 aa, Escherichia coli
MAQVIFNEEWMVEYGLMLRTGLGARQIEAYRQNCWVEGFHFKRVSPLGKPDSKRGIIWYNYPKINQFIKDS

SEQ ID NO: 99194 - DNA, 22 bp, Artificial sequence
  primer
atggcgcctgccagaggtgatg

SEQ ID NO: 99195 - DNA, 28 bp, Artificial sequence
  primer
ttatgagtctttgataaactgatttatc

SEQ ID NO: 99196 - DNA, 183 bp, Escherichia coli
  CDS (1)..(183): transl_table=11
atgggcaaagcaacgtataccgtgaccgtcaccaataacagcaatggcgtttctgtcgattatgaaacagagacgccgatgactttgctggtgccagaagtggcggctgaagtgataaaagatctggtgaataccgtacgttcttatgacacggaaaacgaacatgatgtttgtggttggtaa

SEQ ID NO: 99197 - protein, 60 aa, Escherichia coli
MGKATYTVTVTNNSNGVSVDYETETPMTLLVPEVAAEVIKDLVNTVRSYDTENEHDVCGW

SEQ ID NO: 99198 - DNA, 252 bp, Klebsiella pneumoniae subsp. pneumoniae MGH 78578
  CDS (1)..(252): transl_table=11
atggtgttgtatattccacagcaggcggtggaggccgttaatgacctgctgagcaagttgccggacgacagggaagagggggagtttctgttgacggtcaccaataacaataacggcgtctcggttgataaaaccttttcctcgctggcggcgctgcgcgacccgctcaccgccgctgatacggtgaaggatctgatcaatatcgttcgcggctacgagtccgatgaagagaccaacgtctgcggctggtaa

SEQ ID NO: 99199 - protein, 83 aa, Klebsiella pneumoniae subsp. pneumoniae MGH 78578
MVLYIPQQAVEAVNDLLSKLPDDREEGEFLLTVTNNNNGVSVDKTFSSLAALRDPLTAADTVKDLINIVRGYESDEETNVCGW

SEQ ID NO: 99200 - DNA, 183 bp, Salmonella enterica subsp. enterica serovar Typhi str. CT18
  CDS (1)..(183): transl_table=11
atgggaaaagctacttataccgtcacggtcacgaataatagcaacggcgtctctgtggactatgaaacggaagcaccgatgacgttgctggtacctgaagttacagcagaagttgtgaaggatttggtcaataccgtgcgttcctacgataccgaaaacgaacacgacgtttgcggttggtaa

SEQ ID NO: 99201 - protein, 60 aa, Salmonella enterica subsp. enterica serovar Typhi str. CT18
MGKATYTVTVTNNSNGVSVDYETEAPMTLLVPEVTAEVVKDLVNTVRSYDTENEHDVCGW

SEQ ID NO: 99202 - DNA, 183 bp, Salmonella typhimurium LT2
  CDS (1)..(183): transl_table=11
atgggaaaagctacttataccgtcacggtcacgaataatagcaacggcgtctctgtggactatgaaacggaagcaccgatgacgttgctggtacctgaagttgcagcagaagttgtgaaggatttggtcaataccgtgcgttcctacgataccgaaaacgaacacgacgtttgcggttggtaa

SEQ ID NO: 99203 - protein, 60 aa, Salmonella typhimurium LT2
MGKATYTVTVTNNSNGVSVDYETEAPMTLLVPEVAAEVVKDLVNTVRSYDTENEHDVCGW

SEQ ID NO: 99204 - DNA, 255 bp, Erwinia carotovora subsp. atroseptica SCRI1043
  CDS (1)..(255): transl_table=11
atggctttttatgtacccgatttcgctgccggtgcggttgatgaattagtcaacaatctgtctttaaccagcgataataacaacggatttttgctgacagtaaccaataataataatggcgtatccgttgataaggatttctccgcgcttgcagaattaaaagataagacgatttccgctgaatcggtgaaagaactggttaatatcgtacgtggttacgatgcggatgaagaaactaacgtctgcggctggtaa

SEQ ID NO: 99205 - protein, 84 aa, Erwinia carotovora subsp. atroseptica SCRI1043
MAFYVPDFAAGAVDELVNNLSLTSDNNNGFLLTVTNNNNGVSVDKDFSALAELKDKTISAESVKELVNIVRGYDADEETNVCGW

SEQ ID NO: 99206 - DNA, 22 bp, Artificial sequence
  primer
atgggcaaagcaacgtataccg

SEQ ID NO: 99207 - DNA, 25 bp, Artificial sequence
  primer
ttaccaaccacaaacatcatgttcg

SEQ ID NO: 99208 - protein, 52 aa, Artificial sequence
  consensus sequence
  Variant (6)..(6): Xaa in position 6 is any amino acid
  Variant (13)..(20): Xaa in position 13 to 20 is any amino acid
  Variant (22)..(23): Xaa in position 22 to 23 is any amino acid
  Variant (25)..(27): Xaa in position 25 to 27 is any amino acid
  Variant (30)..(30): Xaa in position 30 is any amino acid
  Variant (37)..(37): Xaa in position 37 is any amino acid
  Variant (40)..(40): Xaa in position 40 is any amino acid
  Variant (43)..(45): Xaa in position 43 to 45 is any amino acid
  Variant (47)..(48): Xaa in position 47 to 48 is any amino acid
TVTNNXNGVSVDXXXXXXXXLXXPXXXAEXVKDLVNXVRXYDXXXEXXVCGW

SEQ ID NO: 99209 - protein, 53 aa, Artificial sequence
  protein pattern
  Variant (2)..(6): Xaa in position 2 to 6 is any amino acid
  Variant (7)..(8): Xaa in position 7 to 8 is any or no amino acid
  Variant (14)..(14): Xaa in position 14 is any amino acid
  Variant (15)..(15): Xaa in position 15 is Glu or Thr
  Variant (16)..(16): Xaa in position 16 is any amino acid
  Variant (17)..(17): Xaa in position 17 is Glu or Ser
  Variant (18)..(18): Xaa in position 18 is Ala, Ser or Thr
  Variant (19)..(19): Xaa in position 19 is Leu or Pro
  Variant (20)..(20): Xaa in position 20 is any amino acid
  Variant (21)..(21): Xaa in position 21 is Ala or Thr
  Variant (23)..(23): Xaa in position 23 is any amino acid
  Variant (24)..(24): Xaa in position 24 is Asp or Val
  Variant (26)..(26): Xaa in position 26 is any amino acid
  Variant (27)..(27): Xaa in position 27 is Thr or Val
  Variant (28)..(28): Xaa in position 28 is Ala or Thr
  Variant (30)..(30): Xaa in position 30 is Asp or Glu
  Variant (31)..(31): Xaa in position 31 is Thr or Val
  Variant (32)..(32): Xaa in position 32 is Ile or Val
  Variant (36)..(36): Xaa in position 36 is Ile or Val
  Variant (38)..(38): Xaa in position 38 is any amino acid
  Variant (41)..(41): Xaa in position 41 is Gly or Ser
  Variant (43)..(43): Xaa in position 43 is Asp or Glu
  Variant (44)..(44): Xaa in position 44 is Ser or Thr
  Variant (45)..(45): Xaa in position 45 is Asp or Glu
  Variant (46)..(46): Xaa in position 46 is Glu or Asn
  Variant (48)..(48): Xaa in position 48 is any amino acid
  Variant (49)..(49): Xaa in position 49 is Asp or Asn
VXXXXXXXGVSVDXXXXXXXXLXXPXXXAXXXKDLXNXVRXYXXXXEXXVCGW

SEQ ID NO: 99210 - DNA, 1662 bp, Escherichia coli
  CDS (1)..(1662): transl_table=11
atgattaaccgtatccgcgtagtcacgctgttggtaatggtgctgggggtattcgcactgttacagcttatttccggcagtctgtttttttcttcccttcaccatagccagaagagctttgtggtttccaatcaattacgggaacagcagggcgagctgacgtcaacctgggatttaatgctgcaaacgcgcattaacctgagtcgttcagcggtacggatgatgatggattcctccaatcaacaaagtaacgccaaagttgaattgctcgatagcgccaggaaaacattggcgcaggcagcgacgcattataaaaaattcaaaagcatggcaccgttacctgaaatggtcgctaccagtcgtaatattgatgaaaaatataaaaactattacacagcgttaactgaactgattgattatctagattatggcaatactggagcttatttcgctcagccaacccagggaatgcaaaatgcaatgggcgaagcgtttgctcagtacgccctcagcagtgaaaaactgtatcgcgatatcgtcactgacaacgcagatgattaccgatttgcccagtggcaactggcggttatcgcgctggtggtggtattgattctgctggtggcgtggtacggcattcgccgtatgttgcttactccgctggcaaaaattattgctcacattcgcgaaatcgccggtggtaacctggcgaataccctgaccattgacgggcgcagtgaaatgggcgacctggcgcagagcgtttcacatatgcaacgctctttgactgacaccgtcactcatgtccgcgaaggttcagatgccatctatgccggtacccgtgaaattgcggcgggcaacaccgatctttcctcccgtactgaacagcaggcatccgcgctggaagaaactgccgccagcatggagcagctcaccgcgacagtgaagcaaaacgccgataacgcccgccaggcctcgcaactggcgcaaagtgcctccgacaccgcccagcacggcggcaaagtggtggatggcgtagtgaaaacgatgcatgagatcgccgatagttcgaagaaaattgccgacattatcagcgttatcgacggtattgccttccagactaatatcctcgcgctgaatgccgcggttgaagccgcgcgtgcgggtgaacagggccgtggttttgccgtggtggcgggtgaagtgcgtaatcttgccagtcgcagcgcccaggcggcaaaagagatcaaagccctcattgaagactccgtctcacgcgttgataccggttcggtgctggtcgaaagcgccggggaaacaatgaacaatatcgtcaatgctgtcactcgcgtgactgacattatgggcgagattgcatcggcatcggatgaacagagccgtggcatcgatcaagtcgcattggcggtttcggaaatggatcgcgtcacgcaacagaacgcatcgctggtgcaggaatcagctgccgccgccgctgcgctggaagaacaggcgagtcgtttaacgcaagcagtttccgcgttccgtctggcagccagcccactcaccaataaaccgcaaacaccatcccgtcctgccagtgagcaaccaccggctcagccacgactgcgaattgctgaacaagatccaaactgggaaacattttaa

SEQ ID NO: 99211 - protein, 553 aa, Escherichia coli
MINRIRVVTLLVMVLGVFALLQLISGSLFFSSLHHSQKSFVVSNQLREQQGELTSTWDLMLQTRINLSRSAVRMMMDSSNQQSNAKVELLDSARKTLAQAATHYKKFKSMAPLPEMVATSRNIDEKYKNYYTALTELIDYLDYGNTGAYFAQPTQGMQNAMGEAFAQYALSSEKLYRDIVTDNADDYRFAQWQLAVIALVVVLILLVAWYGIRRMLLTPLAKIIAHIREIAGGNLANTLTIDGRSEMGDLAQSVSHMQRSLTDTVTHVREGSDAIYAGTREIAAGNTDLSSRTEQQASALEETAASMEQLTATVKQNADNARQASQLAQSASDTAQHGGKVVDGVVKTMHEIADSSKKIADIISVIDGIAFQTNILALNAAVEAARAGEQGRGFAVVAGEVRNLASRSAQAAKEIKALIEDSVSRVDTGSVLVESAGETMNNIVNAVTRVTDIMGEIASASDEQSRGIDQVALAVSEMDRVTQQNASLVQESAAAAAALEEQASRLTQAVSAFRLAASPLTNKPQTPSRPASEQPPAQPRLRIAEQDPNWETF

SEQ ID NO: 99212 - DNA, 1665 bp, Escherichia coli
  CDS (1)..(1665): transl_table=11
atgttaaaacgtatcaagatcgtgaccagcttactgctggttttggccgtttttggccttttacaactgacatcaggcggtctgttctttaatgccttaaagaatgacaaagaaaatttcactgttttacaaaccattcgccagcagcaatccacgctgaatggcagctgggtcgcgttgttgcagacgcgtaacaccctcaaccgcgcgggtatccgctacatgatggatcagaataatattggtagcggttcaaccgttgctgagctgatgcagagtgccagtatttcgttgaaacaggcggaaaaaaactgggcagattacgaagcgttgccgcgtgacccgcgtcagagcaccgccgcagcggcagagatcaaacgtaattacgatatttatcacaatgcgctggcggagctgatccaactgttaggtgcaggcaaaatcaacgagttctttgatcagccgacccagggatatcaggacggtttcgagaagcagtatgtggcttacatggagcaaaacgatcggctctatgatatcgccgtcagcgataacaatgcctcctacagccaggcgatgtggattctggtgggcgtgatgatcgtcgtactggcggtcatcttcgccgtctggttcggtattaaagcctcgctggtagcgccaatgaatcgcctgattgacagcattcgtcatattgcaggcggcgatctggtgaaaccgattgaggtggatggctctaatgagatggggcaactggcagagagtttgcgccatatgcagggagagctgatgcgtaccgtcggtgatgtgcgcaacggggccaatgccatctatagcggtgccagcgaaatcgctaccggcaataacgatctctcttcgcgcaccgagcaacaggccgcttcgctggaagagacggcagccagcatggagcaactcaccgcaacggtgaaacagaacgccgagaatgcgcgccaggccagccacctggcgttaagtgcttctgaaacggcgcaacgcggcggcaaagtggtagataacgtggtgcagactatgcgtgatatctccaccagttcgcagaaaatcgccgatattatcagcgtaattgacggcattgccttccagaccaatattctggctttgaacgcggcggttgaagcagcgcgtgcgggtgagcaaggacgtggttttgcggtggttgcgggagaagtgcgtaatctggcccagcgtagcgcccaggcggctcgtgaaattaaaagcctgattgaagactcggtggggaaagtggatgttggctctacgctggtcgaaagcgccggggaaacaatggcggagattgtcagtgctgtgacccgcgtgacggacattatgggcgaaatagcttctgcttctgatgagcagagccgtggtatcgatcaggttggcttagcggttgctgagatggaccgggtaactcaacagaacgctgcgctggtggaagagtctgccgctgccgccgccgcgttggaagagcaggccagtcgcctgaccgaagctgtggcagtgttccggattcagcaacagcagcaacagcagcgtgaaacatcggctgtggtaaaaaccgtgacgccagctacgccgcgtaaaatggcagtggcagatagcggggagaactgggaaacgttttaa

SEQ ID NO: 99213 - protein, 554 aa, Escherichia coli
MLKRIKIVTSLLLVLAVFGLLQLTSGGLFFNALKNDKENFTVLQTIRQQQSTLNGSWVALLQTRNTLNRAGIRYMMDQNNIGSGSTVAELMQSASISLKQAEKNWADYEALPRDPRQSTAAAAEIKRNYDIYHNALAELIQLLGAGKINEFFDQPTQGYQDGFEKQYVAYMEQNDRLYDIAVSDNNASYSQAMWILVGVMIVVLAVIFAVWFGIKASLVAPMNRLIDSIRHIAGGDLVKPIEVDGSNEMGQLAESLRHMQGELMRTVGDVRNGANAIYSGASEIATGNNDLSSRTEQQAASLEETAASMEQLTATVKQNAENARQASHLALSASETAQRGGKVVDNVVQTMRDISTSSQKIADIISVIDGIAFQTNILALNAAVEAARAGEQGRGFAVVAGEVRNLAQRSAQAAREIKSLIEDSVGKVDVGSTLVESAGETMAEIVSAVTRVTDIMGEIASASDEQSRGIDQVGLAVAEMDRVTQQNAALVEESAAAAAALEEQASRLTEAVAVFRIQQQQQQQRETSAVVKTVTPATPRKMAVADSGENWETF

SEQ ID NO: 99214 - DNA, 1641 bp, Escherichia coli O157:H7 EDL933
  CDS (1)..(1641): transl_table=11
atgaatacaactccctcacagcgattaggttttttgcatcacatcaggttggttccgttatttgcctgcattctaggcggtatcttagttctattcgcattaagttcagccctggctggctatttcctctggcaggccgatcgcgatcagcgtgatgttactgcggagattgagattcggaccgggttagcgaacagttcagattttttgcgttcagcccggatcaatatgattcaggccggggctgcgagtcgtattgcggaaatggaagcaatgaagcgaaatattgcgcaagccgaatcggagattaaacagtcgcagcaaggttatcgtgcttatcagaatcggccggtgaaaacacctgctgatgaagccctcgacactgaattaaatcaacgctttcaggcttatatcacgggtatgcaacctatgttgaaatatgccaaaaatggcatgtttgaagcgattatcaatcatgaaagtgagcagatccgaacgctggataatgcttataccgatattttgaacaaagccgttaagatacgtagcaccagagccaaccaactggcggaactggcccatcagcgcacccgcctgggcgggatgttcatgattggtgcgtttgtgcttgccctggtcatgacgctgataacatttatggtgctacgtcggatcgtcattcgtccactgcaacatgccgcacaacggattgaaaaaatcgctagtggcgatctgacgatgaaggatgaaccggcgggtcgtaatgaaatcggtcgcttaagtcgtcatttacagcaaatgcagcattcactggggatgaccgtagggactgttcgacagggtgcggaagagatttatcgtggcaccagcgaaatttcagctggcaatgcggacctgtcatctcgcaccgaagaacaagcggcggctatcgaacaaactgccgccagcatggagcaactcactgcgacggtgaaacagaatgcggataacgcgcattatgccagcaaactggcgcaagaggcttctattaaagccagcgatggcgggcagacggtttccggtgtagtaaaaacgatgggcgctatctccacgagttcgaagaaaatttctgagatcaccgccgtcatcaacagtattgctttccagacgaatattctggcactgaatgctgccgttgaagctgcgcgagcgggtgagcaagggcgtggatttgccgttgtcgccagcgaagtacggacactcgcaagccgcagcgcccaggcggcaaaagaaattgaaggcttgatcagtgaatcagtcaggttaattgacctgggatcggatgaggtggcaacggccgggaaaaccatgagcactattgttgatgccgtcgcgagtgtcacacatatcatgcaggaaattgccgccgcctcggatgagcaaagtaggggcataacgcaggttagccaggcgatttctgaaatggataaggtgacgcaacagaatgcttctctggtagaagaggcctcagcggcggcggtgtcccttgaagaacaggcggcacgattaactgaggcggtggacgtattccgtctgaacaaacaatctgtgttggcagaacctcgcggagcgggtgaaccagttagtttcgctccggtgtga

SEQ ID NO: 99215 - protein, 546 aa, Escherichia coli O157:H7 EDL933
MNTTPSQRLGFLHHIRLVPLFACILGGILVLFALSSALAGYFLWQADRDQRDVTAEIEIRTGLANSSDFLRSARINMIQAGAASRIAEMEAMKRNIAQAESEIKQSQQGYRAYQNRPVKTPADEALDTELNQRFQAYITGMQPMLKYAKNGMFEAIINHESEQIRTLDNAYTDILNKAVKIRSTRANQLAELAHQRTRLGGMFMIGAFVLALVMTLITFMVLRRIVIRPLQHAAQRIEKIASGDLTMKDEPAGRNEIGRLSRHLQQMQHSLGMTVGTVRQGAEEIYRGTSEISAGNADLSSRTEEQAAAIEQTAASMEQLTATVKQNADNAHYASKLAQEASIKASDGGQTVSGVVKTMGAISTSSKKISEITAVINSIAFQTNILALNAAVEAARAGEQGRGFAVVASEVRTLASRSAQAAKEIEGLISESVRLIDLGSDEVATAGKTMSTIVDAVASVTHIMQEIAAASDEQSRGITQVSQAISEMDKVTQQNASLVEEASAAAVSLEEQAARLTEAVDVFRLNKQSVLAEPRGAGEPVSFAPV

SEQ ID NO: 99216 - DNA, 1602 bp, Escherichia coli O157:H7 EDL933
  CDS (1)..(1602): transl_table=11
atgtttaatcgtattcgaatttcgaccacgctgtttttaattttgattctctgcgggatcttgcagattggcagtaacggcatgtctttttgggcatttcgcgacgatttgcaacgactgaatcaggtcgagcagagcaatcagcaacgtgcggcattagcgcaaactcgggcggtaatgttacaggccagtaccacgctgaacaaagcaggcactctgacagcgcttagctatccggcggatgacattaaaacgttgatgacgacggcgcgtgccagtctgacgcaatccaccacgctgtttaaaagttttatggcgatgactgcgggcaacgagcacgtcagggcattgcaaaaagagacggagaaaagttttgcccgctggcacaacgatctcgaacatcaggcgacctggcttgaaagtaatcaactttcggatttcctcactgcgccggtgcagggatcacagaatgcgtttgacgttaactttgaggcctggcagctggagatcatccatgtgctggaagccgccagtgcgcaaagccagcgtaactatcagatttcggcgctggtgtttatcagcatgattattgttgcggcgatctacatcagcagtgcgctgtggtggacgcgcaagatgattgttcaaccactggccattatcggtagccattttgacagcattgctgcgggtaatctggcgcgtccgattgcggtatatggtcgtaatgagatcaccgccatttttgccagcctgaagaccatgcagcaggctttgcgtgggacggtaagtgatgtgcgtaagggaagccaggagatgcacattggtatcgcggagattgtcgcaggcaataacgatctctcaagtcgtaccgaacagcaggcggcatcgctggcacaaacggccgccagtatggagcaattaaccgccacggtagggcaaaacgccgataacgcacgacaggcgtcggaacttgcaaaaaatgccgcgacaacggcgcaggcgggcggtgttcaggtcagtaccatgactcacaccatgcaggagatcgccaccagctcgcaaaaaattggcgacattatcagcgttatcgacggaattgctttccagaccaatattctggccctgaatgcggcagtagaagcggctcgcgccggagagcaggggcgtggttttgcggtagtggcaggagaagtgcgcaatcttgccagccgaagcgcccaggcggcaaaagagatcaaagggctgatcgaagagtcagtcaatcgtgtccagcagggttcgaaactggtgaataacgccgccgcgaccatgaccgatattgtcagttcggtgacccgcgtgaacgacattatgggagaaattgcttcggcctcggaagaacaacggcgggggattgagcaggttgcgcaggctgtcagccagatggatcaggtgacacagcagaacgcctcgctggtagaagaagcggcggtggcaacggaacaactggcgaatcaggccgaccatctttcgtcgcgtgtggcggtatttacccttgaagaacatgaagtagcacgacatgagtcggcgcagttacaaattgcgccagtggtatcctga

SEQ ID NO: 99217 - protein, 533 aa, Escherichia coli O157:H7 EDL933
MFNRIRISTTLFLILILCGILQIGSNGMSFWAFRDDLQRLNQVEQSNQQRAALAQTRAVMLQASTTLNKAGTLTALSYPADDIKTLMTTARASLTQSTTLFKSFMAMTAGNEHVRALQKETEKSFARWHNDLEHQATWLESNQLSDFLTAPVQGSQNAFDVNFEAWQLEIIHVLEAASAQSQRNYQISALVFISMIIVAAIYISSALWWTRKMIVQPLAIIGSHFDSIAAGNLARPIAVYGRNEITAIFASLKTMQQALRGTVSDVRKGSQEMHIGIAEIVAGNNDLSSRTEQQAASLAQTAASMEQLTATVGQNADNARQASELAKNAATTAQAGGVQVSTMTHTMQEIATSSQKIGDIISVIDGIAFQTNILALNAAVEAARAGEQGRGFAVVAGEVRNLASRSAQAAKEIKGLIEESVNRVQQGSKLVNNAAATMTDIVSSVTRVNDIMGEIASASEEQRRGIEQVAQAVSQMDQVTQQNASLVEEAAVATEQLANQADHLSSRVAVFTLEEHEVARHESAQLQIAPVVS

SEQ ID NO: 99218 - DNA, 1662 bp, Escherichia coli O157:H7 EDL933
  CDS (1)..(1662): transl_table=11
  misc_feature (1036)..(1036): k is g or t
atgattaaccgtatccgcgtagtcacgctgttggtaatggtgctgggggtattcgcactgttacagcttatttccggcagtctgtttttttcttcccttcaccatagccagaagagctttgtggtttccaatcaattacgagaacagcagggcgagctgacgtcaacctgggatttaatgctgcaaacgcgcattaacctgagtcgttcagcggtgcgaatgatgatggattcctccaatcaacaaagtaatgccaaagttgaattgctcgatagcgccaggaaaacattggcccaggccgcgactcattataaaaaattcaaaagcatggcaccgttacctgaaatggtcgctaccagtcgtaatattgatgaaaaatataaaaactattacacagcgttaactgaactgattgattatcttgattatggcaatactggagcttatttcgctcagccaacccagggaatgcaaaatgcaatgggcgaagcgtttgctcagtacgccctcagcagtgaaaaactgtatcgcgatatcgtcactgacaacgcagatgattaccgatttgcccagtggcaactggcggttatcgcgctggtggtggtattgattctgctggtggcgtggtatggcattcgccgtatgttgcttacaccgctggcaaaaattattgctcacattcgcgaaatcgccggtggtaacctggcgaataccctgaccattgacgggcgcagtgaaatgggcgacctggcgcagagcgtttcacatatgcaacgctctttgactgacaccgtcactcatgtccgcgaaggttcagatgccatctatgccggtacccgtgaaattgcggcgggcaacaccgatctttcctcccgtacggaacagcaggcatccgcgctggaagaaactgccgccagcatggagcagctcaccgcgacagtgaagcaaaacgccgataacgcccgccaggcctcgcaactggcgcaaagtgcctccgacaccgcccagcacggcggcaaagtggtggatggcgtaktgaaaacgatgcatgagatcgccgatagttcgaagaaaatcgccgacattatcagcgtaatcgacggtattgccttccagactaatatcctcgcgctgaatgccgctgttgaagccgcgcgagcgggtgaacagggccgtggttttgccgtggtggcgggcgaagtgcgtaatcttgccagtcgtagcgcccaggcggcaaaagagatcaaagctctcattgaagactccgtctcgcgcgttgataccggttcggtgctggtcgaaagcgccggggaaacaatgaacaatatcgtcgatgctgtcactcgcgtgactgacattatgggcgagattgcatcggcatcggatgaacagagccgtggcattgatcaagtcgcattggcggtttcggaaatggatcacgtcacgcaacagaacgcatcgctggtgcaggaatcagctgccgctgcagctgcgctggaagaacaggctagtcgtttaacgcaagcggtttccgcgtttcgtctggcagccagcccactcaccaataaaccgcaaacaccatcccgtcctgccagtgagcaaccaccggcacagccacgactgcgaattgctgaacaagatccaaactgggaaacattttga

SEQ ID NO: 99219 - protein, 553 aa, Escherichia coli O157:H7 EDL933
  misc_feature (346)..(346): The Xaa at location 346 stands for Leu, or Val.
MINRIRVVTLLVMVLGVFALLQLISGSLFFSSLHHSQKSFVVSNQLREQQGELTSTWDLMLQTRINLSRSAVRMMMDSSNQQSNAKVELLDSARKTLAQAATHYKKFKSMAPLPEMVATSRNIDEKYKNYYTALTELIDYLDYGNTGAYFAQPTQGMQNAMGEAFAQYALSSEKLYRDIVTDNADDYRFAQWQLAVIALVVVLILLVAWYGIRRMLLTPLAKIIAHIREIAGGNLANTLTIDGRSEMGDLAQSVSHMQRSLTDTVTHVREGSDAIYAGTREIAAGNTDLSSRTEQQASALEETAASMEQLTATVKQNADNARQASQLAQSASDTAQHGGKVVDGVXKTMHEIADSSKKIADIISVIDGIAFQTNILALNAAVEAARAGEQGRGFAVVAGEVRNLASRSAQAAKEIKALIEDSVSRVDTGSVLVESAGETMNNIVDAVTRVTDIMGEIASASDEQSRGIDQVALAVSEMDHVTQQNASLVQESAAAAAALEEQASRLTQAVSAFRLAASPLTNKPQTPSRPASEQPPAQPRLRIAEQDPNWETF

SEQ ID NO: 99220 - DNA, 1665 bp, Escherichia coli O157:H7 EDL933
  CDS (1)..(1665): transl_table=11
  misc_feature (875)..(875): y is t or c
  misc_feature (1269)..(1269): y is t or c
atgttaaaacgtatcaagatcgtgaccagcttactgctggttttggccgtttttggccttttacaactgacatcaggcggtctgttctttaatgccttaaagaatgacaaagaaaatttcactgttttacaaaccattcgccagcagcaatccacgctgaatggcagctgggtcgcgttgttgcagacgcgtaacaccctcaaccgcgcgggtatccgctacatgatggatcagaataatattggtagcggttcaaccgttgctgagctgatgcagagtgccagtatttcgttgaaacaggcggaaaaaaactgggcagattacgaagcgttgccgcgtgacccgcgtcagagcaccgccgcagcggcagagatcaaacgtaattacgatatttatcacaatgcgctggcggagctgatccaactgttaggtgcaggcaaaatcaacgagttctttgatcagccgacccagggatatcaggacggtttcgagaagcagtatgtggcttacatggagcaaaacgatcggctctatgatatcgccgtcagcgataacaatgcctcctacagccaggcgatgtggattctggtgggcgtgatgatcgtcgtactggcggtcatcttcgccgtctggttcggtattaaagcctcgctggtagcgccaatgaatcgcctgattgacagcattcgtcatattgcaggcggcgatctggtgaaaccgattgaggtggatggctctaatgagatggggcaactggcagagagtttgcgccatatgcagggagagctgatgcgtaccgtcggtgatgtgcgcaacggggccaatgccatctatagcggtgccagcgaaatcgctaccggcaataacgatctctyttcgcgcaccgagcaacaggccgcttcgctggaagagacggcagccagcatggagcaactcaccgcaacggtgaaacagaacgccgagaatgcgcgccaggccagccacctggcgttaagtgcttctgaaacggcgcaacgcggcggcaaagtggtagataacgtggtgcagactatgcgtgatatctccaccagttcgcagaaaatcgccgatattatcagcgtaattgacggcattgccttccagaccaatattctggctttgaacgcggcggttgaagcagcgcgtgcgggtgagcaaggacgtggttttgcggtggttgcgggagaagtgcgtaatctggcccagcgtagcgcccaggcggctcgtgaaattaaaagcctgattgaagaytcggtggggaaagtggatgttggctctacgctggtcgaaagcgccggggaaacaatggcggagattgtcagtgctgtgacccgcgtgacggacattatgggcgaaatagcttctgcttctgatgagcagagccgtggtatcgatcaggttggcttagcggttgctgagatggaccgggtaactcaacagaacgctgcgctggtggaagagtctgccgctgccgccgccgcgttggaagagcaggccagtcgcctgaccgaagctgtggcagtgttccggattcagcaacagcagcaacagcagcgtgaaacatcggctgtggtaaaaaccgtgacgccagctacgccgcgtaaaatggcagtggcagatagcggggagaactgggaaacgttttaa

SEQ ID NO: 99221 - protein, 554 aa, Escherichia coli O157:H7 EDL933
  misc_feature (292)..(292): The Xaa at location 292 stands for Phe, or Ser.
MLKRIKIVTSLLLVLAVFGLLQLTSGGLFFNALKNDKENFTVLQTIRQQQSTLNGSWVALLQTRNTLNRAGIRYMMDQNNIGSGSTVAELMQSASISLKQAEKNWADYEALPRDPRQSTAAAAEIKRNYDIYHNALAELIQLLGAGKINEFFDQPTQGYQDGFEKQYVAYMEQNDRLYDIAVSDNNASYSQAMWILVGVMIVVLAVIFAVWFGIKASLVAPMNRLIDSIRHIAGGDLVKPIEVDGSNEMGQLAESLRHMQGELMRTVGDVRNGANAIYSGASEIATGNNDLXSRTEQQAASLEETAASMEQLTATVKQNAENARQASHLALSASETAQRGGKVVDNVVQTMRDISTSSQKIADIISVIDGIAFQTNILALNAAVEAARAGEQGRGFAVVAGEVRNLAQRSAQAAREIKSLIEDSVGKVDVGSTLVESAGETMAEIVSAVTRVTDIMGEIASASDEQSRGIDQVGLAVAEMDRVTQQNAALVEESAAAAAALEEQASRLTEAVAVFRIQQQQQQQRETSAVVKTVTPATPRKMAVADSGENWETF

SEQ ID NO: 99222 - DNA, 1626 bp, Salmonella typhimurium LT2
  CDS (1)..(1626): transl_table=11
atgggcaacacattctcgatgcaagcctcgcataaactgggcttcctgcatcatattcggctggttccgctgttttcctccattctcggtggcatccttcttctttttgctttgagcgccgggctggcaggctattttctgttacaggccgatcgcgatcagcgtgatgtcacggacgagattcaggtacggatgggattatccaacagcgctaaccacttacgtaccgcacgtatcaatatgatccacgctggcgcggcgagccggattgctgaaatggatgaaatgaaagccaatattgccgctgcggaaacgcggatcaagcagtctcaggacggctttaacgcttatatgtccagagcggtgaaaacacccgccgatgacgcgttagataacgagttaaacgcccgctacaccgcctatatcaacggcctgcaaccgatgctgaaatttgccaaaaatggcatgttcgaagcgatcattaatcatgaaaacgagcaggcaaaacaactggatgccgcatataaccatgtcctgttgaaagcgattgaactgcgcaccgagcgggcgagactacttagcgagcaggcttaccaacgtacccggctcggtatgatgtttatgattggcgcatttacgttggcgctggtattgacgttaatgaccttcatggtgctgcgtcgcacggtgatacaacccttgcagcagtctgcgtcacgtatcgaacgcattgcggccggcgatctgaccatggctgacgagcccacaggacgcagtgaaattggtcgcctgagccatcatcttcagcagatgcagcatgcgttgcaacaaacggtaggggcggtgcgtcagggggcggaggaaatttatcgaggcaccagcgaaattaccgctggtaatacggatttatcttctcgtactgaacagcaggctgccgccattgaacagaccgcggccagtatggaacagttgacggcaaccgttaagcagaatgcggataatgcgcatcacgccagcaaactggcggaagatgcttccggtaaagccagccgcggaggccagatggtttccggggtcgtacaaacgatggggaatatttccaccagctcgaaaaaaatctcggaaattaccgccgtcattaacagtatcgctttccagaccaacatcctggcgctgaacgcggcggtcgaggcggcacgcgccggggaacaaggacgcggttttgcggtggtcgccagtgaggttcgtaccctcgccagtcgcagcgcgcaggcggcaaaagagattgaaggcttgatcggcgcatcggtcagcctgattgaacaaggatctgaagaggttatcgctgcggggagcaccatgaatgagattgtggatgccgtcaaacgcgtcaccgatattatgctcgacatcgcggcagcctctgatgagcaaagtcgcggtattgttcaggtcagtcaggctatttctgagatggacagggttacgcaacaaaacgcgtcgctggtcgaagaggcgtccgcggcggcacgttcgcttgaagaacaggctgcccgcttgacgcaagccgttgatgcgtttcgtttacatgatactggcgcgacgatgcgatcatccttcctttag

SEQ ID NO: 99223 - protein, 541 aa, Salmonella typhimurium LT2
MGNTFSMQASHKLGFLHHIRLVPLFSSILGGILLLFALSAGLAGYFLLQADRDQRDVTDEIQVRMGLSNSANHLRTARINMIHAGAASRIAEMDEMKANIAAAETRIKQSQDGFNAYMSRAVKTPADDALDNELNARYTAYINGLQPMLKFAKNGMFEAIINHENEQAKQLDAAYNHVLLKAIELRTERARLLSEQAYQRTRLGMMFMIGAFTLALVLTLMTFMVLRRTVIQPLQQSASRIERIAAGDLTMADEPTGRSEIGRLSHHLQQMQHALQQTVGAVRQGAEEIYRGTSEITAGNTDLSSRTEQQAAAIEQTAASMEQLTATVKQNADNAHHASKLAEDASGKASRGGQMVSGVVQTMGNISTSSKKISEITAVINSIAFQTNILALNAAVEAARAGEQGRGFAVVASEVRTLASRSAQAAKEIEGLIGASVSLIEQGSEEVIAAGSTMNEIVDAVKRVTDIMLDIAAASDEQSRGIVQVSQAISEMDRVTQQNASLVEEASAAARSLEEQAARLTQAVDAFRLHDTGATMRSSFL

SEQ ID NO: 99224 - DNA, 1644 bp, Salmonella typhimurium LT2
  CDS (1)..(1644): transl_table=11
atgcgtttgctgcaaaactttactattcgtatggtcatgctgacgatactgggacttttttgtctactctggtcgggggtggggttatacagcgtccatgctttatccgaagtttcggaaggaaatgatattgaccggcatcttgtgcggcaaatgacggtgctaagccagggtaacgatcaatatttccgctttgttacccgccttagccgcgcgatggatgtaaaaatcggcggcggcacgcccgattttgcgcccgcccggcagtcgctcgagaatatgcgtcagaagctggaggagatgaaagcgctatcgccagggccgatgaaccctgatatctcaagggaggtcttgtccaactggcaggccttgctggagaaaggcgtcgttcctcaaatgcaactggcgcagcaaggatcgctgaccgcctggagcgaacatgccagtacggtcacgcccgcactcagtcgcgcgttcggcgccagcgcggaacggtttagtcatgaagctggcgccatgctggataacacacgtgtgatggtcgatggtaaaacctataccatccgcatcctgcttatcacggcggtgattctgggcattgctatcctgatttttaccgatcgctatctggttgcaatgatggtgaaaccgctggagcgcatccgtcagcagtttcagcgcatcgcgcaaggcgatcttagccagccgattgaagcgttggggcgtaactgcgtaggccggttggtgccgctactacgcgcgatgcaggacagtttacgcgaagccgtgagtacgatccgcgccggaagcgacaatatctggcgcggcgcgacggaaatttctaccggtaataacgatctctcttcccgaacggaagaacaggccgccgcgctggaagaaactgccgccagcatggaacagcttaccgcaacggtgaaaatgaacgccgaacacgctcgccaggcgagtcagcttgcggatgccgcctcgctaacggcaggaaaaggcggtgaactggtttccgatgtggtagaaacaatgaacggtatttccgccagttcgcagcagatcgccgaaattactaccgtgattaatagtattgctttccagaccaatattctggccttgaacgcagcggtagaagcggccagagcgggcgagcagggacgcggcttcgcggtggtcgccggtgaggtacgtaacctggccagccgcagcgcgggggcggcgaaagaaattgaagccttaattggcgaatcggtacgtcgcgtagcgcagggcgcgcagttggtccaggagaccggcgcgacgatggacgccatcctgcgcggcgtcacggaagtgacgacgattatgaaacagatcgcgtccgcctccgaagaacagagtaaaggtatttctcaggttggcgtggcgatcacgcaaatggatagcgttacgcaacaaaacgccgcgctggttgagcaggtttccgcggcggcggcggcgctggaacggcagacggaggatttgcaacgctccgtacagcagttccggctttccgctagtgagccgcaacaacgcgtaacggcgaaagcggcgcctggcgttcagagaatggcgtcggctcccgcacagtctactgatgaatgggtttccttctga

SEQ ID NO: 99225 - protein, 547 aa, Salmonella typhimurium LT2
MRLLQNFTIRMVMLTILGLFCLLWSGVGLYSVHALSEVSEGNDIDRHLVRQMTVLSQGNDQYFRFVTRLSRAMDVKIGGGTPDFAPARQSLENMRQKLEEMKALSPGPMNPDISREVLSNWQALLEKGVVPQMQLAQQGSLTAWSEHASTVTPALSRAFGASAERFSHEAGAMLDNTRVMVDGKTYTIRILLITAVILGIAILIFTDRYLVAMMVKPLERIRQQFQRIAQGDLSQPIEALGRNCVGRLVPLLRAMQDSLREAVSTIRAGSDNIWRGATEISTGNNDLSSRTEEQAAALEETAASMEQLTATVKMNAEHARQASQLADAASLTAGKGGELVSDVVETMNGISASSQQIAEITTVINSIAFQTNILALNAAVEAARAGEQGRGFAVVAGEVRNLASRSAGAAKEIEALIGESVRRVAQGAQLVQETGATMDAILRGVTEVTTIMKQIASASEEQSKGISQVGVAITQMDSVTQQNAALVEQVSAAAAALERQTEDLQRSVQQFRLSASEPQQRVTAKAAPGVQRMASAPAQSTDEWVSF

SEQ ID NO: 99226 - DNA, 1566 bp, Salmonella typhimurium LT2
  CDS (1)..(1566): transl_table=11
atgtttttgcataacattaaaatacgttcaaaattatttatggcctttggcttattcattgttctcatggtggtgagttccgctctgtctttgtttagccttgatcgggctaatacgggtatgcagaacattattaccaatgattatcccaccacggtgaaagccaatctgttaatcgataattttaatgatttcatcatcgcgcagcagctcatgttactggatgaagaggggcgctggagccagagttcgcagaaagagctggatgaaataagccagcgtattacggcgttactggatgagctttccagcaatcgtcacgatgcggcttcgcagaaaatcattaccgagatccgtgaagcgcgccagcaatacctggagtccagattccgtattttgcaagatattcaaagccataatcgtcaggcggccattcaggagatgatgaccagaacggtgcaagtgcaaaaggtctataaggacaaagttcaggaacttatcgccgttcaggatgcgcagatgcacaacgcgggcgtgcaggtcgaaggagattttaaaactaaccggacgctgttaattaccctggcgctgataagcatcgctgccggatgcgtaatgggatggtatatcgtacgttccattacccgaccgcttgatgaagcggtacgctttgccgaggcgattgccgatggcgatctgactcgccatatcaccaccgactataaagatgaaacaggcgtactactgcaagcattaatggcgatgaaaacgcgtctgctggatatcgtacaggaagtgcaaaacggttcggagagtatctccacggcggcggcgcaaattgtcgccggtaaccaggatttggccgcgcgtacggaagaacaggccagctcggttgaagaaacggcggcgtcgatggaacagattaccgccacggttaaaaacacagctgaccataccagtgaagcgaccaaactctctgccggcgccgccagcgtagtgaaaaacaatggggagatgatgaatcaagtgacgcagaaaatgcgcgtcattaacgatacggcaaatcgtatgtcggatatcatcaatatcattgattccattgcctttcagaccaatattctggcgctgaacgcggcggttgaagcggcgcgtgcgggcgaacatggacgtggttttgccgttgtcgccggagaggttcgccagttggcgcaaaagagcgcctcgtcagccagtgaaatccgtaatttgattgaagattcaaccagtcagactcaggaagggatgcacctggtggagaaagccagcgccctgattaatggcatggtggataacgtcgaagagatggatgtgatattacgcgagattgggcaggccagccgtgagcaaactgacggtatttcgcagattaacagcgcgattggcctgattgacgccgccacgcaacaaaactcctgccttgtggaagagtctgttgccgccgcggcgtcgctgaacgaacaggcgttacatttaaaagagctggttaacgtgttccgcgtccgcgaagaggacacgcagcccgcttaa

SEQ ID NO: 99227 - protein, 521 aa, Salmonella typhimurium LT2
MFLHNIKIRSKLFMAFGLFIVLMVVSSALSLFSLDRANTGMQNIITNDYPTTVKANLLIDNFNDFIIAQQLMLLDEEGRWSQSSQKELDEISQRITALLDELSSNRHDAASQKIITEIREARQQYLESRFRILQDIQSHNRQAAIQEMMTRTVQVQKVYKDKVQELIAVQDAQMHNAGVQVEGDFKTNRTLLITLALISIAAGCVMGWYIVRSITRPLDEAVRFAEAIADGDLTRHITTDYKDETGVLLQALMAMKTRLLDIVQEVQNGSESISTAAAQIVAGNQDLAARTEEQASSVEETAASMEQITATVKNTADHTSEATKLSAGAASVVKNNGEMMNQVTQKMRVINDTANRMSDIINIIDSIAFQTNILALNAAVEAARAGEHGRGFAVVAGEVRQLAQKSASSASEIRNLIEDSTSQTQEGMHLVEKASALINGMVDNVEEMDVILREIGQASREQTDGISQINSAIGLIDAATQQNSCLVEESVAAAASLNEQALHLKELVNVFRVREEDTQPA

SEQ ID NO: 99228 - DNA, 1662 bp, Salmonella typhimurium LT2
  CDS (1)..(1662): transl_table=11
atgttaaagcgaattaaaattgttaccagcttactgctggtattggcgctatttggccttttacaactgacatccggcgggctgttcttcaactcgctgaagaatgacaaagaaaacttcaccgtattgcaaactattcgtcagcagcagtctgccctgaatgcaacctgggtggagctgttgcaaacgcgtaataccctgaatcgcgcgggtatccgctggatgatggaccagagcaatattggcagcggcgcaactgtcgctgaactgatgcagggggcgaccaatacgctgaagctgaccgaaaaaaactgggagcagtatgaggcgttaccgcgcgatccacgtcagagtgaagcggctttccttgagatcaaacgaacctatgatatctaccacggcgcgttggcggagcttattcagcttcttggcgcgggtaagattaacgagttttttgatcaaccgactcaaagctatcaggacgcttttgagaagcagtacatggcctatatgcagcaaaacgatcgtctgtacgatattgctgttgaggataacaacagttcctacaaccaggcgatgtgggtactggtcagtgtgctgattgccgttctggtggtcattatcgccgtctggttcggcatcaaactgtcgcttatcgccccgatgaatcgtctgattgaaagcattcgtcatatcgccagcggcgatctggtgaagcgtatcgacgtggaaggctccaacgaaatggggcagttggctgaaaacctgcgtcatatgcaaagtgaactgatgcgtaccgtgggcgatgtacgtaacggcgcgaatgcgatctatagcggcgccagcgagattgcgatgggcaacaacgatctctcttcccgtactgagcagcaggcagcgtctctggaagagaccgccgccagtatggaacaactgaccgccaccgtgaaacagaacgccgaaaacgcccgtcaggccagtcacctggcgctgagtgcgtcagagacagcgcaaaaaggcggcaaagtggtggataacgtcgtacaaacaatgcgcgatatcgcctccagttcgcagaaaatcgccgatattatcagcgtaatcgacggtattgctttccagaccaatattctggcgctgaatgcggcggtagaagcggcgcgcgcaggcgagcagggacgcgggttcgcagtggtggccggtgaagtccgtaatctggcccagcgtagcgcgcaggcggcacgggagatcaagagtctgattgaggattccgtgagccgtgttgatgtaggttcgacgctggtcgaaagcgccggtgaaaccatggatgagatcgtcaatgcagtgacccgcgtgaccgatatcatgggcgagattgcctcggcgtctgacgagcaaagccgtggtatcgaccaggtgggcctggcggtagcggagatggatcgcgtaacgcagcagaacgcctcgctggtggaagagtccgccgccgcggctgcggcgctggaagagcaagccagccgtctgacccaggccgtcgcggtgttccgtattcaccagcaacagcagcgtgcgcgtgaagtggctgcggtaaaaaccccggcagccgtgtcgtcaccaaaggccgcagtggccgacggcagcgataattgggaaacattttaa

SEQ ID NO: 99229 - protein, 553 aa, Salmonella typhimurium LT2
MLKRIKIVTSLLLVLALFGLLQLTSGGLFFNSLKNDKENFTVLQTIRQQQSALNATWVELLQTRNTLNRAGIRWMMDQSNIGSGATVAELMQGATNTLKLTEKNWEQYEALPRDPRQSEAAFLEIKRTYDIYHGALAELIQLLGAGKINEFFDQPTQSYQDAFEKQYMAYMQQNDRLYDIAVEDNNSSYNQAMWVLVSVLIAVLVVIIAVWFGIKLSLIAPMNRLIESIRHIASGDLVKRIDVEGSNEMGQLAENLRHMQSELMRTVGDVRNGANAIYSGASEIAMGNNDLSSRTEQQAASLEETAASMEQLTATVKQNAENARQASHLALSASETAQKGGKVVDNVVQTMRDIASSSQKIADIISVIDGIAFQTNILALNAAVEAARAGEQGRGFAVVAGEVRNLAQRSAQAAREIKSLIEDSVSRVDVGSTLVESAGETMDEIVNAVTRVTDIMGEIASASDEQSRGIDQVGLAVAEMDRVTQQNASLVEESAAAAAALEEQASRLTQAVAVFRIHQQQQRAREVAAVKTPAAVSSPKAAVADGSDNWETF

SEQ ID NO: 99230 - DNA, 1803 bp, Ralstonia solanacearum GMI1000
  CDS (1)..(1803): transl_table=11
gtggaacgcttcctgaaaaacaccagtgtgcgagccggcctgctggcgattctggtgacctttgcactgatgatcgtggtgggcgcggcggtcggcgtgctggccctgagcacggccaacgtatcgaccgagcgcgtgcatgccatctcggcacgcagcatgctgctcaatgacgcctacaaggacatgatgcgcgcccgcaccgggctggcgcgcgtctacggcatgctgcgcgagaatcccggcacgcccttggcgtccaacgcgctcgatagcgccgagtcgggcgtgaagaaatcgctcgcccagctcgacgcgttcaagagtgcgccggccatcgaaggcgtggatcaggccctgcgccaggccgccgcccaggccgcgcaggcgcatgccgacgccgtgcagcgcgccatggccgccctgcgcgccagcgatgcggccgcctacgccaccatcaacgccaaggacgtcacctcatcgggggcggcctggtcggtcgagatcgaacgcttccagaagctcagcagccaactggcccaggaagaggctgacggcgggcaggcgcgctacggcctgatcgtcaagttcgtgagcgtcggcatcgtcatggcgctggcgttgattgccgccgtgcactacgcgctcaaagccttcgtggtgacgccgctcaacgacgcggtggatgtgctgacgcgcgtggccgagggcgatctgtctgtgcaggtgagggaaggcggacgcaacgagctgggccggctgctgtcggccgtggcccgcatgcgcgccagcctgctgcagacggtgcgccaggtgcgcagcagctcggacgcggtcaacaccggcgcgcacgagatcgccagcggcaacctcgatctgtcgtcgcggaccgagcagcagtcggcgtcgctggagaagacggccgccagcatggagcagatgacctccaccgtcaccaacaactccgagaacgctcgccaggccagcgcgctcgcggccagcgcggccgacctggcctcgcgcggcggcgaggtggtgcgcggcgtggtctcgaccatggacgagatcagcgcgagctcgcgcaagatggccgacatcatcggcgtgatcgacggcatcgccttccagaccaatatcctggcgctcaacgcggcggtggaagccgcccgcgccggcgagcaggggcgcggcttcgccgtggtggccggcgaggtgcgggccctggcccagcgcagcgcggccgccgccaaggagatcaaggacctgatcgatgcctcggtcgatcgcgtgcaggccggcaacacgctggtggcccaggcgggttcgaccatgaccgagacggtggatgcggtgcgccgcgtggccaatatcgtcgaagacattgccgccgcctcgtccgagcagacgcagggcatcctgcagatcagccaggcggtgtcggagatggagcaggtgacgcagcagaacgccgcgctggtcgagcaggccgcggccgccgcgcagtcgctggaggagcagtcgctgaacctgacccacgtggtggcccagttccggctggacgagacggacggtgtggtggcggctgccgcgtccaagccggtgcgtaccgcgccggctgccgccgtgaagccggccgccaagccgccgcgcccggtcgtgcgcaagcgtgggcccagccccaaggccgtggcgccggccaccgtgcctgtcgttgcgcccgctgccgcgcctgtcgttgcgccggtcaaggcccagccgctggccgccgtcgccggctcggacggcgactgggaaaccttctga

SEQ ID NO: 99231 - protein, 600 aa, Ralstonia solanacearum GMI1000
MERFLKNTSVRAGLLAILVTFALMIVVGAAVGVLALSTANVSTERVHAISARSMLLNDAYKDMMRARTGLARVYGMLRENPGTPLASNALDSAESGVKKSLAQLDAFKSAPAIEGVDQALRQAAAQAAQAHADAVQRAMAALRASDAAAYATINAKDVTSSGAAWSVEIERFQKLSSQLAQEEADGGQARYGLIVKFVSVGIVMALALIAAVHYALKAFVVTPLNDAVDVLTRVAEGDLSVQVREGGRNELGRLLSAVARMRASLLQTVRQVRSSSDAVNTGAHEIASGNLDLSSRTEQQSASLEKTAASMEQMTSTVTNNSENARQASALAASAADLASRGGEVVRGVVSTMDEISASSRKMADIIGVIDGIAFQTNILALNAAVEAARAGEQGRGFAVVAGEVRALAQRSAAAAKEIKDLIDASVDRVQAGNTLVAQAGSTMTETVDAVRRVANIVEDIAAASSEQTQGILQISQAVSEMEQVTQQNAALVEQAAAAAQSLEEQSLNLTHVVAQFRLDETDGVVAAAASKPVRTAPAAAVKPAAKPPRPVVRKRGPSPKAVAPATVPVVAPAAAPVVAPVKAQPLAAVAGSDGDWETF

SEQ ID NO: 99232 - DNA, 1542 bp, Ralstonia solanacearum GMI1000
  CDS (1)..(1542): transl_table=11
atgctcgctcgcctgacgatacgcacccgactggtcctcacggtttccattctgttcctgctggccttgctgatcggcgtggccgggctgcttggcctgcgcgacgcgaacggcgcgcacgaagagacctaccgcaaccagttcccgtcggcgctcgcgctgggcgaatccgacctcagcctgacccgcgcccgcacggcgctcgacaaggcgatgctgtatccggaagacaaggacgcgatgcagttgctggaccgcaccgaagagctgatcaccggctccgacgcggcctggaagaaatacctggcgctgccgcacggcgacgaagaaacgcggctgtccaaggaggtcggcaccaagcgcgaagcggcggccggcagcctgcgcgacatcatcaaggcgctgcgcgcgagcgaccgggccgcggccgacgccatcatggacaagcgcgtttccaagtccttccgcgaggcgaacgacgccagccaggcgctcggcaagcagcagttgacgttctccaaggccaatttcgacgattcccagcaggcctacgcgcgcatccgcaatctggtgatcgcggccatcgtgctcgcgctggtggtgtcggccggatgcgcgtggctgctgctgcgcgccatcgtcgggccgctgaatgccacgctggcacagttcgaccgcattgccgccggcgacctgacgcagcccgtgcgcatcgaccgccgcgatgagatgggccacctgctggagggcctcgcccgcatgcaggccgcgctgacggacacggtgcgccgggtgcgccatggctcggaatcgatcggcgcggccaccaagcagatcgccgccggcaacgccgacctgtcgcagcgcaccgaagggcaggcgagctcgctggaagagacggcgtcgagcatggaggagatgacctcgatcgtgcgccagaacgccgacaacgcccgccaggccagccagctggccgacagcgcctcggcggtcgccagccagggcggcgccgtggtgaccgacgtggtggcgaccatgcgcgagatcagcgcgtcgtcgcgcacggtgtcggagatcatcggcgtgatcgacggcattgcgttccagaccaacatcctggcgctcaacgccgcggtggaggccgcccgcgccggcgagcagggccgcggcttcgcggtcgtggccggcgaggtgcgcagcctggcgcagcgcagcgccgcggccgccaaagagatcaaggagatgatcgaagcctcgctcgccaaggtcgacaccggcagcaagctggccgagcaggccggcagcaccatggaaaacatcgtcacctccatccgccgcgtgacggacatcatgggcgagatcgccgcggcctccagcgagcagagctcgggcatcgagcaggtcaacaaggccgtcacgctgatggacgaagccacccagcagaacgccgcgctggtcgagcaggccgccgccgcggccgaatcgctggaagagcaggcgcaggcgctgaacgaggcgatcgcggccttccggctggcctga

SEQ ID NO: 99233 - protein, 513 aa, Ralstonia solanacearum GMI1000
MLARLTIRTRLVLTVSILFLLALLIGVAGLLGLRDANGAHEETYRNQFPSALALGESDLSLTRARTALDKAMLYPEDKDAMQLLDRTEELITGSDAAWKKYLALPHGDEETRLSKEVGTKREAAAGSLRDIIKALRASDRAAADAIMDKRVSKSFREANDASQALGKQQLTFSKANFDDSQQAYARIRNLVIAAIVLALVVSAGCAWLLLRAIVGPLNATLAQFDRIAAGDLTQPVRIDRRDEMGHLLEGLARMQAALTDTVRRVRHGSESIGAATKQIAAGNADLSQRTEGQASSLEETASSMEEMTSIVRQNADNARQASQLADSASAVASQGGAVVTDVVATMREISASSRTVSEIIGVIDGIAFQTNILALNAAVEAARAGEQGRGFAVVAGEVRSLAQRSAAAAKEIKEMIEASLAKVDTGSKLAEQAGSTMENIVTSIRRVTDIMGEIAAASSEQSSGIEQVNKAVTLMDEATQQNAALVEQAAAAAESLEEQAQALNEAIAAFRLA

SEQ ID NO: 99234 - DNA, 1803 bp, Ralstonia solanacearum GMI1000
  CDS (1)..(1803): transl_table=11
atgctgaaccgactttccatccgcttccgactcaacgccgcccttgtgctgcttggcgcactgctcgccatcatcggcaccatcggcgtgatcggcatgcgcgcctccgacgcgaacatccgcgagatctacagcaatcagctcgcctcgacctcgctggtctccaaggcccagctgaacgccgccgtgatccggaccacgctggaccgcgcggtgttccatatcgatgctgccgatgtgccggccgtcatcgacaaggccgccgcgtaccgcgccaagtccgaggacgcctggaaacagtacaagggcctgccgatgagcgccgacgaggcccgcctggccgccgacgtcgacgccaagcgcaccaccctgttccgcgacggcatcgagccgctggtcaccgcgctgcgtgctcgcgatgccgccgccgtcgacaaggcggtgatgaccgtgattccgccgatgttcgtcgcgctgtcggccgccgtggatgcgctggaccgcaaccaggccgaacaggccaaggctgcctacgagggggctgtgacgcgttcgcagaacttcctgtggctgatcatcggtgccatcgtggtggggattctctcggcggtggcctgtgcgttcggcctggaccgggcgatctcggtgccgctgagccgcatgctcggcagtttcggtgagatctcgcgtggcaacctcaccgagcagatcgtcgtcaccagccaggacgagatgggcgcgctcacgcgcggcttgcaggacatgcagcgcgggctgatccggaccatcgagacgatgcgcggcggcagcgattcgatcgccagcgccaccaagcagatcgcggccggcaacatggatctgtcgcagcgcacggaagagcaggccagctcgctggaagaaacggcctccagcatggaagagctgacctcgatcgtgaagcagaacgcggacaacgcgcgccaggcgagcacgctggcggtcaacgcttcggacatcgcggtcaagggcggcgaggtggtgggccgcgtggtcgagaccatggccggcatcaacgacagcagcaagaagatcgctgacatcatcggcgtgatcgagggcattgcattccagaccaacatcctggcgctgaacgcggcggtggaagcggcccgggccggtgagcaggggcgtggcttcgcggtggtggcgggcgaggtgcgcagcctggcgcagcgctcggcgggggcggccaaggagatcaaggagctgatctcggactcggtcggccgggtcgagaacggcaccacgctggtggccgaggccggcacggtgatcgacgaagtggtggtggcggtcaagcgcgtgacggacatcatgggcgagatcagcgcggcgtcggacgagcagagctcgggcatcgagcaggtcaaccaggccgtgaaccagatggatgaggtgacgcagcagaacgcggcactggtggaagaggccgcggcggccgcgcaatcgctggaagagcaggcgcgcctgctgcgcgagacggtggcctcgttccgcctgccgcaaggcggcggcgaggtgcgtgccgccgcgccggccgtgcgtgccgtggcggcggccaagcctgccgcagcggcgaccgtcgccaggccggcggtccgcaagccggctgcaacggtgcgtgcgcgtgcgccgcgcaaacccgctgccgaggcaccggttgccaaggcggcatcatcgccggcgccggcgccggcggaaccggccggcggcaagctggccctgtcggcggcggtcgatcaggatgactggacccagttctga

SEQ ID NO: 99235 - protein, 600 aa, Ralstonia solanacearum GMI1000
MLNRLSIRFRLNAALVLLGALLAIIGTIGVIGMRASDANIREIYSNQLASTSLVSKAQLNAAVIRTTLDRAVFHIDAADVPAVIDKAAAYRAKSEDAWKQYKGLPMSADEARLAADVDAKRTTLFRDGIEPLVTALRARDAAAVDKAVMTVIPPMFVALSAAVDALDRNQAEQAKAAYEGAVTRSQNFLWLIIGAIVVGILSAVACAFGLDRAISVPLSRMLGSFGEISRGNLTEQIVVTSQDEMGALTRGLQDMQRGLIRTIETMRGGSDSIASATKQIAAGNMDLSQRTEEQASSLEETASSMEELTSIVKQNADNARQASTLAVNASDIAVKGGEVVGRVVETMAGINDSSKKIADIIGVIEGIAFQTNILALNAAVEAARAGEQGRGFAVVAGEVRSLAQRSAGAAKEIKELISDSVGRVENGTTLVAEAGTVIDEVVVAVKRVTDIMGEISAASDEQSSGIEQVNQAVNQMDEVTQQNAALVEEAAAAAQSLEEQARLLRETVASFRLPQGGGEVRAAAPAVRAVAAAKPAAAATVARPAVRKPAATVRARAPRKPAAEAPVAKAASSPAPAPAEPAGGKLALSAAVDQDDWTQF

SEQ ID NO: 99236 - DNA, 1575 bp, Ralstonia solanacearum GMI1000
  CDS (1)..(1575): transl_table=11
atgctcatgtggaagtggatggactccagtatccggacacgcctgacggtgctcgtcgccgcctttgccgtgatggtcgcggcggtgggcggcaccggcatcgccaccggccgggccaccaacgccgatttgcgcgccgtctacctggaagatgccaagggcctcgacctgctggccaaggacacggccaacctgctgtgggcgcgcatccacctgaccaacttcgattcggtgtcctcgccggaagaactggccaagctgctcaaggacgcgcacgcgatggtcgatgcggccaatgcggcgtgggcggcgttcacgcaactgcccatccccgacgccgaccgggcccaactgcaggccgccgatgccgcgcgcgcccggttcgtcaagaccgcgctggaaccggccatcaccgcgctggagcgcagcgacctgaccacctaccgagatctgaacaccacccaggtgccgcagctgttcgcggtctatgacgccgcgctgcagccgctggtcaaggcgcgcttcgcttacggccaggcccgtttcgaccgttcgcagtcgcgctacgccgcgagcgtctggctctcgggcggcctgctgctggccgcgctggtgctgtcggtggtggcgcgcggcgtgttgggccgcacgctggtgcggccgctggagcgggccatccacgtgttcgagcgcatggccgcgggcgatctcgccacccgcatggacgagcccacccgcgccggccgccgcgatgagaccgcgcgcctgatgcacgccgtggcgtcgatgcagtcgagcctgcagaagatggtcggacaggtccgcaccggctccgactcgatcgccagcgccaccaagcagatcgccgccggcaacgccgacctgtcgcagcgcaccgaacagcaggcttcgtcgctggaggaaaccgcctccagcatggaggagctgacctcgatcgtgaagcagaacgcggacaacgcgcgccaggcgagcacgctggcggtcaacgcctccgatgtggcggtcaagggcggcgaagtggtcggccgcgtggtcgagaccatggccggcatcaacggcagcagcaagaagatcgccgacatcatcggcgtgatcgaagggattgcgttccagaccaacatcctggcgctgaacgcggcggtggaagcggcccgggccggcgagcagggtcgcggcttcgcggtggtggcgggcgaggtgcgcagcctggcgcagcgctcggcgggggcggccaaggagatcaaggaactgatctcggattcggtcgaccgcgtgcagaatggctcgaagctggtggccgaggccggcacggtgatcgacgaagtggtggtggcggtcaagcgcgtgacggacatcatgggcgagatcagcgcggcatccgacgagcagagctcgggcatcgagcaggtcaaccaggcggtgaaccagatggacgaggtgacgcagcagaacgcggcgctggtggagcaggccgcggccgccgccgaatcgctggaggcgcaggccgaagcgttgcggcaggcggtctcggcgttccgcgtcgggcacgcttga

SEQ ID NO: 99237 - protein, 524 aa, Ralstonia solanacearum GMI1000
MLMWKWMDSSIRTRLTVLVAAFAVMVAAVGGTGIATGRATNADLRAVYLEDAKGLDLLAKDTANLLWARIHLTNFDSVSSPEELAKLLKDAHAMVDAANAAWAAFTQLPIPDADRAQLQAADAARARFVKTALEPAITALERSDLTTYRDLNTTQVPQLFAVYDAALQPLVKARFAYGQARFDRSQSRYAASVWLSGGLLLAALVLSVVARGVLGRTLVRPLERAIHVFERMAAGDLATRMDEPTRAGRRDETARLMHAVASMQSSLQKMVGQVRTGSDSIASATKQIAAGNADLSQRTEQQASSLEETASSMEELTSIVKQNADNARQASTLAVNASDVAVKGGEVVGRVVETMAGINGSSKKIADIIGVIEGIAFQTNILALNAAVEAARAGEQGRGFAVVAGEVRSLAQRSAGAAKEIKELISDSVDRVQNGSKLVAEAGTVIDEVVVAVKRVTDIMGEISAASDEQSSGIEQVNQAVNQMDEVTQQNAALVEQAAAAAESLEAQAEALRQAVSAFRVGHA

SEQ ID NO: 99238 - DNA, 1827 bp, Ralstonia solanacearum GMI1000
  CDS (1)..(1827): transl_table=11
atgttccgcggaatgaccatccggctccgactggcgctgatgatggcgggtgttgccgtgctcgccgttgtcatcgggacgaccggtctgctcggcatgcgccacgccaacacgcgtgtgcaggcgacctatgaaatgcaattggcgggcgccgtggcgctggccgagtccgatgcgagcatgctgagctttcgcctcgtgctcgaccgggccgccatggatatcaaggcgccgagcctgggcaagaccctcgagcgcgcccggatgtttctcgccaagtccgacgcatcctggaagcgctaccgcgccctgccgtccacgcccgacgaacgcaagctggccgacgaggccgacgcgctgcgcacggtgttcctgcgcgacggcgcccaggcgctgatgcaggccatccaggccggcgatgccgagcgcaccagccagacggtgatggaggcgatgccggccctgtatcggccgctgggcgacaaggtgacagcgctgtcgcgcatgcagatggagattgcccgcgccagctacgaagccggccagcgcgagcacgatggcctgagcgccctgaccgccgcgctgcttctggtcggcatcgtggggggcgggctgctgacctggtcgctgcggcgctcgatcacggtgccgctgaaccgcgccatcgagcaggccgaacacatcacccggggcgacctgacgcacgcgatccacgtcgatcgcgccgatgagaccggtcgcatgctgctggccctgcagcggatgcaggagagcctgcagggcatggtcggccaggtgcggaccggatcggatgcgatcgccagcgccacgcagcagattgcggcgggcaatgccgacctgtcgcagcgcaccgaacagcaggcctcgtcgctcgaggaaacggcgtcgagcatggagcagctgaccggcatggtgaagcagaacgccgacagcgcgcggcaggcgagcacgctggcggtcaatgcctcggacatcgcggtcaagggcggcgaagtggtcggtcgcgtggttgagaccatggccggcatccacgacagcagcaggaagatcgccgacatcatcggcgtgatcgaagggattgcattccagaccaacatcctggcgctgaacgcggcggtggaagcggcccgggccggcgagcagggccgggggtttgcggtggtggcgggcgaggtgcgcagcctggcgcagcgctcggcgggggcggccaaggagatcaagacgctgatctcggactcggtcggccgggtcgagagcggcaccacgctggtggccgaggccggcaccgtcatcgatgaagtggtcgtggccgtgaagcgcgtgaccggcatcatgggcgagatctccgccgcgtcggacgcacagagcgagggcatcgcccaggtcaaccaggccgtgacccagatggacgaggccacgcagcagaacgcggcgctggtggagcaggcggctgcggcggccatgtcgctgcaggagcaggccgatggcctgcgcggtacggtggcggctttccgcacccgcgcggatgcgccggcgcagaccgtggcgcgccccgcgcggcccgccgccgccccggtgaaggcgccggcgcgggctaccgcactcgcgcggcggccggcaccgaaggccgccgtggcgcggccgccggccacagcaggcgaggccacgccgtcggccacagcgagttcaaacgaacaacagcgtacgcgtcaggcagcggccaaggccgttgtaccggcgccgaagaagcaagcgcccaagctcgtcgcggcaggaggcgacgaaagcgactgggaaaccttttaa

SEQ ID NO: 99239 - protein, 608 aa, Ralstonia solanacearum GMI1000
MFRGMTIRLRLALMMAGVAVLAVVIGTTGLLGMRHANTRVQATYEMQLAGAVALAESDASMLSFRLVLDRAAMDIKAPSLGKTLERARMFLAKSDASWKRYRALPSTPDERKLADEADALRTVFLRDGAQALMQAIQAGDAERTSQTVMEAMPALYRPLGDKVTALSRMQMEIARASYEAGQREHDGLSALTAALLLVGIVGGGLLTWSLRRSITVPLNRAIEQAEHITRGDLTHAIHVDRADETGRMLLALQRMQESLQGMVGQVRTGSDAIASATQQIAAGNADLSQRTEQQASSLEETASSMEQLTGMVKQNADSARQASTLAVNASDIAVKGGEVVGRVVETMAGIHDSSRKIADIIGVIEGIAFQTNILALNAAVEAARAGEQGRGFAVVAGEVRSLAQRSAGAAKEIKTLISDSVGRVESGTTLVAEAGTVIDEVVVAVKRVTGIMGEISAASDAQSEGIAQVNQAVTQMDEATQQNAALVEQAAAAAMSLQEQADGLRGTVAAFRTRADAPAQTVARPARPAAAPVKAPARATALARRPAPKAAVARPPATAGEATPSATASSNEQQRTRQAAAKAVVPAPKKQAPKLVAAGGDESDWETF

SEQ ID NO: 99240 - DNA, 1674 bp, Yersinia pestis KIM
  CDS (1)..(1674): transl_table=11
atgttcaagcgtatgaaagtggttaccagcctgctgctggtattagtattatttggtgccttacaactggtatccggcgggctttttttcaaatcattgcagaatgaccaggaaaacttcaacgttttacaagttattcgccagcaacaatcggtattgaatgaaagctgggtctatctgttacaaacacgcaatacgttaaaccgtgccggtgttcgttacatgatggatattaaccatactggcagtggccctacggtgaaggaccttatctcttcggctaaagggacgctaagcgtcgcggaagaccgcttcaaacgttacgaaaaaatcccacaaaatagcagtcaggatccagaaggcgccaaaaaattaaaacagtcctacgaggaatattttagtgccttaaccgaactgattaatttgatggaaacgaacaaaatcaatgagttcttcaatcaccccaccaccagtttccaaaatgaatttgagcaaaattacaacaactatctgacgcaaaatgacggactgtatgattcggcggtcgaggacagtaatcaatcctttagctttgctatgggcgtggttattactgtactggtcgtcgtattagtgatgatgctccttgtctggctggggatgcaacagatcttaattcaccccctcaaccacctgattgcacacattaaacatattgccaacggtgatttgacgcaaaatattgaagttcatggtcgcaacgaagtgggcacgttggctgctagcctgaaacacatgcaatctgaattggtcactatcgtcggcgaggtgcgtgtaggcgctgatgctatctacagcggtgcgtcagaaattgcggtgggtaacaatgatttatccgcccgtactgaacagcaagcggcatcattggaagaaacggctgccagcatggagcaattaaccgcaacggtgaaacagaacgctgaaaacgcccgtcaggcgagtcaattagcattgagtgcctcagaaaccgctcagaaaggggggaaagtggtggcggatgttgtgcaaaccatgcacgagatcgcggggagttcgcagaagattgccgacattaccagcgtcatcgacggtatcgccttccagaccaatatcttggcattgaatgccgccgttgaagccgcccgtgcaggtgagcaaggccgtggttttgccgtggttgccggtgaagtgcgcaatttagcacaacgcagtgcacaggcggcgaaggaaattaaaggtctgattgacgattcggttaaccgggtagatctgggctcagtactggttgaaagtgccggtgaaaccatgggcgatatcgttaatgccgtgacccgcgtgaccgacatcatgggcgaaatcgcttctgcctcagatgaacaaagtcgtggtattgaccagattggtcaggcagttgccgaaatggaccgcgtgacacagcaaaatgcttccttggtagaagaatcggcttccgccgccgcttcactggaagagcaagccagcatgttaactcaagcgatgtccgtatttgttctgagtgtggataacagtaattccactagcgacgtcagaaaagtcaaacaacccacgcaggaaatgaacagcacggctaaaaaagcgctgggaaataatctgcaagacaattgggaaactttctag

SEQ ID NO: 99241 - protein, 557 aa, Yersinia pestis KIM
MFKRMKVVTSLLLVLVLFGALQLVSGGLFFKSLQNDQENFNVLQVIRQQQSVLNESWVYLLQTRNTLNRAGVRYMMDINHTGSGPTVKDLISSAKGTLSVAEDRFKRYEKIPQNSSQDPEGAKKLKQSYEEYFSALTELINLMETNKINEFFNHPTTSFQNEFEQNYNNYLTQNDGLYDSAVEDSNQSFSFAMGVVITVLVVVLVMMLLVWLGMQQILIHPLNHLIAHIKHIANGDLTQNIEVHGRNEVGTLAASLKHMQSELVTIVGEVRVGADAIYSGASEIAVGNNDLSARTEQQAASLEETAASMEQLTATVKQNAENARQASQLALSASETAQKGGKVVADVVQTMHEIAGSSQKIADITSVIDGIAFQTNILALNAAVEAARAGEQGRGFAVVAGEVRNLAQRSAQAAKEIKGLIDDSVNRVDLGSVLVESAGETMGDIVNAVTRVTDIMGEIASASDEQSRGIDQIGQAVAEMDRVTQQNASLVEESASAAASLEEQASMLTQAMSVFVLSVDNSNSTSDVRKVKQPTQEMNSTAKKALGNNLQDNWETF

SEQ ID NO: 99242 - DNA, 1611 bp, Yersinia pestis KIM
  CDS (1)..(1611): transl_table=11
atgtttggtcaaatccggatttctaccagttttttcctgctgctgatgtttctttgcgccatacagttaatttcaagtggtctatcatttacggcttttcgctcagactaccaaaatttaaatcgagtggagttaagtagtcagcaacgcgatgcattaagcctcagttgggtatctttgcttcaggcacgtaataccttaaaccgtgcggctactcgctcggcgctcaatgttcctcaggagcaagttaacgctttaatggggagtgcgcgcagtgcattgcagaaagctgaactttactttaatcagtttcaggcggtaccgcgccttgatgagagtgagagcagtgggcaattactggatgcgaccaaaaacagttatcaaaaccttcgtagcgcattacgtgagttaattgattttctggaagcgggtgatttacaagcatttatggatcaacccactcagaaaacgcaagatttgtttgaagcggatttcatccagtatttgcaatacgccaatgaggttattgccgatgccggtcagcagaatcagcaggcttatcagctctcaatctggatatttagtggtgcgattctgatggttatcacgatggccatttcgtcgttgatctggttgcgcaacatgtttgttcggccattagcgacgatgcgtgagcattttggccgcattgctcaaggggatttgtctgggcagatctcggtgactggccgtaatgaaatcagccagatgttcgccagcttacgcaccatgcagcagtcgctgatctcaacggtcagcaatgtgcgtgagggtaccgaatcgatgttgaccggtatccaggaaatttccgcaggtaacaacgatttatcggcaagaactgaacagcaagcggcttccttggaacaaactgccgcgagtatggaacaactgaccgccacggtaaaacagaatgcggacaatgcgcatcaggccacggtactggcgcaagaggcttccggtacggcagctaaaggcggagaactgacggcgagtgtcgtcaccaccatgcatgcaatcgctaccagttcgcagaagattggtgcgatcaccagcgttatcgacggtattgccttccaaaccaatattttggcactgaatgcggccgtggaggcggcccgtgcgggtgagcaagggcgtggttttgcggtggttgcgggtgaagtccgtaatttagcacaacgcagtgcgcaagcggccaaagagatcaaagggctgattgatgagtccgtcagccgtgtccgccaggggtctacgctggtcgaaagtgcaggaactaccatggaagagatcgtccgctcggtggcgcgtgtgactgacattatgggggagatcgaatctgcttcggatgaacagagccggggtattgaacaaatatcactcgccgtaacgcaaatggatcaggttactcagcaaaatgcgtcattagtggaagaggccgcggcggcagccaatgcactggaagagcaggccagcatgctctccgatgccgtctctgttttccgtttggggcaggggcacgacgaacagtcagttgcgggcaatagccagcaatcattggccacgcattattag

SEQ ID NO: 99243 - protein, 536 aa, Yersinia pestis KIM
MFGQIRISTSFFLLLMFLCAIQLISSGLSFTAFRSDYQNLNRVELSSQQRDALSLSWVSLLQARNTLNRAATRSALNVPQEQVNALMGSARSALQKAELYFNQFQAVPRLDESESSGQLLDATKNSYQNLRSALRELIDFLEAGDLQAFMDQPTQKTQDLFEADFIQYLQYANEVIADAGQQNQQAYQLSIWIFSGAILMVITMAISSLIWLRNMFVRPLATMREHFGRIAQGDLSGQISVTGRNEISQMFASLRTMQQSLISTVSNVREGTESMLTGIQEISAGNNDLSARTEQQAASLEQTAASMEQLTATVKQNADNAHQATVLAQEASGTAAKGGELTASVVTTMHAIATSSQKIGAITSVIDGIAFQTNILALNAAVEAARAGEQGRGFAVVAGEVRNLAQRSAQAAKEIKGLIDESVSRVRQGSTLVESAGTTMEEIVRSVARVTDIMGEIESASDEQSRGIEQISLAVTQMDQVTQQNASLVEEAAAAANALEEQASMLSDAVSVFRLGQGHDEQSVAGNSQQSLATHY

SEQ ID NO: 99244 - DNA, 1602 bp, Shigella flexneri 2a str. 301
  CDS (1)..(1602): transl_table=11
atgtttaatcgtattcgaatttcgaccacgctgtttttaattttgattctctgcgggatcttgcagattggcagtaacggcatgtctttttgggcatttcgcgacgatttgcaacgactgaatcacggcgagcagagcaatcagcaacgtgcggcattagcgcaaactcgggcggtaatgttacaggccagtaccgcgctgaacaaagcaggcactctgacagcgcttagctatccggcggatgacattaaaacgttgatgacgacggcgcgcgccagtctgacgcaatccaccacgctgtttaaaagttttatggcgatgactgcgggcaacgagcacgtcagggcattgcaaaaagagacggagaaaagttttgcccgctggcacaacgatctcgaacatcaggcgacctggcttgaaagtaatcaactttcggatttcctcactgcgccggtgcagggatcacagaatgcgtttgacgttaactttgaggcctggcagctggagatcaaccatgtgctggaagccgccagtgcgcaaagccagcgtaactatcagatttcggcgctggtgtttatcagcatgattattgttgcggcgatctacatcagcagtgcgctgtggtggacgcgcaagatgattgttcaaccactggccattatcggtagccattttgacagcattgctgcgggtaatctggcgcgtccgattgcggtatatggtcgtaatgagatcaccgccatttttgccagcctgaagaccatgcagcaggctttgcgtgggacggtgagtgatgtgcgtaagggaagccatgagatgcacattgggatcgcggagattgtcgcaggcaataacgatctctcaagtcgtaccgaacagcaggcggcatcgctggcacaaacggccgccagtatggagcaattaaccgccacggtagggcaaaacgccgataacgcacgacaggcgtcggaactggcaaaaaatgccgcgacaacggcgcaggcgggcggtgttcaggtcagtaccatgactcacaccatgcaggagatcgccaccagctcgcaaaaaattggcgacattatcagcgttatcgacggaattgctttccagaccaatattctggccctgaatgcggcagtggaagcggctcgcgccggagagcaggggcgtggttttgcggtagtggcaggtgaagtgcgcaatcttgccagccgtagcgcgcaggcagcaaaagagatcaaagggctgatcgaagagtcagtcaatcgtgtccagcagggttcgaaactggtgaataacgccgccgcgaccatgaccgatattgtcagttcggtgacccgcgtgaacgacattatgggagaaattgcttcggcgtcggaagaacaacggcgggggattgagcaggttgcacaggctgtcagccagatggatcaggtgactcagcagaactcctcgctggtagaagaagcggcggtggcaacggaacaactggcgaatcaggccgaccatctttcgtcgcgtgtggcggtatttacccttgaagaacatgaagtagcacgacatgagtcggcgcagttacaaattgcgccagtggtatcctga

SEQ ID NO: 99245 - protein, 533 aa, Shigella flexneri 2a str. 301
MFNRIRISTTLFLILILCGILQIGSNGMSFWAFRDDLQRLNHGEQSNQQRAALAQTRAVMLQASTALNKAGTLTALSYPADDIKTLMTTARASLTQSTTLFKSFMAMTAGNEHVRALQKETEKSFARWHNDLEHQATWLESNQLSDFLTAPVQGSQNAFDVNFEAWQLEINHVLEAASAQSQRNYQISALVFISMIIVAAIYISSALWWTRKMIVQPLAIIGSHFDSIAAGNLARPIAVYGRNEITAIFASLKTMQQALRGTVSDVRKGSHEMHIGIAEIVAGNNDLSSRTEQQAASLAQTAASMEQLTATVGQNADNARQASELAKNAATTAQAGGVQVSTMTHTMQEIATSSQKIGDIISVIDGIAFQTNILALNAAVEAARAGEQGRGFAVVAGEVRNLASRSAQAAKEIKGLIEESVNRVQQGSKLVNNAAATMTDIVSSVTRVNDIMGEIASASEEQRRGIEQVAQAVSQMDQVTQQNSSLVEEAAVATEQLANQADHLSSRVAVFTLEEHEVARHESAQLQIAPVVS

SEQ ID NO: 99246 - DNA, 1662 bp, Shigella flexneri 2a str. 301
  CDS (1)..(1662): transl_table=11
atgattaaccgtatccgcgtagtcacgctgttggtaatggtgctgggggtattcgcactgttacagcttatttccggcagtttgtttttttcttcccttcaccatagccagaagagctttgtggtttccaatcaattacgggaacagcagggcgagctgacgtcaacctgggatttaatgctgcaaacgcgcattaacctgagtcgttcagcggtgcggatgatgatggattcctccaatcaacaaagtaacgccaaagttgaattgctcgatagcgccaggaaaacattggcccaggccgcgacgcattataaaaaattcaaaagcatggcaccgttacctgaaatggtcgctaccagccgtaattttgatgaaaaatataaaaactattacacagcgttaactgaactgattgattatcttgattatggcaatactggagcttatttcgctcagccaacccagggaatgcaaaatgcaatgggcgaagcgtttgctcagtacgccctcagcagtgaaaaactgtatcgcgatatcgtcactgacaacgcagatgattaccgatttgcccagtggcaactggcggttatcgcgctggtggtggtattgattctgctggtggcgtggtacggcattcgccgtatgttgcttactccgctggcaaaaattattgctcacatttgcgaaatcgccggtggtaacctggcgaataccctgaccattgacgggcgcagtgaaatgggtgacctggcgcagagcgtttcacatatgcaacgctctttgactgacaccgtcactcatgtccgcgaaggttcagatgccatctatgccggtacccgtgaaattgcggcgggcaacaccgatctttcctcccgtactgaacagcaggcatccgcgctggaagaaactgccgccagcatggagcagctcaccgcgacagtgaagcaaaacgccgataacgcccgccaggcctcgcaactggcgcaaagtgcctccgacaccgcccagcacggcggcaaagtggtggatggcgtagtgaaaacgatgcatgagatcgccgatagttcgaagaaaattgccgacattatcagcgttatcgacggtattgccttccagactaatatcctcgcgctgaatgccgcggttgaagccgcgcgtgcgggtgaacagggccgtggttttgccgtggtggcgggtgaagtgcgtaatcttgccagtcgcagcgccctggcggcaaaagagatcaaagccctcattgaagactccgtctcgcgcattgataccggttcggtgctggtcgaaagcgccggggaaacaatgaacaatatcgtcaatgctgtcactcgcgtgactgacattatgggcgagattgcatcggcatcggatgaacagagccgtggcatcgatcaagtcgcattggcggtttcggaaatggatcgcgtcacgcaacagaacgcatcgctggtgcaggaatcagctgccgccgcagctgcgctggaagaacaggcgagtcgtttaacgcaagcggtttccgcgttccgtctggcagccagcccactcaccaataaaccgcaaacaccatcccgtcctgccagtgagcaaccaccggcacagccacgactgcgaattactgaacaagatccaaactgggaaacattttga

SEQ ID NO: 99247 - protein, 553 aa, Shigella flexneri 2a str. 301
MINRIRVVTLLVMVLGVFALLQLISGSLFFSSLHHSQKSFVVSNQLREQQGELTSTWDLMLQTRINLSRSAVRMMMDSSNQQSNAKVELLDSARKTLAQAATHYKKFKSMAPLPEMVATSRNFDEKYKNYYTALTELIDYLDYGNTGAYFAQPTQGMQNAMGEAFAQYALSSEKLYRDIVTDNADDYRFAQWQLAVIALVVVLILLVAWYGIRRMLLTPLAKIIAHICEIAGGNLANTLTIDGRSEMGDLAQSVSHMQRSLTDTVTHVREGSDAIYAGTREIAAGNTDLSSRTEQQASALEETAASMEQLTATVKQNADNARQASQLAQSASDTAQHGGKVVDGVVKTMHEIADSSKKIADIISVIDGIAFQTNILALNAAVEAARAGEQGRGFAVVAGEVRNLASRSALAAKEIKALIEDSVSRIDTGSVLVESAGETMNNIVNAVTRVTDIMGEIASASDEQSRGIDQVALAVSEMDRVTQQNASLVQESAAAAAALEEQASRLTQAVSAFRLAASPLTNKPQTPSRPASEQPPAQPRLRITEQDPNWETF

SEQ ID NO: 99248 - DNA, 1665 bp, Shigella flexneri 2a str. 301
  CDS (1)..(1665): transl_table=11
atgttaaaacgtatcaagatcgtgaccagcttactgctggttttggccgtttttggccttttacaactgacatcaggcggtctgttttttaatgccttaaagaatgacaaagaaaatttcactgttttacaaaccattcgccagcagcaacccacgctgaatggcagctgggtcgcgttgttgcagacgcgtaacaccctcaaccgcgcgggtatccgctacatgatggatcagaataatattggtagcggttcaaccgttgctgagctgatgcagagtgccagtatttcgctgaaacaggcggaaaaaaactgggcggattacgaagcgttgccgcgtgacccgcgtcagagcaccgccgcagcggcagagatcaaacgtaattacgatatttatcacaatgcgctggcggagctgatccaactgttaggtgcaggcaaaatcaacgagttctttgatcagccgacccagggatatcaggacggtttcgagaagcagtatgtggcttacatggagcaaaacgatcggctctatgatatcgccgtcagcgataacaatgcctcctacagccaggcgatgtggattctggtgggcgtgatgatcgtcgtactggcggtcatcttcgccgtctggttcggtattaaagcctcgctggtagcgccaatgaatcgcctgattgacagcattcgtcatattgcaggcggcgatctggtgaaaccgattgaggtggatggctctaatgagatggggcaactggcagagagtttgcgccatatgcagggagagctgatgcgtaccgtcggtgatgtgcgcaacggggccaatgccatctatagcggtgccagcgaaatcgctaccggcaataatgatctctcttcgcgcaccgagcaacaggccgcttcgctggaagagacggcagccagcatggagcaactgaccgcaacggtgaaacagaacgccgagaatgcgcgccaggccagccatctggcattaagtgcttctgaaacggcgcaacgcggcggcaaagtggtagataacgtggtgcagactatgcgcgatatctccaccagttcgcagaaaatcgccgatattatcagcgtaattgacggcattaccttccagaccaatattctggctttgaacgcggcggttgaagcagcgcgtgcgggtgagcaaggacgtggttttgcggtggttgcgggagaagtgcgtaatctggcccagcgtagcgcccaggcggttcgtgaaattaaaagcctgattgaagactcggtggggaaagtggatgttggctctacgctggtcgaaagcgccggggaaacaatggcggagattgtcagtgctgtgacccgcgtgacggacattatgggcgaaatagcttctgcttctgatgagcagagccgtggtatcgatcaggttggcttagcggttgctgagatggaccgggtaactcaacagaacgccgcgctggtggaagaatctgccgctgccgccgccgcgctggaagagcaggccagtcgcctgaccgaagctgtggcagtgttccggattcagcaacagcagcaacagcagcgtgaaacatcggctgtggtaaaaaccgtgacgccagctacgccgcgtaaaatggcagtggcagatagcggggagaactgggaaacgttttaa

SEQ ID NO: 99249 - protein, 554 aa, Shigella flexneri 2a str. 301
MLKRIKIVTSLLLVLAVFGLLQLTSGGLFFNALKNDKENFTVLQTIRQQQPTLNGSWVALLQTRNTLNRAGIRYMMDQNNIGSGSTVAELMQSASISLKQAEKNWADYEALPRDPRQSTAAAAEIKRNYDIYHNALAELIQLLGAGKINEFFDQPTQGYQDGFEKQYVAYMEQNDRLYDIAVSDNNASYSQAMWILVGVMIVVLAVIFAVWFGIKASLVAPMNRLIDSIRHIAGGDLVKPIEVDGSNEMGQLAESLRHMQGELMRTVGDVRNGANAIYSGASEIATGNNDLSSRTEQQAASLEETAASMEQLTATVKQNAENARQASHLALSASETAQRGGKVVDNVVQTMRDISTSSQKIADIISVIDGITFQTNILALNAAVEAARAGEQGRGFAVVAGEVRNLAQRSAQAVREIKSLIEDSVGKVDVGSTLVESAGETMAEIVSAVTRVTDIMGEIASASDEQSRGIDQVGLAVAEMDRVTQQNAALVEESAAAAAALEEQASRLTEAVAVFRIQQQQQQQRETSAVVKTVTPATPRKMAVADSGENWETF

SEQ ID NO: 99250 - DNA, 1662 bp, Salmonella enterica subsp. enterica serovar Typhi Ty2
  CDS (1)..(1662): transl_table=11
atgtttaaccgtatccgcgttgtcacaatgctgatgatggtgctgggggttttcgcactgctacagcttgtttccggtggtttgctgttttcttcattacagcataaccagcaaggttttgttatttctaacgaattacgccagcaacaaagcgaactcacgtcgacatgggacttaatgctgcaaacgcgcattaacctgagccgctccgccgcacgcatgatgatggacgcttctaaccagcagagcagcgccaaaacggatttactccagaatgcaaaaacgaccctcgcacaggcggcggcgcactacgccaatttcaaaaacatgacgccattgccagcgatggcggaggccagcgcgaacgtcgatgaaaaatatcagcgctatcaggccgcattagccgaacttattcagtttctggacaatggcaatatggatgcctacttcgcccagccaacccagggaatgcaaaacgcgttgggcgaggcgctgggcaattacgcccgggtgagcgaaaacctgtaccgccagacatttgatcaaagtgctcatgactaccgttttgcgcaatggcaactgggggttcttgcggtcgtgctggtgctgattttgatggtggtttggttcggcattcgtcatgccttgcttaacccattagcgcgagtgattactcatatccgtgaaattgccagcggcgatctgacgaaaacgctcaccgtctcaggacgtaatgaaattggcgaactggcgggaacggttgaacatatgcaacgctcgctgattgacaccgtgacgcaggtttgtgaaggttcggatgcgatttattccggcaccagtgaaattgccgccggtaataccgacctctcttcccgtaccgaacaacaagcctccgctctggaggagacggcggccagcatggaacaactgacggccaccgtgaagcaaaacgccgataatgcccgtcaggcttcgcaactggcgcaaagcgcctccgagaccgcgcgtcatggcggcaaagtggtcgacggcgtagtaaacactatgcacgaaattgccgacagttcgaaaaaaatcgctgacattatcagcgttatcgacggtattgccttccagactaacattctggcgctgaacgcggcggtagaagcggcgcgcgcgggagagcaggggcgcggttttgcggtcgtggcaggcgaggtgcgtaatctggccagccgcagtgcccaggcggcgaaagaaataaaagcgttgattgaagattccgtctcgcgtgtcgataccggttcagtgctggtggaaagcgccggggaaaccatgactgacatcgtcaatgccgttacgcgcgtcacggatatcatgggcgaaatcgcctccgcctcggatgagcaaagccggggtatcgatcaggtcgctttggccgtttccgaaatggatcgcgtaacgcaacagaacgcctcgctggttcaggaatccgcagcggccgccgccgcgctggaagagcaggccagccgtctgacccaggcggtatcggctttccgcctggcatcgcgaccgctggcggtaaataaacctgagatgcgtttatcagtggacgctcagtccggcaatacgccgcggcccttagccgccggggatgatgcgaactgggaaaccttctga

SEQ ID NO: 99251 - protein, 553 aa, Salmonella enterica subsp. enterica serovar Typhi Ty2
MFNRIRVVTMLMMVLGVFALLQLVSGGLLFSSLQHNQQGFVISNELRQQQSELTSTWDLMLQTRINLSRSAARMMMDASNQQSSAKTDLLQNAKTTLAQAAAHYANFKNMTPLPAMAEASANVDEKYQRYQAALAELIQFLDNGNMDAYFAQPTQGMQNALGEALGNYARVSENLYRQTFDQSAHDYRFAQWQLGVLAVVLVLILMVVWFGIRHALLNPLARVITHIREIASGDLTKTLTVSGRNEIGELAGTVEHMQRSLIDTVTQVCEGSDAIYSGTSEIAAGNTDLSSRTEQQASALEETAASMEQLTATVKQNADNARQASQLAQSASETARHGGKVVDGVVNTMHEIADSSKKIADIISVIDGIAFQTNILALNAAVEAARAGEQGRGFAVVAGEVRNLASRSAQAAKEIKALIEDSVSRVDTGSVLVESAGETMTDIVNAVTRVTDIMGEIASASDEQSRGIDQVALAVSEMDRVTQQNASLVQESAAAAAALEEQASRLTQAVSAFRLASRPLAVNKPEMRLSVDAQSGNTPRPLAAGDDANWETF

SEQ ID NO: 99252 - DNA, 1821 bp, Bordetella pertussis Tohama I
  CDS (1)..(1821): transl_table=11
atgtggtcgaatttgaaggtacgcacctgcatcaccctggtgctgggcctgtttctggtggcaatgctggtgtccaacggaatggcctggctgggcatgagctcgagcaacgacaagctggagcgcgtcaataacgcgtattcgaaccaggccgtgccggcctacgacgcctacgtcatgctgttgcgggcgcggctgaacatagtctcgtcgatgatggacctgcaggaagggcggttgaaggagtcggccgatacgctggcgcatgcgcagcgccaggccggcgaagcgcgcgagcgcttcgaggctttcctggcggtggccaaggcttcgtcgggcgccgaccgggtcggcgcggtggagacggcgttccatgcctacctggaggtggcggcgcgccagatggaggccatgcagaaccagaggttgggcgagttcgtgcagctcaacccgtccgcgcagcgcctgaacaccgctttcgatacggcggcgtcggcgtacctggaccggatcgacacggacaccgacgcgctggtggacgatgcgcgcgccgaacacctgcgcgccaatacggtaaccctggtgttgattgtcctggcgctggcgctgtgcgccggctgcggggtgttcatcggccgcgccgtgctgcgtccgctcaaggaagccggccagcacttcgacaggatcgccgcgggcgacctgaccgcgcgggtggacgtgcgcaacagcaacgagatcggccagctgttcgccggcctcaagcgcatggaggaaagcctgacgcgtaccgtcgcggcggtgcgccgcggggtggacgagatcaacgtgggttcgcgcgagatttcggccggcaacacggacctgtccagccacaccgaagagcaggcggcctcgctggaagagaccgcggcctcgatggagcagctggcctcgacggtcaagcagaacgccgacaacgcgcgccaggccaaccagctggcgggagtcgcctcggacgtggccgagcgtggcggttcggcggtgtccgaggtggtgacgacgatgcaggacatctcggccagctcgcgcaagatctccgagatcgtgtcggtgatcgacgggatcgcgttccagaccaatatcctggcgctgaacgcggcggtggaagcggcgcgcgcgggcgagcagggcaagggtttcgcggtggtggcgggcgaggtgcgctcgctggcgcagcgcagcgcccaggcggccaaggagatcaaggtgctgatcgaggattcggtcggcaaggtcggcacgggttcgcagcaggtcgagcgcgtcggcgcgacgatgcaggagatcgtggcctcggtcaagcgggtgacggacatcatgggcgagatctcggcggcctcggaagagcagtccagcgggatcgagcaggtcaaccgcgcggtgtcgcagatggacgaggcgacgcagcagaacgcggcgctggtggaagaggccgcggcggcggccggctcgctgcaggagcaggcgcagcgcctggccgaggcggtctcggtgttcaggatcaacgccggcgaggtgatcgacgtatcggcgcgccagctggcgcagcagcgccaggcgccgcgcgtggcggccgcgccggccagcgccgcggcgcccgaggcgccgcccgaaccggcgccgcggctggcgcgtccggctgcgcgcgcggacgtggcggccgaggcggccagcgtgcgccggcccgcccgccggccggccgcgaccgagccggcggcccggacgacggccgcgccgtcgcgccgccgtccgccggccgataatgattgggagtcgttctga

SEQ ID NO: 99253 - protein, 606 aa, Bordetella pertussis Tohama I
MWSNLKVRTCITLVLGLFLVAMLVSNGMAWLGMSSSNDKLERVNNAYSNQAVPAYDAYVMLLRARLNIVSSMMDLQEGRLKESADTLAHAQRQAGEARERFEAFLAVAKASSGADRVGAVETAFHAYLEVAARQMEAMQNQRLGEFVQLNPSAQRLNTAFDTAASAYLDRIDTDTDALVDDARAEHLRANTVTLVLIVLALALCAGCGVFIGRAVLRPLKEAGQHFDRIAAGDLTARVDVRNSNEIGQLFAGLKRMEESLTRTVAAVRRGVDEINVGSREISAGNTDLSSHTEEQAASLEETAASMEQLASTVKQNADNARQANQLAGVASDVAERGGSAVSEVVTTMQDISASSRKISEIVSVIDGIAFQTNILALNAAVEAARAGEQGKGFAVVAGEVRSLAQRSAQAAKEIKVLIEDSVGKVGTGSQQVERVGATMQEIVASVKRVTDIMGEISAASEEQSSGIEQVNRAVSQMDEATQQNAALVEEAAAAAGSLQEQAQRLAEAVSVFRINAGEVIDVSARQLAQQRQAPRVAAAPASAAAPEAPPEPAPRLARPAARADVAAEAASVRRPARRPAATEPAARTTAAPSRRRPPADNDWESF

SEQ ID NO: 99254 - DNA, 1638 bp, Bordetella parapertussis 12822
  CDS (1)..(1638): transl_table=11
atgcccatgcttgaaaggatcaaggtccgcaccgcgatggtggcggtattcgcctgcttcctggcggtgctgatgctgtcgggcgccctgacgtggcgcaacgcgggcaggagcgccgccgagatcgaggggctgaaccaggtcgccgtcaaccaggtcgacccgctgttcgaggccagcggcgcggcgctgcgcgcccgcgtcgccctgctggaggccctggccaacctgcaggccaatcacctggacccggtggcgaccctgcaccagcaggccggcgcggcgcagcgccaggcggccacgcaattccagcgctacgtggacgtgcccaaggagccggccgcggccgagctggccgcgaccctgcagacgcgctggcgcgcctaccagtcggtgctggacgagctggccgccgccgtcgacgccggccaggccgagcccgccctggccgccatgaatcgcgcgcagcaggccgaacatgcattccagcgcgacatggaagcctttctggccagggtacaggcgcacagcgacgaagtgcgcagcggcgccgaagacacccatgtcgtggcccgctggagcgccatcgcgctggccgcgctgggcgtgctgctgaccctggccggctggctgttcgtgcgccgcgcggtgctgcgccccttgctggaggccggccatcacttcgaccgcatcgccgacggcgacctcaccgcgcgcatcgaggtgcgctcggccaatgaaatcggcgcgctgttcgcggcgctcaagcgcatgcaggaaggcctgacgcgcaccatcgccgtcatgcggcgcggcgtcgacgaaatcaacgtcggcgcggccgagatctcggccggcaacgccaacctgtccagccgcacggaggaacaggccgccgccctggaagagaccgcggccaccatggaggaactggccaccacggtcaagcagaacgccgacaatgccgcgcaggccaatcagctggccgccgtcagcatgcaggtggcgcagcgcggcggcgagtcggtcgcgcaggtggtgcagaccatgcacggcatctccgcgagctcgcgccagatcgccgacatcgtcaccgtgatcgacggcatcgccttccagaccaatatcctggcgctgaatgccgcggtcgaggcggcgcgcgccggcgaacagggcaagggcttcgcggtggtggcgggcgaggtgcgcagcctggcccagcgcgccgcgcaggcggccaaggagatcaaggccctgatcgagagttcggtggcgacggtgcgcgccggctcgcaacaggtcgccagcgccggcggcaccatggacgaggtggtggcctcggtacagcgcgtggccgacatcatgggggaaatctcggccgcctcggcccagcaggccagcggcatcgaccaggtcagcctggcgatttcgcaaatggacgaaaccacccagcaaaataccgcgctggtcgaacaggccgcggcggcggccacggccatggaagaacaggcccgccacctggcggccgcggcggcggtcttcaggacgcagggcggcgccatcatcgacgtcgccgccgcgccgctggccgggccggcgggcggccatgccgccctgccgccggccgcggcccgctga

SEQ ID NO: 99255 - protein, 545 aa, Bordetella parapertussis 12822
MPMLERIKVRTAMVAVFACFLAVLMLSGALTWRNAGRSAAEIEGLNQVAVNQVDPLFEASGAALRARVALLEALANLQANHLDPVATLHQQAGAAQRQAATQFQRYVDVPKEPAAAELAATLQTRWRAYQSVLDELAAAVDAGQAEPALAAMNRAQQAEHAFQRDMEAFLARVQAHSDEVRSGAEDTHVVARWSAIALAALGVLLTLAGWLFVRRAVLRPLLEAGHHFDRIADGDLTARIEVRSANEIGALFAALKRMQEGLTRTIAVMRRGVDEINVGAAEISAGNANLSSRTEEQAAALEETAATMEELATTVKQNADNAAQANQLAAVSMQVAQRGGESVAQVVQTMHGISASSRQIADIVTVIDGIAFQTNILALNAAVEAARAGEQGKGFAVVAGEVRSLAQRAAQAAKEIKALIESSVATVRAGSQQVASAGGTMDEVVASVQRVADIMGEISAASAQQASGIDQVSLAISQMDETTQQNTALVEQAAAAATAMEEQARHLAAAAAVFRTQGGAIIDVAAAPLAGPAGGHAALPPAAAR

SEQ ID NO: 99256 - DNA, 1611 bp, Bordetella bronchiseptica RB50
  CDS (1)..(1611): transl_table=11
atgtgggtgctgggcgtgttcgcgctcatgattgccggcgtcggtgcgatggccgcgtatttcctgcaacagaattaccagtcggtgggggagatcaacgccctgaccgatcgggtcgcccaggtggaaatcatcaatagcgacatgctgcgtgcgcgcgtttcgctgatggtgtcggcgcgccagctgcaggaatcgggctggggcagtggcgcaaacgccgcccaggccgctgccgcttcgctgaaggacgccaccgatctgctcgcgggtgttcgcacccgctttgccgatttccagaagaacatgctggaagacgataccggccgccagctgtcgatgaacctggtgcggcgctaccgctcgtatatcgacgatggcgtggacaccatggtcgaagccctgcgcagcgaggactactcgaccttctacatggtcaacaatgaatacggcacgccgcgcagcgccgccttcattgccgccatcggcgacttcagcaagtacatcaacgaacagcagcaagccaccatggaagcggcgcgcaccaacttcgaccgcgccctgatggcggtgacggcggccgtggtgctggccttggtccttatgctggtggcgcgcacggtgttcggccgcctggtggtgcgtccgctcaaggaggccggccagcacttcgacaggatcgccgccggcgacctgaccgcgcgggtggaggtacgcaacagcaacgagatcggccagctgttcgccgcgttgaagcgcatgcaggagagcctgacgcgcaccgtggcgacggtgcgccgtggcgtggacgagatcaacgtgggttcgcgcgagatctcggccggcaacacggacctgtccagccgcaccgaagagcaggcggcctcgctggaagagaccgcggcctcgatggaggagttggcctcgaccgtcaagcagaacgccgacaacgcgcgccaggccaatcagctggcggccagcgcctcggacgtggccgagcgcggcggttcggcggtgtccgaagtcgtcagcacgatggacgggatttcggccagttcgcgcaagatctccgagatcgtgtcggtgatcgacgggatcgcgttccagaccaacatcctggcgctgaacgcggcggtggaagcggcgcgcgcgggcgagcagggcaagggtttcgcggtggtggcgggcgaagtgcgctcgctggcgcagcgcagcgcccaggcggccaaggagatcaaggtgctgatcgaggactcggtggacaaggtgggcacgggttcgcagcaggtcgagcgcgccggtgcgacgatgcaggagatcgtggcctcggtcaagcgggtgacggacatcatgggcgagatctcggcggcctcggaagagcagtccagcgggatcgagcaggtcaaccgcgcggtgtcgcagatggacgaggtgacgcagcagaacgcggcgctggtggaagaggcggccgcggcggccggttcgctgcaggagcaggcgcagcgcctggccgaggcggtcgcggtgttcaagatcaataccggcgaagtgatcgaagtgccggcgcaccaattgtccggctacgcggcgcccctggtcgcgcagtcctga

SEQ ID NO: 99257 - protein, 536 aa, Bordetella bronchiseptica RB50
MWVLGVFALMIAGVGAMAAYFLQQNYQSVGEINALTDRVAQVEIINSDMLRARVSLMVSARQLQESGWGSGANAAQAAAASLKDATDLLAGVRTRFADFQKNMLEDDTGRQLSMNLVRRYRSYIDDGVDTMVEALRSEDYSTFYMVNNEYGTPRSAAFIAAIGDFSKYINEQQQATMEAARTNFDRALMAVTAAVVLALVLMLVARTVFGRLVVRPLKEAGQHFDRIAAGDLTARVEVRNSNEIGQLFAALKRMQESLTRTVATVRRGVDEINVGSREISAGNTDLSSRTEEQAASLEETAASMEELASTVKQNADNARQANQLAASASDVAERGGSAVSEVVSTMDGISASSRKISEIVSVIDGIAFQTNILALNAAVEAARAGEQGKGFAVVAGEVRSLAQRSAQAAKEIKVLIEDSVDKVGTGSQQVERAGATMQEIVASVKRVTDIMGEISAASEEQSSGIEQVNRAVSQMDEVTQQNAALVEEAAAAAGSLQEQAQRLAEAVAVFKINTGEVIEVPAHQLSGYAAPLVAQS

SEQ ID NO: 99258 - DNA, 1695 bp, Photorhabdus luminescens subsp. laumondii TTO1
  CDS (1)..(1695): transl_table=11
atgtttaaccgaatgaaaatagtgaccggactgatggcggtcatcatattatttggtgctctgcaatttatatccggaggacttttcttccatgagttgaaaagtaacaaggaaaatctagaaatactggataaaatgcgggaacagcagacatttttgaatgacacttgggttaatttgttacaggcccgtaacaacttgaaccgtgcgggcattcgttacatgatgaaaaaagatgagggagtcgataattactacacactggagcagttactgacagatgccagaagtaacctctctatcgcagagcagcgttttgaacaatacgaacagaccgctaaattgcctattcatgaatcagaaagtcttaatcgccttaaaaaagcctatgatgtttatatttcagcgcttcatgaacttattgttctgcttgaacatgatcgggcggtagagtttttcaaccaaccaacgggcaaatatcagagcgcttttgaggaagaatataacttctatttgacccaaaacgatcatctctattctgatgtggtatttgatgccagtatctcttacagaaatgcggtgattatgttgggtattatcatgctgattctggtttcagccatgatttttagttgggttagcattaagcatagtttgctgaatccgttaaacaaattattggagaatattaaggcactttctaccggtgatttgacacaaaatgtaactgtttcaggcagaaatgagatgagtacgttggctgttggcctgaagcatatgcaaaaagaatttatcactactgtcagtagtgttcgtcaaagcagtgaaagtatttataacggaaccagtgaaattgctgctggaaataatgatctttcttctcgcactgaggaacaggttgcttctttggaagaaaccgccgccagtatggagcaattgacagcaactgtacgccaaaatgcggaaaatgctcgtcaggcaagtaacttagctgatagtgcttctgaagttgcacgccagggtgggaaagtcgtggcgaatgttgtacagacaatgcgtgaaattgccggtagttctcagaagatttccgatattactagtgttattgatgctattgcgttccagactaacattttggcactgaatgccgcagtggaagcagcacgtgctggtgaacatgggcgaggttttgctgttgtggcaggagaagtacgtaaccttgcacagcgtagtgctgaggcagcaaaagagatcaaagcattaatagaagattcagtaagccgcgcagataccggttctgtcttggttgagagcgccggtgaaacaatgaataacattgttagttcagtcacccgtgtcactgacattatgggtgaaattgcatctgcatctgatgaacaaagtagagggataactcaggttggcctggctatctccgaaatggatcgtgtaacacaacaaaatgctgctttagttgagcaatccgcggctgcggcggctgcactggaagatcaagctgctggattgaagaaactagtttctttgttccaattaccgaatcttgacgataaatctcaatccgaaatgaaaattgagcatttgcctgtggctaagactcctcctgcaaaatcgaatccactggtgttgaagaaagccaacaatgtggaagaacaagctaattgggaaacattttaa

SEQ ID NO: 99259 - protein, 564 aa, Photorhabdus luminescens subsp. laumondii TTO1
MFNRMKIVTGLMAVIILFGALQFISGGLFFHELKSNKENLEILDKMREQQTFLNDTWVNLLQARNNLNRAGIRYMMKKDEGVDNYYTLEQLLTDARSNLSIAEQRFEQYEQTAKLPIHESESLNRLKKAYDVYISALHELIVLLEHDRAVEFFNQPTGKYQSAFEEEYNFYLTQNDHLYSDVVFDASISYRNAVIMLGIIMLILVSAMIFSWVSIKHSLLNPLNKLLENIKALSTGDLTQNVTVSGRNEMSTLAVGLKHMQKEFITTVSSVRQSSESIYNGTSEIAAGNNDLSSRTEEQVASLEETAASMEQLTATVRQNAENARQASNLADSASEVARQGGKVVANVVQTMREIAGSSQKISDITSVIDAIAFQTNILALNAAVEAARAGEHGRGFAVVAGEVRNLAQRSAEAAKEIKALIEDSVSRADTGSVLVESAGETMNNIVSSVTRVTDIMGEIASASDEQSRGITQVGLAISEMDRVTQQNAALVEQSAAAAAALEDQAAGLKKLVSLFQLPNLDDKSQSEMKIEHLPVAKTPPAKSNPLVLKKANNVEEQANWETF

SEQ ID NO: 99260 - DNA, 1635 bp, Photorhabdus luminescens subsp. laumondii TTO1
  CDS (1)..(1635): transl_table=11
atgttaggcaggcttcgtatatcaaccagtttatatctgttactgatgatgttttgtgtaatgcagataatctcaagtggtttatcacttggaatcattcacgcagatcaatcttatattgagcagattgatctgggaacacagaagagggataccttagggttgagctgggcagctctgctgcaatcgcgtaatacacttaatcgaatcgctgtagggaaaacgttacaacaatctgaggatcatattggcagtatggttgctaatgttaaggaaaccttagatagggctgagatgcattttgctgagtttattgcgctgcctaaattgaatgacgaggatggtagtagtgtattgctggcctcggtagaaaccagttataaggaatatatcaacgcgcttagagaactctcggcttttttagaaagtggtaattatgatgcattcttagatcagccgacagaaaagtatcagcagcaacttgaatctgatttcaatcattatatgcaatatatcggtgaggtgattacaaccgccgttcaagatggtcgtctttattaccaaatttcagttgccatgtttgtaggtgcgatcttaatggtactggttgttgcttgggcggctcattggtggttgaaaaagaatcttctcagaccttttgccaatatgcgtagtcacttccagaatgttgcggaaggaaaactcaataaagaagtttctgttttcactcaagatgaaattggtgaagtgttcctcaaattacgtgaaatgcaacgttcactggttaattccattacgttggtaaaagagaatactaacttgatgtataacggtattcaggaaattactcagggtaataccgatctctcttcccgcactgaagagcaagctgcatcactggaagaaacggcagccagtatggaacaactgactgcaactgtgcgtcagaatgcggaaaatgctcgccaggccagtgaattggcggtatctgcatcgaaaacagcctctaaaggaggcgaactgaccgttgatgttgtggaaacaatggatgcaattgccaatagctcacagaaaatcagtgccattatcagcgtcattgatggtattgcatttcagaccaacattttggcactgaatgcggcagtagaagctgcacgggcaggtgaacaaggccgaggtttctccgttgttgctggtgaagtgagggatcttgctcagcgaagtgccgaagcagcgaaagagattaagacattaattagtgaatctgttcagcgggtaagccaaggttccgagttggttagtcatgcagggaagaccatgaatgaattggtcgtttctgtaaaccaagtcacggatctgatggctgaaattgctgcggcatctgatgaacaaagtcggggaattcatcaagtagcacaagcggttacacagatggatcaggttactcagcagaatgcggcattggttgaacagtcagcggcggcggcggcggcacttgaagatcaggccgatattttggtgcaaatagtggcacaatttgagttacccaataattcagaaaataagcttgaaaatgaactttcactgacgctgaggtctgcggatagcgaaggggcagtcaatcagactcactga

SEQ ID NO: 99261 - protein, 544 aa, Photorhabdus luminescens subsp. laumondii TTO1
MLGRLRISTSLYLLLMMFCVMQIISSGLSLGIIHADQSYIEQIDLGTQKRDTLGLSWAALLQSRNTLNRIAVGKTLQQSEDHIGSMVANVKETLDRAEMHFAEFIALPKLNDEDGSSVLLASVETSYKEYINALRELSAFLESGNYDAFLDQPTEKYQQQLESDFNHYMQYIGEVITTAVQDGRLYYQISVAMFVGAILMVLVVAWAAHWWLKKNLLRPFANMRSHFQNVAEGKLNKEVSVFTQDEIGEVFLKLREMQRSLVNSITLVKENTNLMYNGIQEITQGNTDLSSRTEEQAASLEETAASMEQLTATVRQNAENARQASELAVSASKTASKGGELTVDVVETMDAIANSSQKISAIISVIDGIAFQTNILALNAAVEAARAGEQGRGFSVVAGEVRDLAQRSAEAAKEIKTLISESVQRVSQGSELVSHAGKTMNELVVSVNQVTDLMAEIAAASDEQSRGIHQVAQAVTQMDQVTQQNAALVEQSAAAAAALEDQADILVQIVAQFELPNNSENKLENELSLTLRSADSEGAVNQTH

SEQ ID NO: 99262 - DNA, 1524 bp, Erwinia amylovora
  CDS (1)..(1524): transl_table=11
atgtcgatcgcaatgataatcatatctttcttgatactgacttcgtttttactatcccgtctaactgccactacgtcagaattacagaatttgtatgaaagagactatcagtctgcctcgataattggtcaggtcgatggcctgctcacccgtgtggatatcaacattctccggatgatcgccatcggtgacccggcatcgattgccggctggaaaaaacaaaacaccgaaaactttgacgaagttaacgcgctgttaaataagcttaaacccacaattgataccacaatgacgtcgtcctttaacggattaatatcatcgtatgagttaatgcgtaaggggatggagcatcaggtacaggccgttgagtctggcgacataaaaaaagccagcgaaatcaacagaaatgaagtaaaagcgtatgcggataaaacatttggtgcattatccactctaaaaaaacatcaggatgcagttgcggaaaataaggtagttgctcagaaacgtaaggatttcaggacgctcatcatttcactcctcgctgccggggctgttacgctgatatcggttgcactgggaacgctgatcctgcgcagtttacttcggcagctgggcggagagcctctggcagcagcacaggaggtcaggctgatggcaggaggcgaccttacctttcccatcctggtggagcagcacgatcgtgtcagcctgctggcccagctgaaagatatgcagtcatccctttccgcgctggtgactaacgtgcgcagcaatgcagaaagcctggcaaccgccagtacccagatatctcagggcaaccaggatctcagccagcgaacggaagaacaagccagctcgctgcaacagacctctgccaccatggaacaactgggttccaccgtcagcaataacgctgaaaacgcacatcaggccagccagctggcttccggtgcctcaacgctggcagcggaaggggagctaatggtcgggcgtgttatctcaaccatgagagtcatcaatgacagctcaaagaaaatttccgaaatcatcaatgtgatcgatggcatcgcctttcagacgaatattctggcgctgaatgcggcggtggaagccgctcgtgcaggtgaacagggacgtggattcgcggttgttgccgccgaagtgcgcagcctggcacaacgcagcgccaatgccgccaaagaaatcagcacattaattaccaacagcgtcgggcaggtcgagcagggctgtctgttggtggatgaaacaggcgtaaccatgacgcggattatggaggcgatcaaacaagtgaaatatattgtgtctgaaatcagtgctgcgagcctggaacaaagctcaggggtaaaacaggtgggacaggccatcacccagatcgacatggtgacgcagcaaaacgctgctttggtggaagaaagcgccgctgctacagaaaacctgaaagaacaggctgagcaacttgtccaggcggtggccgtctttcaggtgacggccaccgccgtttaa

SEQ ID NO: 99263 - protein, 507 aa, Erwinia amylovora
MSIAMIIISFLILTSFLLSRLTATTSELQNLYERDYQSASIIGQVDGLLTRVDINILRMIAIGDPASIAGWKKQNTENFDEVNALLNKLKPTIDTTMTSSFNGLISSYELMRKGMEHQVQAVESGDIKKASEINRNEVKAYADKTFGALSTLKKHQDAVAENKVVAQKRKDFRTLIISLLAAGAVTLISVALGTLILRSLLRQLGGEPLAAAQEVRLMAGGDLTFPILVEQHDRVSLLAQLKDMQSSLSALVTNVRSNAESLATASTQISQGNQDLSQRTEEQASSLQQTSATMEQLGSTVSNNAENAHQASQLASGASTLAAEGELMVGRVISTMRVINDSSKKISEIINVIDGIAFQTNILALNAAVEAARAGEQGRGFAVVAAEVRSLAQRSANAAKEISTLITNSVGQVEQGCLLVDETGVTMTRIMEAIKQVKYIVSEISAASLEQSSGVKQVGQAITQIDMVTQQNAALVEESAAATENLKEQAEQLVQAVAVFQVTATAV

SEQ ID NO: 99264 - DNA, 1665 bp, Herminiimonas arsenicoxydans
  CDS (1)..(1665): transl_table=11
atgctgaaaaacatttctatcaagtttcgtttgctgctcaccatggtattcatgggcatgatgctgattgtcggcggagcgatgggcattctgggcgtacaaacaaccaacaatacgctgcagaatatctacgtcaatcagatgccctcctccgaggcgatccacagcatgatgacgcgtttgctgcaggctcgcgcaggactcaatctggtggcgatgcgcccgcatgaagagggttcggaacgcattctcaagcgcgcagaaaacttctacctgcaatccgaagaggagtggaaaaaatacctgagtctcccgatagaaaccctggaggagagaaaagtagccgatgaagtgaccgccaagcgcatacgctatctgaaggaagcggaacagggattgatcgctgcactgcgcgccgggcgtaatgaagaggtggaagatatcctcgtcaataaaatgccgcctttattccagtcgctgactaaaagcactgacgaattggtcgagctgcaaatgaaaagtgcagcaaccggctatcaggacagccagactctatttcactacttccgcatcatcgccgtggtgggcgtactgctcggtttgatcggggtagccatttacgcgttcttcctgattcgcgccattaccgggccgctgaaggaaatgctgctccatttcgacaccatagcctcaggcgatctgaccagcaatattgaagtcaaatccagaaacgaaatgggcacgctgatgctcgggctgcaaaaaatgcagaaacgactgacggataccgtggcgcaggtgcgcgaaggcagcatggccatcagtacggcaacaacggaaatcgcggccggaaatctggacctgtccagccgcaccgaacagcaggcagcttcactggaagaaactgcatcgtcgatggaagaactgacatcgacagtcaagcaaaataccgacaatgcgcgccaggccaatcaactggcgacttcggcctctgccgtggcagtcaagggcggagccgtcgtttccgacgtggtcaatacgatggatgcaatcaatacttcggccaggaagattgtcgacatcatcggcgtcatcgacggcattgcattccagaccaatattctggcgctcaatgcagccgttgaagcggcgcgcgccggcgaacagggccgcggttttgccgtggtagcgagcgaagtaagaagtctggcgcagcgctctgctgctgcagcaaaagaaatcaagcatttgatcgacgactctgtcaacaaagtcgatgccggcaccaggctggttgcggaagccggcaccacaatgaccgaagtagtcgatagcgtcaaacgtgtaaccgacatcatgagtgaaattctggccgccagccaggagcagagtgccggtatcgagcaggtcaataccgccattgtgcaaatggatgaagtgacgcagcaaaatgccgcattggtggaacaagccgccgctgccgcctcatcgctgagagaccaggcgaccaatctgtcgactgtcgtcagcgtattcaagctgcagggccatcagtccgctccgcaaaaccttgtaccgcaagcacgtccgaaagcattggaaagccgtccggcagcgattgcccacaccggcaagggcaatgatggcgattgggagcaattctga

SEQ ID NO: 99265 - protein, 554 aa, Herminiimonas arsenicoxydans
MLKNISIKFRLLLTMVFMGMMLIVGGAMGILGVQTTNNTLQNIYVNQMPSSEAIHSMMTRLLQARAGLNLVAMRPHEEGSERILKRAENFYLQSEEEWKKYLSLPIETLEERKVADEVTAKRIRYLKEAEQGLIAALRAGRNEEVEDILVNKMPPLFQSLTKSTDELVELQMKSAATGYQDSQTLFHYFRIIAVVGVLLGLIGVAIYAFFLIRAITGPLKEMLLHFDTIASGDLTSNIEVKSRNEMGTLMLGLQKMQKRLTDTVAQVREGSMAISTATTEIAAGNLDLSSRTEQQAASLEETASSMEELTSTVKQNTDNARQANQLATSASAVAVKGGAVVSDVVNTMDAINTSARKIVDIIGVIDGIAFQTNILALNAAVEAARAGEQGRGFAVVASEVRSLAQRSAAAAKEIKHLIDDSVNKVDAGTRLVAEAGTTMTEVVDSVKRVTDIMSEILAASQEQSAGIEQVNTAIVQMDEVTQQNAALVEQAAAAASSLRDQATNLSTVVSVFKLQGHQSAPQNLVPQARPKALESRPAAIAHTGKGNDGDWEQF

SEQ ID NO: 99266 - DNA, 1617 bp, Herminiimonas arsenicoxydans
  CDS (1)..(1617): transl_table=11
atgaacatcacactcaagaccaggctgggcctggtcatcggcctccttgcgctcatcagcatggcggtcggcttgctgggcctgaacgggataggccgctccaacggcgacttgcagcaggtttatcaacaccgcactgtagcactggaaaaaatctcgcggatagaccgtctgctgcttgcaaatcgtctggccttgtccgaagccctgcatgatccggatgcggaaaagaccgccagccataccgctctgattgcaaaaaatgccgcagaaatcacgcaggcatggaacgaatacatggacggcagtctgttgcccgatgagcgcaggctggcagaaaattttgcctcccatcgcgcccgcatggtgcaggatggtttattcccggccgccgccgcattgcagaaagggcaggttgtagaggcgatgcaattacagcagcagttccagaaactggtgccggcggtgcgcaacagcattgatgctttacgcaagctgcaggtggacgaggccggtctggcctatgaggctgcacaacagcgttatctgactattcgcaatgtcattgcgacggtgcttggggcaggtgcggtggcggcgacgctgctcggtttcctgctggtgcgcagcgtttatgcgcaacttggcggcgaaccgcaatatgcagcacagatagtgcgccgtattgccggcggtgatctgtcggcaacgatcatcacacgcaagggcgaccgcaacagtttgctggcagcgatgcaggacatgcagcaaaatctggcgaagacggtaggcgatatccggcgcgccagcgataccatcgccaccgcatccggccagatcgccgccggcaatatcgatctgtcggcacgcaccgaacagcaggccagttcactggaagaaaccgcgtcttcgatggaagaactgactgcgacggtcaagcagaatgccggccatgcgcagcaagccaaccaactggcggtttccgcatccgatatcgcagtacagggcaatacggtggtggcgcaggtcgtcacgacgatggactccatcagtgcatcggccggcaggataggcgacatcataggcgtcatcaacggcattgccttccagaccaatatcctggccctgaatgcagcggtggaggctgcgcgcgtcggcgagcagggacgcggttttgcggtagtcgctaccgaggtgcgcagtctggcacaacgttcggccgaggcggcgaaggaaatcaagagcttgatagacgactcgctggaaaaagtcggcgccggcgctacgctggtcgatcaggccggcagcacgatgaacgaaatcgttgccagcatagggcaggtcaccgacatcatgggtgaaatcaccactgccagccgcgagcagaccgccggcatagaacaggtcaatcaggccatcggccagatggacagggttacgcagcagaatgccgcactggtggaagaggcggccgctgccgccggatcgctgcaggaacaggcctgcagtctggtgcaggtcgtgagcgtattcaagcttgagcaggctcagtcccatcggacggcgctgccgcacatgcttgatatgccagtccatacgcttgcgcgcctgacgtga

SEQ ID NO: 99267 - protein, 538 aa, Herminiimonas arsenicoxydans
MNITLKTRLGLVIGLLALISMAVGLLGLNGIGRSNGDLQQVYQHRTVALEKISRIDRLLLANRLALSEALHDPDAEKTASHTALIAKNAAEITQAWNEYMDGSLLPDERRLAENFASHRARMVQDGLFPAAAALQKGQVVEAMQLQQQFQKLVPAVRNSIDALRKLQVDEAGLAYEAAQQRYLTIRNVIATVLGAGAVAATLLGFLLVRSVYAQLGGEPQYAAQIVRRIAGGDLSATIITRKGDRNSLLAAMQDMQQNLAKTVGDIRRASDTIATASGQIAAGNIDLSARTEQQASSLEETASSMEELTATVKQNAGHAQQANQLAVSASDIAVQGNTVVAQVVTTMDSISASAGRIGDIIGVINGIAFQTNILALNAAVEAARVGEQGRGFAVVATEVRSLAQRSAEAAKEIKSLIDDSLEKVGAGATLVDQAGSTMNEIVASIGQVTDIMGEITTASREQTAGIEQVNQAIGQMDRVTQQNAALVEEAAAAAGSLQEQACSLVQVVSVFKLEQAQSHRTALPHMLDMPVHTLARLT

SEQ ID NO: 99268 - DNA, 1635 bp, Burkholderia vietnamiensis G4
  CDS (1)..(1635): transl_table=11
atgttcggaaaaatcaagctcgcgtcgggtctgctcggcgtgctgaccgtgttttgcctctttctattcgcgatcgaggcgctcgggttctgggcgctcacgtcgacgcgcagcggcgtcgacgatctgtcgaacgtcgcgatcgcacaggtcgacgcggcgagccaggcgaccgagcggctgctcgacgcgcgcgtgaacctgtcgcgtgcgggcacgcggatggtgcgcggcggccccaagcccgacgacatcatcggtcatgccagcgcgtcgctcgccgaagcggacagcgcattcgcgcgtctcgcggccgcgccgccggtcgacgacaccaaccgcgcgcgcgtcgcggcgctcaccgagcgctatcgcgcgctgcgcggcgcgctcggcgaactcgtgcagttcctcgacgccggcaacatccaggcgtttctcgaccagccgacgcaaggcttccaggacgcctacatcgcggaactgcatcgcttcgcggactacggcggcgcgtcgagccgcacggcgctcgccacgatcgatggcgggatgcaatggttcaagtgggtcggcatcgtgttgctggtcgcgatgctcgcggcgagtgccgccttctacgcgggcgcgcggcgcgcggtggtcgcgccgctcgacgaagccggccgccatttcgagcggatcgcgcaagggcggctcgacgaagccgtgcgcgcgggcggcgtgttcgagatcgaccggatgctgcgcggcctcgccgcgatgcaggcgagcatcgccgacaccgtgcgcaccgtgcgccacgcgtcggatgcgatccacgtcggcgcgggcgagatcgccggcggcaacgccgacctgtccgcgcgcaccggcacgcaggccgcgtcgctcgaggaaaccgcggcgagcatggaggagctgaccgcgaccgtccgtcagaacacggacagcgcacgcgcggccagcgcgctggccgacgcggcgctcgacgcgacgcgccagggcggcagcgtggtcgacagcgtgatcgaccggatgcgcgggatcgcgcacagttcggggcgcatcgcggaaatcatctcggtgatcgacggcatcgcattccagaccaacatcctcgcgctgaacgcggcggtcgaagcggcgcgcgcgggcgagcagggccgcggcttcgcggtggtcgcgggcgaagtgcgctcgctcgcgcagcgcagcgcgcaatcggcgaaggagatcaaggcgctgatcgaggaatcggtcgcgcagatcgacggcggctcggagctcgtcgagcgcgcgggcgcggcgatgcgcacggtatcgacgtcgatcacgcgcgtcgcgcagacgatgacggaaatcacgtccgcatcggtcgagcagagcgtcggcatcgagcaggtgaaccaggccgtcacgcagatggatcagctgacgcagcagaacgcggcgctggtcgagcaggtcgcggcggcggcggcgtcgctgaacgaccagaccgcgcagctgatgcgcgcggtgtcggtgttcgaactgggcgacgcgcgtgcgcagcgtgcggtgcgcgacgagcgcgccgcggtgtcgccgtcgccggccgacgccgcttacgaagcggcgggcagcgccgcgtag

SEQ ID NO: 99269 - protein, 544 aa, Burkholderia vietnamiensis G4
MFGKIKLASGLLGVLTVFCLFLFAIEALGFWALTSTRSGVDDLSNVAIAQVDAASQATERLLDARVNLSRAGTRMVRGGPKPDDIIGHASASLAEADSAFARLAAAPPVDDTNRARVAALTERYRALRGALGELVQFLDAGNIQAFLDQPTQGFQDAYIAELHRFADYGGASSRTALATIDGGMQWFKWVGIVLLVAMLAASAAFYAGARRAVVAPLDEAGRHFERIAQGRLDEAVRAGGVFEIDRMLRGLAAMQASIADTVRTVRHASDAIHVGAGEIAGGNADLSARTGTQAASLEETAASMEELTATVRQNTDSARAASALADAALDATRQGGSVVDSVIDRMRGIAHSSGRIAEIISVIDGIAFQTNILALNAAVEAARAGEQGRGFAVVAGEVRSLAQRSAQSAKEIKALIEESVAQIDGGSELVERAGAAMRTVSTSITRVAQTMTEITSASVEQSVGIEQVNQAVTQMDQLTQQNAALVEQVAAAAASLNDQTAQLMRAVSVFELGDARAQRAVRDERAAVSPSPADAAYEAAGSAA

SEQ ID NO: 99270 - DNA, 1560 bp, Burkholderia vietnamiensis G4
  CDS (1)..(1560): transl_table=11
atgaacctgaacgccctgttttcccgcttttcgatccgtacgcggatcttttccacgctcggcctggtggccgtgctgctcgtcgtgtcgggcctgatcggccttgccgggatgcagagttcgaaccgcgcgctcgacgaggcctatacgcgtcagctggtcgcgaagacggcgctgtccgcggcgaacctgaacctgacgatcgtgcgcaccacgctcgaccgcgcgctcatgcacccggacgcgcccgaggtgcccgagctcgtcggcaaggccgaaggttatctcgcgaaagccgacgcggcgtggcgcacctacgcggcgatgccgcacgacggcgacgaagctccgctcgcgagccggctcgacgccgcccgccaggcgctgatcggacaggcgctgaagccgatgatcgacgcgatgcgcggcggccgccgcgacgacgccgaccggctgctgatgacggtcgcgccgccgctgtcggtcgcgctcgcgcaggcgaccgatgcgctggacgcataccaggcggcgcgcggcaaggacgtctacgacaccgcgcagacctattacaactggatgcgcatcggcgcgctcgccggcatcgcgttcgggctggccgcctgcttcggctgcgcggtcgggctgcatttcgcgatcacgcagccggtgaaccggctgctcgcgcatttccgccgcctgtcggacggcgatctgacggccgagctgcactggtcgtcgcgcgacgagatggccgagctggtcaagggcgtgacggggatgcagcgcagtctcgccgatacggtgcgccaggtcagccgcggctccgaatcgatttcgaccgccacgcatcagatcgcggccggcaacacggacctgtcgcagcgtaccgaggagcaggcgtcggcgctgcagcagacggccgcgagcatggagcagctgacggccaccgtgaagcagaacgccgatcatgcggtcgaggcgcaggcatgcgccgacaacgcgagcgagatcgcgacgcgcggcgcgacggtcgtcggcgaggtgatcggcacgatgaacgagatcgaccagagctcgcagaaggtcgccgatatcatcggcaccatcgaaggcattgcgttccagaccaacattctcgcgctgaacgcggcggtcgaagccgcgcgggcgggcgagcagggccgcggcttcgccgtggtcgcgggcgaggtgcgcacgctcgcgcagcgctcggcgtcggccgcgaaggaaatccgcacgctgatcggcgagtcggtcgagcgcgtctcgacgggctcgaaactggtcggcgtggccggtgcgacgatgcaggacatccagcaggcgatcggccgcgtgaccggcatcatgaccgagatcgcggcagcgtcgaacgagcagcgcgacggcatcgagcaggtgaaccgcgcggtgtcgcagatggacgaggtgtcgcagcagaacgcggcgctggtcgagcaggccgcggccgccgcggcgtcgctcgaagagcaggcggaaggtctgcgtcgggcggtggggacgttccgggtcgcgtga

SEQ ID NO: 99271 - protein, 519 aa, Burkholderia vietnamiensis G4
MNLNALFSRFSIRTRIFSTLGLVAVLLVVSGLIGLAGMQSSNRALDEAYTRQLVAKTALSAANLNLTIVRTTLDRALMHPDAPEVPELVGKAEGYLAKADAAWRTYAAMPHDGDEAPLASRLDAARQALIGQALKPMIDAMRGGRRDDADRLLMTVAPPLSVALAQATDALDAYQAARGKDVYDTAQTYYNWMRIGALAGIAFGLAACFGCAVGLHFAITQPVNRLLAHFRRLSDGDLTAELHWSSRDEMAELVKGVTGMQRSLADTVRQVSRGSESISTATHQIAAGNTDLSQRTEEQASALQQTAASMEQLTATVKQNADHAVEAQACADNASEIATRGATVVGEVIGTMNEIDQSSQKVADIIGTIEGIAFQTNILALNAAVEAARAGEQGRGFAVVAGEVRTLAQRSASAAKEIRTLIGESVERVSTGSKLVGVAGATMQDIQQAIGRVTGIMTEIAAASNEQRDGIEQVNRAVSQMDEVSQQNAALVEQAAAAAASLEEQAEGLRRAVGTFRVA

SEQ ID NO: 99272 - DNA, 1794 bp, Burkholderia vietnamiensis G4
  CDS (1)..(1794): transl_table=11
atggtgatcgcaaacctgacgatacgggcgcgcatcggcttgacgatggcgtttctcgcggtgctgctggcggtgatcggggtgctcggcctctacgggatgagcacggcgaacgactcgatgcgcgagctgttcacgaaccagatgccgagcgcggtcgacgtggccgtcgcggacacctacgcggcgcgcgagcggctggcgctcgatcgcgccgcgctgctggtgggcacgcccgattcggccacggcggtcgagcgcagccgcgagatgcgcgcgcagtccgacgcgtggtggaagaagtacctcgatctgccgcgcggcccggaggaagaccgcatcgcgcaggacgtcgccgcaaagcggcaggcgttgcagcgcaactgcgacgcgttcggcgcgctcgtcacggccggcgaccgtgaccgcctcggcgaaggcgccaagcaactccaggtgaagtacaacgacctcacgaccgcgagcgaggcgttgcgcaattttcagttctccgacgctcagcgcggctacgatcacgcggaatcggtgtacgaaacgttgcgcgtggtatccgtcgtcgcgctgctcgccggtttcgtcgccgcggtgctgtcgtggctgacgctgacccgcgcgatcggccgcccgctcgctgaggcgctcggtcatttcgacgcgatcgcggcaggcgacctgcgccgtgcgatcgtcgtgcagcggcgtgacgaaatggggcaactgctgaacggtctcgcgaagatgcagcgcgggctcgtcgacaccgtgcgcacggtgcgcggcggcagcgagtcgatcgcgacggccgcgcgggaaattgccgccggcaacatcgacctgtcgtcgcgtacggaggagcaggcgtccgcgctgcaggaaactgcatcgagcatggagcagctgaccggcaccgtgaaacagaacgcggacaatgcacggcaggcgagcgcgctggctgcgaacgcatcggagatcgcgaacaagggcaatacggtggtcggccaggtggtcggcacgatgggcgaaatcaacgacagctcggcgaagatcgcggacatcatcgcgatcatcgaaggcatcgcgtttcaaaccaacatcctggcgctgaacgcggccgtcgaagcggcgcgcgccggcgaggaagggcgcggctttgcggtcgtcgcgggcgaggtgcgcagcctcgcgcagcgctcgtcgagcgcggccaaggagatcaaggcgctgatcgacgcgtcggtggagcgtatccacacgggctcgcaactggtcgacgaagccggccgcacgatgcacgacgtgatcgccgcggtgcagcgcgtgacggacatcatgggcgagatcgccgcggcgtccgaagagcagagcagcggcatcgatcaagttgctcgcgcggtcgcgcagatggacgaagtcacgcaacagaacgcggcgctcgtcgaggaagcggcggccgccgcgcaatcgctcgacgaacaggcggcgcgcctgcgcgaaacggcagcggtgttccggctcgacgacgacgcggcgcgaccgtcggtcgcagccggcgccacgcgtcaggcgccgcgcgcgaaacctgcgcccgctgcgcagccggccgcggcagccgcaccttccgtgcccgctgggccgaccgccgcgcctgccacgcgcagcgagcgtgacgccgcaccgaagcgcacggcaccggcgcgcaagccggcggccgcagcgagcgcgccgcccccggctgcggcaacggccggcgccgacgattgggagacgttctga

SEQ ID NO: 99273 - protein, 597 aa, Burkholderia vietnamiensis G4
MVIANLTIRARIGLTMAFLAVLLAVIGVLGLYGMSTANDSMRELFTNQMPSAVDVAVADTYAARERLALDRAALLVGTPDSATAVERSREMRAQSDAWWKKYLDLPRGPEEDRIAQDVAAKRQALQRNCDAFGALVTAGDRDRLGEGAKQLQVKYNDLTTASEALRNFQFSDAQRGYDHAESVYETLRVVSVVALLAGFVAAVLSWLTLTRAIGRPLAEALGHFDAIAAGDLRRAIVVQRRDEMGQLLNGLAKMQRGLVDTVRTVRGGSESIATAAREIAAGNIDLSSRTEEQASALQETASSMEQLTGTVKQNADNARQASALAANASEIANKGNTVVGQVVGTMGEINDSSAKIADIIAIIEGIAFQTNILALNAAVEAARAGEEGRGFAVVAGEVRSLAQRSSSAAKEIKALIDASVERIHTGSQLVDEAGRTMHDVIAAVQRVTDIMGEIAAASEEQSSGIDQVARAVAQMDEVTQQNAALVEEAAAAAQSLDEQAARLRETAAVFRLDDDAARPSVAAGATRQAPRAKPAPAAQPAAAAAPSVPAGPTAAPATRSERDAAPKRTAPARKPAAAASAPPPAAATAGADDWETF

SEQ ID NO: 99274 - DNA, 1671 bp, Erwinia carotovora subsp. atroseptica SCRI1043
  CDS (1)..(1671): transl_table=11
atgtttaagcgtattaaagtcattaccatccttgttattttattgtttgtattaggaatatctcagtttttaaccggggcgctatccgttcgggcattgataaacgatagagatagtttccttgtttctcaacgctctaaccagaatgtggccgcctttaccgatgcctggattatgatgaatcagacgcgcatcgctatcggatctattatacaaaacatgatgctggggaatgcggataaagaagccatgcaggcgcttttacagcaggccaaatcacaactggttgcctcagagagtagttataaacactatttgtctctgcctaatacacctggattggatgacgcgttatccaaaaaacttgagacgagttataccgcttacgacaagctactgaatgatattgtggattcgctttctggtgggttggcaggggcggcgatgaaattgagtagcgaggcgacaccgtttaacgtggcgatgcaggatgcctatattacgtggcgtgcggcacaaaatcagctgtcagatgatggcttacaggaaaaccacgtcgcatttgaaacgatgctgtggcttttgggcgcactgtccgtggtcgtcgtgctggtgattatcctcagttggatcgggttgcagcgtattcttttgcacccgctgcgtacgctcatgcggcatatcagcgctatcgccgagggtaatctgacgcatcatattgataccgcaggtcgtaatgagatgagccaactggcggcggggctgcacgatatgcagcagtcattaatccgtaccgtgagcctagtgcgtgacagttccaactccattcattccggggccagtgaaatttcggtaggcagcaacgatctgtcttcacgtaccgagcaacaggccgcatcgctacaggaaacagcggccagcatggagcagctaacctcaacggtgaaacagaattcagacaacgcgcgtcaggctacgctgctggcaaaaaatgcgtcagaaacggccaacaaaggtggcactgtcgtcgataatgtcgtgaaaacgatgaatgagatctctgacagttcacaaaagatcgcccatattaccagcgtgattgatggcattgctttccaaaccaatattctggcgttgaatgcggcggtagaagcggcgcgagcgggtgagcaggggcggggctttgccgtggtggcgggtgaagtgcgcacgctggcacagcgcagtgcgcaggctgccaaagagatcaaatcgctgattgatgattcggttagtcgcgccaatactggttctttgcaggtgaaagacgcgggcgatacgatgaaagaaatcgtcagcgccgtgagccgagtaacggatattatgggcgaaattgcgtcggcatcggatgaacaaagccgggggatcgatcaggtcggacaggcggtcaatgaaatggaccgtgttacgcagcaaaacgcctcgctggttgaagagtcggcttctgccgcggcagcattggaagagcaggccagatttttgcagaatgcggttgaggtgttcaaaattaatcaggcggtagcgcaggaacaccgcgcggcgagcgcatcttctcttgctgcattaccgaaatcgcttttgcccaaacccacgtccgccggatcatcaaatgcgaattgggaaacgttttaa

SEQ ID NO: 99275 - protein, 556 aa, Erwinia carotovora subsp. atroseptica SCRI1043
MFKRIKVITILVILLFVLGISQFLTGALSVRALINDRDSFLVSQRSNQNVAAFTDAWIMMNQTRIAIGSIIQNMMLGNADKEAMQALLQQAKSQLVASESSYKHYLSLPNTPGLDDALSKKLETSYTAYDKLLNDIVDSLSGGLAGAAMKLSSEATPFNVAMQDAYITWRAAQNQLSDDGLQENHVAFETMLWLLGALSVVVVLVIILSWIGLQRILLHPLRTLMRHISAIAEGNLTHHIDTAGRNEMSQLAAGLHDMQQSLIRTVSLVRDSSNSIHSGASEISVGSNDLSSRTEQQAASLQETAASMEQLTSTVKQNSDNARQATLLAKNASETANKGGTVVDNVVKTMNEISDSSQKIAHITSVIDGIAFQTNILALNAAVEAARAGEQGRGFAVVAGEVRTLAQRSAQAAKEIKSLIDDSVSRANTGSLQVKDAGDTMKEIVSAVSRVTDIMGEIASASDEQSRGIDQVGQAVNEMDRVTQQNASLVEESASAAAALEEQARFLQNAVEVFKINQAVAQEHRAASASSLAALPKSLLPKPTSAGSSNANWETF

SEQ ID NO: 99276 - DNA, 1722 bp, Erwinia carotovora subsp. atroseptica SCRI1043
  CDS (1)..(1722): transl_table=11
atggatatgaaaataacttcaaggtctgagcagcacgccgaggttggcatgctgagcaatttacggctagttcccttattcatcattattctgggtggtatcatgctgttatttgcagcatctataggcacatccagctactttttacagagcagtaatcagtcattagatgacgtcacacaagaaatcgatacccggatggggatttcaaacagttccaaccaccttcgcaccgcacgtttattgttaatacaggcagcagcagctgcacgtattggcgactctcaggtcttcaatgacaacctgaagcaagctgagcaacgtctggatcaatcaaaaaaagctttccttgtctatgaagaacgtccagttaaaacacctcaggatatggcgttggacggcgatttacgcaaatcctatgatgcttatgttaatcaaggtcttatgctgatgcttactgcagctaagcaaggactgtttgaagaggtcattaccctcgaatctgaagaaacccgtattttagatttagcctataacaaatttttgctagaggcagtctcttaccgcacgcaaagagcgaaagaattaaacgaaacggcgcataaaaatgcgttactcggatattcgttaatgggaggcagctttgctctggccaccattttaacgcttctgacattcttccttctgagagggaccctcatcaaaccaattaatcagttggttatgagaattcagcgcattgcgcaaggagatctgactcaaatgtcggatcgttatggcaagaatgaaattggtacactcgccagcaatgttcagcaaatgcaatcttctctggttactaccgttactaccgttcgggaaagcgcggattctatttatcaaggttcaacggaaatctcatccggtaacacagacctttcttcacgaaccgaacagcaagccgcagcgcttgaacaaacagcggcaagcatggagcaattaaccgcaaccgtgaagcaaaactcagaaaatgcgcaccacgcaagccaactcgcggcgaatgcttcaggaaaagccaaacagggtggagaaatcgttgcaaacgttgtcaatacgatgaacagcatttcgggtagctcaaagaaaatatctgagattaccagcgtcattaacagtattgctttccaaactaatattctcgcgctcaatgccgcagttgaagcagccagagcgggagaacaaggtcgcggttttgccgttgtcgcgagcgaggttcgcagtctcgcacagcgtagtgcgcaggctgcaaaagagatcgaaacgctgatttccgaatcagtcaacctggtcaacagtggctctgttctggttgataacgctggtcaaacaatgcgagagattgtcgatgccgtcactaacgtcactgacatcatgggtgaaatagcctctgcttctgacgaacaaagccgaggcattactcaggtcggtcaggcaatatctgaaatggacagcgtgacacagcagaatgcttcgctcgttcaggaagccagtgccgctgcggcatcgctggaagagcaagcggcattgcttacccgtgcagttgcgacatttaaattatccagccatttatcaagtggtcattcagcacctgcccgaccgaacgcgctggctgccaagggccgttcatcactcgcccttccccgtcaggccaatacggaaaacggtaactgggaaacgttctaa

SEQ ID NO: 99277 - protein, 573 aa, Erwinia carotovora subsp. atroseptica SCRI1043
MDMKITSRSEQHAEVGMLSNLRLVPLFIIILGGIMLLFAASIGTSSYFLQSSNQSLDDVTQEIDTRMGISNSSNHLRTARLLLIQAAAAARIGDSQVFNDNLKQAEQRLDQSKKAFLVYEERPVKTPQDMALDGDLRKSYDAYVNQGLMLMLTAAKQGLFEEVITLESEETRILDLAYNKFLLEAVSYRTQRAKELNETAHKNALLGYSLMGGSFALATILTLLTFFLLRGTLIKPINQLVMRIQRIAQGDLTQMSDRYGKNEIGTLASNVQQMQSSLVTTVTTVRESADSIYQGSTEISSGNTDLSSRTEQQAAALEQTAASMEQLTATVKQNSENAHHASQLAANASGKAKQGGEIVANVVNTMNSISGSSKKISEITSVINSIAFQTNILALNAAVEAARAGEQGRGFAVVASEVRSLAQRSAQAAKEIETLISESVNLVNSGSVLVDNAGQTMREIVDAVTNVTDIMGEIASASDEQSRGITQVGQAISEMDSVTQQNASLVQEASAAAASLEEQAALLTRAVATFKLSSHLSSGHSAPARPNALAAKGRSSLALPRQANTENGNWETF

SEQ ID NO: 99278 - DNA, 1686 bp, Erwinia carotovora subsp. atroseptica SCRI1043
  CDS (1)..(1686): transl_table=11
atgtttaaccgtataaaagttgttaccggtttgatgcttgtactggtgttgtttggggcactccagcttatttctggtggtttattctttagtgcattaaaaaatgataaggatatcttcagctcaacgcaggttattaaccagaagcgttccgagttggactctgcatggtcatatttattacagacccgtaatacactcaaccgcgcgggtacgcgttttgcccttgatgtaagcgggacgggggcgggagttggtggtaaagagcttctcacctctgctgaaaagcagcttgcagtggcaaatgattatttcatccgctatgagaaaatgcctcaggatgcacggcaggatgacagtatttctcgtggcgtaaaagaaaactatgtcgctctgaatgcggcactgaccgaactcattcagtttttgaacgcaggggagtttaagaagtttattgagcaaccgacccagcgctttcaggataactttgaaaaagcgtattacgtctataaagcagaaaacgataaactttatcaggctggtatagctaaaaatgatgcagcgtatgactcggcgctttggattctaggttctatcattactttggtttttgccctagccttgttttcctggtttggtattcaacaattattaattagaccgctaaatagtattgttgaacatattcgccatattgcgaaaggcgatctgacaaaaacgactgattttcacagtagtaatgaaatgggaattctggctgacagcattcgccatatgcaaagtgagtttgtttcgacggtgagcgcggttcgacaaggtgctgatgctatttataccggcgctacagaaattagtgcagggaataacgatctttcctcacgtactgaacaacaggctgcctcgctagaagaaacggcggcaagcatggaacagctgacggcaacagttaaacagaatgcggaaaatgctcgtcaggccagccagttggcactgagtgcgtcagagacggcgcagaagggtggcaaggtcgtcgataatgtcgtcagaaccatgcacaatattgctggaagttcccaaaaaattgccgatattactagtgtaattgatggtattgctttccaaaccaacattcttgcgctgaatgcggcggttgaagctgccagggcaggagagcagggccgtggattcgcggttgttgcaggggaagttcgtaatttggcgcagcgtagtgctcaggctgcaaaagaaattaaaagtctgattgaagattctgtcagccgggtcgatgaaggttctgtcttggttgaaagtgctggtgagacgatgggagagatcgtcagtgccgtcactcgtgtaacggatattatgggcgaaattgcctctgcttctgatgagcaaagtaaaggtattgatcaggtcggtcaggctgtaactgagatggatcgggttacgcaacaaaatgcctccttggttgaagaatctgcggctgccgccgttgcattggaagaacaagtgaaagtgctgaatcaggccgtcgctgtattccgtttgtcggaagatacggggtcgttcagaagaacgacacaggcaaccgcgggtcagaaacctgtgttgttggccccatcggtgaatggcggtaagaaagcgaaagaaggttcatcaactgacaattgggaaaccttctga

SEQ ID NO: 99279 - protein, 561 aa, Erwinia carotovora subsp. atroseptica SCRI1043
MFNRIKVVTGLMLVLVLFGALQLISGGLFFSALKNDKDIFSSTQVINQKRSELDSAWSYLLQTRNTLNRAGTRFALDVSGTGAGVGGKELLTSAEKQLAVANDYFIRYEKMPQDARQDDSISRGVKENYVALNAALTELIQFLNAGEFKKFIEQPTQRFQDNFEKAYYVYKAENDKLYQAGIAKNDAAYDSALWILGSIITLVFALALFSWFGIQQLLIRPLNSIVEHIRHIAKGDLTKTTDFHSSNEMGILADSIRHMQSEFVSTVSAVRQGADAIYTGATEISAGNNDLSSRTEQQAASLEETAASMEQLTATVKQNAENARQASQLALSASETAQKGGKVVDNVVRTMHNIAGSSQKIADITSVIDGIAFQTNILALNAAVEAARAGEQGRGFAVVAGEVRNLAQRSAQAAKEIKSLIEDSVSRVDEGSVLVESAGETMGEIVSAVTRVTDIMGEIASASDEQSKGIDQVGQAVTEMDRVTQQNASLVEESAAAAVALEEQVKVLNQAVAVFRLSEDTGSFRRTTQATAGQKPVLLAPSVNGGKKAKEGSSTDNWETF

SEQ ID NO: 99280 - DNA, 1683 bp, Erwinia carotovora subsp. atroseptica SCRI1043
  CDS (1)..(1683): transl_table=11
gtgaactttttaaaaaatatcaccatcagggcaatgcttttaacaatattggggctgtttttagttgtatggggcggagcatctttctttacctccacctcattaagcagcatgaccaaactattggagtccggcgaaactcagcgtaaaaacgtagagatgctggtaaaaggcaatgaccagtattttcgtacggttactcgcttgttgcgttcgatggacttccagcaaacgggcgaaactgcggaagcagaaaaagtatttacgtcagcgacaacggcgtttaaaaacacgtcagatcaactggcggcgtttaaagccgctggacatgtcggcgtcgataaagaagcggcagacaatatgatcgcgtcgtggacccaattgctggataacgggttgacgccaatgttgaacgccgcgcgtgataatcgtcaggaggagtttcgtcagcttttccgcaaagcgtacccgccgctgagcgtcgcgtttggcagtagtatggataaatatcaggccgcaattatttcgtcgtcagagacgtcaatgaaagaggtctacgatctggttgactggagtaattatatcctgctggctgcggtgattattgggttgctcatcctgctgctgaccgatcgttatctggttaactatctggtcaagccgttgaatatgatcaaaggctatttccaagttctggctgccgggcagcttggtcacccgcttgatgaatttggccgtaactgtgctgggcaactgatcccttacctgaaagagatgcagggaagtctggttaatacggtttcaattattcgcgatagttctgcatcgattcatcagggctcaagcgagatcaaaagcggcaataacgatctgtccgcacgcaccgagcagcaggctgccgcactggaacagacggctgccagtatggaagaattgagtgcgacggtgaaacagaatgccgataacgttcatcaggcgacgaagttggcacaggacgcttctgtagcggcgaaaaaaggcggtgaggtcacggcagatgtaatggcgacgatggcgagtattacgacaagctcgaagaaaattgcagacatcaccagcgtgatcaacggtattgccttccagaccaatattctggcgctgaatgcggcagtagaagcagccagagccggtgaacaaggtcgcggctttgcggtcgttgcgggtgaagtccgtaatctggctcagcgtagtgctcaggcggcgaaagaaattgaaagcctgattgcggaatcagttcaacgcgtcaacatgggatcaaatcaggtcacacagactggcgaagcgatggattccatcatttctgcgattactcgtgtgaacgatctgatgggtgaaattgcatcggcgtcggatgaacagagtcgcggtattagccagattggtctggctgttaccgagatggatggcgttacgcaacagaactccgcgctggttcaggaatctgccgccgctgctgcatcgctggaagatcaggctcgtcagttgactgaagccgtatcggtgttccaactgtcggccgcagaggcacctcgtcgtcctcaacagcgtctggcggagaaagcgccagcagcgcagaagccgatgttactcgcggccgctggcggtaagaaaggcaacgccaacgacaactgggaaactttctga

SEQ ID NO: 99281 - protein, 560 aa, Erwinia carotovora subsp. atroseptica SCRI1043
MNFLKNITIRAMLLTILGLFLVVWGGASFFTSTSLSSMTKLLESGETQRKNVEMLVKGNDQYFRTVTRLLRSMDFQQTGETAEAEKVFTSATTAFKNTSDQLAAFKAAGHVGVDKEAADNMIASWTQLLDNGLTPMLNAARDNRQEEFRQLFRKAYPPLSVAFGSSMDKYQAAIISSSETSMKEVYDLVDWSNYILLAAVIIGLLILLLTDRYLVNYLVKPLNMIKGYFQVLAAGQLGHPLDEFGRNCAGQLIPYLKEMQGSLVNTVSIIRDSSASIHQGSSEIKSGNNDLSARTEQQAAALEQTAASMEELSATVKQNADNVHQATKLAQDASVAAKKGGEVTADVMATMASITTSSKKIADITSVINGIAFQTNILALNAAVEAARAGEQGRGFAVVAGEVRNLAQRSAQAAKEIESLIAESVQRVNMGSNQVTQTGEAMDSIISAITRVNDLMGEIASASDEQSRGISQIGLAVTEMDGVTQQNSALVQESAAAAASLEDQARQLTEAVSVFQLSAAEAPRRPQQRLAEKAPAAQKPMLLAAAGGKKGNANDNWETF

SEQ ID NO: 99282 - DNA, 1728 bp, Erwinia carotovora subsp. atroseptica SCRI1043
  CDS (1)..(1728): transl_table=11
gtgatggtgaaaatgagaatgcaatcgatgtctgttcaaaaagagaagttgagttacatcaacaatatacgtctcgtatcgttatttattactcttttttcaattatcctgattctctttgcgctttctattggcacagcgagctatttcttaaagcagagtaatgattcactggataaggcaaatgagctgtctgatattcgcgcgggtatcagcagtagtctcgatcagctgcgtgttgccaggctgctgctcattcaggctggtgcggcaaaccgtattagcgatcacgaagtatttaaagctgcttcagaccaggcctctggtcgggtcagagcctcacagaaacgccttgatgaatatctcgcgcgtcccgacagactggagagtgaaaaagccttggacgaggatatcctcaaggcttataccaactatcgcgataatgcgattgtcttgatgcagaaagccacaagtgatggtgaatttgaagatctggtgtcgttagaaagtacgctggcgcgcacgttagatgaagagtttagcgttcctgtacgtaaaaaagtgactgaactgacaaaagccgcgcaggatatcaatcagcgggcggaacagaacgcccaactgggatactggatgatggcgggctcgtttgccttatccgtcattatggcaatcatggcgtacatcatggtgcgcaatgtgatccttgcaccaatcaatagactggttgaacgtatccagaaaattgcagcaggtgacctgacattgccaccgatggcgatggggcgtaatgagataggcaccctgggtacgaatattcagaacatgcaggcggaactgacgaatacggttacgatcgtgcgcgaaggtgcggattcgatctatcaaggatcgtcagaaattacggcgggtaacgtcgatctctcttcacgtaccgagcagcaggcagccgctctggaagaaaccgcagcgagcatggaacagctgaccgcaacggtgaaacagaactctgacaatgctcatcatgccagccagttggcgaaaaatgcttctgaaaaagcagagagaggcgggcaaattgtgcaaggcgtggtggacacgatgcaggatatttccactagttcaaaacgcatttccgagatcacttccgttattaacagtatcgccttccagaccaatattctggcgctgaacgccgcagtagaggcggcgcgggcaggcgaacaagggcgtggttttgccgtcgttgcgggtgaagttcgcaatctggcgcagcgtagtgcgcaggcggcgaaggaaatcgaaacgctgattggcgaatctggtaggttggtgaataccggctctgggctggtggctcaggctgggacaaccatgggcgagattgtccgtgcggtcgtcagcgtgactgatatcatgggggaaattgcttccgcttctgacgaacagagtcgtggtattgggcaggtcagtcaggccgtgtctgaaatggatagcgcaacgcagcagaatgcagcgttagtgcaggaagcatcggcggctgctgtttcacttgaagagcaggctgcgcgtttgacgcaggctgtcgcggtattcaagctgtccggtatagtccagcaagtgaggtcatcattgccgaaatctgcgccgcaaccgcgtttagcgccagcgatggctattgccggaagcagcaaaggcaacagtaatcaaaattgggaaacgttctga

SEQ ID NO: 99283 - protein, 575 aa, Erwinia carotovora subsp. atroseptica SCRI1043
MMVKMRMQSMSVQKEKLSYINNIRLVSLFITLFSIILILFALSIGTASYFLKQSNDSLDKANELSDIRAGISSSLDQLRVARLLLIQAGAANRISDHEVFKAASDQASGRVRASQKRLDEYLARPDRLESEKALDEDILKAYTNYRDNAIVLMQKATSDGEFEDLVSLESTLARTLDEEFSVPVRKKVTELTKAAQDINQRAEQNAQLGYWMMAGSFALSVIMAIMAYIMVRNVILAPINRLVERIQKIAAGDLTLPPMAMGRNEIGTLGTNIQNMQAELTNTVTIVREGADSIYQGSSEITAGNVDLSSRTEQQAAALEETAASMEQLTATVKQNSDNAHHASQLAKNASEKAERGGQIVQGVVDTMQDISTSSKRISEITSVINSIAFQTNILALNAAVEAARAGEQGRGFAVVAGEVRNLAQRSAQAAKEIETLIGESGRLVNTGSGLVAQAGTTMGEIVRAVVSVTDIMGEIASASDEQSRGIGQVSQAVSEMDSATQQNAALVQEASAAAVSLEEQAARLTQAVAVFKLSGIVQQVRSSLPKSAPQPRLAPAMAIAGSSKGNSNQNWETF

SEQ ID NO: 99284 - DNA, 1611 bp, Yersinia pseudotuberculosis IP 32953
  CDS (1)..(1611): transl_table=11
atgtttggtcaaatccggatttctaccagttttttcctgctgctgatgtttctttgcgccatacagttaatttcaagtggtctatcatttacggcttttcgctcagactaccaaaatttaaatcgagtggagttaagtagtcagcaacgcgatgcattaagcctcagttgggtatctttgcttcaggcacgtaataccttaaaccgtgcggctactcgctcggcgctcaatgttcctcaggagcaagttaacgctttaatggggagtgcgcgcagtgcattgcagaaagctgaactttactttaatcagtttcaggcggtaccgcgccttgatgagagtgagagcagtggtcaattactggatgcgaccaaaaacagttatcaaaaccttcgtagcgcattacgtgagttaattgattttctggaagcgggtgatttacaagcatttatggatcaacccactcagaaaacgcaagatttgtttgaagcggatttcatccagtatttgcaatacgccaatgaggttattgccgatgccggtcagcagaatcagcaggcttatcagctctcaatctggatatttagtggtgcgattttgatggttatcacgatggccatttcgtcgttgatctggttgcgcaacatgtttgttcggccattagcgacgatgcgtgagcattttggccgcattgctcaaggggatttgtctgggcagatctcggtgactggccgtaatgaaatcagccagatgttcgccagcttatgcaccatgcagcagtcgctgatctcaacggtcagcaatgtgcgtgagggtaccgaatcgatgttgaccggtatccaggaaatttccgcaggtaacaacgatttatcggcaagaactgaacagcaagcggcttccttggaacaaactgccgcgagtatggaacaactgaccgccacggtaaaacagaatgcggacaatgcgcatcaggccacggtactggcgcaagaggcttccggtacggcagctaaaggcggagaactgacggcgagtgtcgtcaccaccatgcatgcaatcgctaccagttcgcagaagattggtgcgatcaccagcgttatcgacggtattgccttccaaaccaatattttggcactgaatgcggccgtggaggcggcccgtgcgggtgagcaagggcgtggttttgcggtggttgcgggtgaagtccgtaatttagcacaacgcagtgcgcaagcagccaaagagatcaaagggctgattgatgagtccgtcagccgtgtccgccaggggtctacgctggtcgaaagtgcaggaactaccatggaagagattgtccgctcggtggcgcgtgtgactgacattatgggggagatcgaatctgcttcggatgaacagagccggggtattgaacaaatatcactcgccgtaacgcaaatggatcaggttactcagcaaaatgcgtcattagtggaagaggccgcggcggcagccaatgcactggaagagcaggccagcctgctctccgatgccgtctctgttttccgtttggggcaggggcacgacgaacagtcagttgcgggcaatagccagcaatcattggccacgcattattag

SEQ ID NO: 99285 - protein, 536 aa, Yersinia pseudotuberculosis IP 32953
MFGQIRISTSFFLLLMFLCAIQLISSGLSFTAFRSDYQNLNRVELSSQQRDALSLSWVSLLQARNTLNRAATRSALNVPQEQVNALMGSARSALQKAELYFNQFQAVPRLDESESSGQLLDATKNSYQNLRSALRELIDFLEAGDLQAFMDQPTQKTQDLFEADFIQYLQYANEVIADAGQQNQQAYQLSIWIFSGAILMVITMAISSLIWLRNMFVRPLATMREHFGRIAQGDLSGQISVTGRNEISQMFASLCTMQQSLISTVSNVREGTESMLTGIQEISAGNNDLSARTEQQAASLEQTAASMEQLTATVKQNADNAHQATVLAQEASGTAAKGGELTASVVTTMHAIATSSQKIGAITSVIDGIAFQTNILALNAAVEAARAGEQGRGFAVVAGEVRNLAQRSAQAAKEIKGLIDESVSRVRQGSTLVESAGTTMEEIVRSVARVTDIMGEIESASDEQSRGIEQISLAVTQMDQVTQQNASLVEEAAAAANALEEQASLLSDAVSVFRLGQGHDEQSVAGNSQQSLATHY

SEQ ID NO: 99286 - DNA, 1674 bp, Yersinia pseudotuberculosis IP 32953
  CDS (1)..(1674): transl_table=11
atgttcaagcgtatgaaagtggttaccagcctgctgctggtattagtattatttggtgccttacaactggtatccggcgggctttttttcaaatcattgcagaatgaccaggaaaacttcaacgttttacaagttattcgccagcaacaatcggtattgaatgaaagctgggtctatctgttacaaacacgcaatacgttaaaccgtgccggtgttcgttacatgatggatattaaccatactggcagtggccctacggtgaaggaccttatctcttcggctaaagggacgctaagcgtcgcggaagaccgcttcaaacgttacgaaaaaatcccacaaaatagcagtcaggatccagaaggcgccaaaaaattaaaacagtcctacgaggaatattttagtgccttaaccgaactgattaatttgatggaaacgaacaaaatcaatgagttcttcaatcaccccaccaccagtttccaaaatgaatttgagcaaaattacaacaactatctgacgcaaaatgatggactgtatgattcggcggtcgaggacagtaatcaatcctttagctttgctatgggcgtggttattactgtactggtcgtcgtattagtgatgatgctccttgtctggctggggatgcaacagatcttaattcaccccctcaaccacctgattgcacacattaaacatattgccaacggtgatttgacgcaaaatattgaagttcatggtcgcaacgaagtgggcacgttggctgctagcctgaaacacatgcaatctgaattggtcactatcgtcggcgaggtgcgtgtaggcgctgatgctatctacagcggtgcgtcagaaattgcggcgggtaacaatgatttatccgcccgtactgaacagcaagcggcatcattggaagaaacggctgccagcatggagcaattaaccgcaacggtgaaacagaacgctgaaaacgcccgtcaggcgagtcaattagcattgagtgcctcagaaaccgctcagaaaggggggaaagtggtggcggatgttgtgcaaaccatgcacgagatcgcggggagttcgcagaagattgccgacattaccagcgtcatcgacggtatcgccttccagaccaatatcttggcattgaatgccgccgttgaagccgcccgtgcaggtgagcaaggccgtggttttgccgtggttgccggtgaagtgcgcaatttagcacaacgcagtgcacaggcggcgaaggaaattaaaggtctgattgacgattcggttaaccgggtagatctgggctcagtactggttgaaagtgccggtgaaaccatgggcgatatcgttaatgccgtgacccgcgtgaccgacatcatgggcgaaatcgcttctgcctcagatgaacaaagtcgtggtattgaccagattggtcaggcagttgccgaaatggaccgcgtgacacagcaaaatgcttccttggtagaagaatcggcttccgccgccgcttcactggaagagcaagccagcatgttaactcaagcgatgtccgtatttgttctgagtgtggataacagtaattccactagtgacgtcagaaaagtcaaacaacccacgcaggaaatgaacagcacggctaaaaaagcgctgggaaataatctgcaagacaattgggaaactttctag

SEQ ID NO: 99287 - protein, 557 aa, Yersinia pseudotuberculosis IP 32953
MFKRMKVVTSLLLVLVLFGALQLVSGGLFFKSLQNDQENFNVLQVIRQQQSVLNESWVYLLQTRNTLNRAGVRYMMDINHTGSGPTVKDLISSAKGTLSVAEDRFKRYEKIPQNSSQDPEGAKKLKQSYEEYFSALTELINLMETNKINEFFNHPTTSFQNEFEQNYNNYLTQNDGLYDSAVEDSNQSFSFAMGVVITVLVVVLVMMLLVWLGMQQILIHPLNHLIAHIKHIANGDLTQNIEVHGRNEVGTLAASLKHMQSELVTIVGEVRVGADAIYSGASEIAAGNNDLSARTEQQAASLEETAASMEQLTATVKQNAENARQASQLALSASETAQKGGKVVADVVQTMHEIAGSSQKIADITSVIDGIAFQTNILALNAAVEAARAGEQGRGFAVVAGEVRNLAQRSAQAAKEIKGLIDDSVNRVDLGSVLVESAGETMGDIVNAVTRVTDIMGEIASASDEQSRGIDQIGQAVAEMDRVTQQNASLVEESASAAASLEEQASMLTQAMSVFVLSVDNSNSTSDVRKVKQPTQEMNSTAKKALGNNLQDNWETF

SEQ ID NO: 99288 - DNA, 1740 bp, Yersinia pseudotuberculosis IP 32953
  CDS (1)..(1740): transl_table=11
atgaaacgtggaagtgcgcacaagccattggatatgaaaatagcaccagagccgaataaagataccaaagtgtcctttatcaataatatgcgtctggtcactttgtttatcgtcatattggcgggaatattgcttttatttgccgccgctattgggacatcgggctactttttaaaacaaagtaaccaatctttggcgcaagcgacgcaagagatcgacatccgtcagggtctgtctaacagctctaatcatctacgaaccgcccgtcttattctgatccaggccgcctcctccgcacgtattggtgatgctacaggctatcagcaaggcctaaaaaatgcagaaggccgcatagctcagtcacagcaaatgttcgacctctattataaccggccaacaaaatctgaaacggacatggcgctggatgtaccactgaaaaaagcctacgaacaatatcgtgacgatgggatgaaacccatgttagcggcaacgaaagagggccactttgaagaggttatctctcttgatgctgagaaaatcagtctgctagacgacggctataacgaaccactgctgaaagccgttaaatatcgtacagagcaagcgaaccagattaaccagtccgctcaccaagaagcgcgccttggttacattctcatggcgggggcttttgtcttggttatcttattgacaatgattgctttcttagtcatcagtaaggtaatcatcaatccaattaattggttggtcacccgtattcagcggattgcccagggggatttgacgcaatctcccgtctcatttggccgtaatgaaattggcgtactgggaagtaatatccagcaaatgcaggatgcattagccatcacagttgaagcggtgcgcagcagtgctgaatctatctatcaaggatccagcgaaatcgccttggggaatactgacctttcagcacgcacagagcagcaagccgcttcacttgaacaaactgcggccagcatggagcaactgaccgcaaccgtgaaacagaatgctgaaaacgcccatcacgcgagccaactggccgcgaatgcatcgggtaaagcagctcaaggtggtgatattgtcagtgatgttgtcagcaccatggataaaatatctctcagctccatgaaaattgctgaaataacgaatgttattaatagcattgcgttccaaactaatattttggcactgaacgcggcggtagaagccgcgcgcgcgggcgaacaagggcgcggttttgctgtagtggccagtgaagtacgccacctggcgcagcgcagcgcagatgccgcaaaagaaattgagtcgctgattgaagcctcagttgatttaattggtgacggttcaattctggtttcaaatgcgggtaaaacaatgaacgagattgtcacagcagtcactcacgtcactgatatcatgggtgaaattgcatcagcttccgacgagcaaagccgcggcatcagccaggttgcgcaagccgtatctgaaatggataacgttactcagcagaacgcctctttagtgcaggaagcctccgcagcggcagcctctctggagcaacaagctgaaatattgactcaagcggtcgcggtcttccagcttgcgggtcactcgtctatcaaggaatttaaaagccctgtctcccctcctacaggccaaaatggttctggcatcaataagaagccaacggatggttcactgaattgggaaactttctaa

SEQ ID NO: 99289 - protein, 579 aa, Yersinia pseudotuberculosis IP 32953
MKRGSAHKPLDMKIAPEPNKDTKVSFINNMRLVTLFIVILAGILLLFAAAIGTSGYFLKQSNQSLAQATQEIDIRQGLSNSSNHLRTARLILIQAASSARIGDATGYQQGLKNAEGRIAQSQQMFDLYYNRPTKSETDMALDVPLKKAYEQYRDDGMKPMLAATKEGHFEEVISLDAEKISLLDDGYNEPLLKAVKYRTEQANQINQSAHQEARLGYILMAGAFVLVILLTMIAFLVISKVIINPINWLVTRIQRIAQGDLTQSPVSFGRNEIGVLGSNIQQMQDALAITVEAVRSSAESIYQGSSEIALGNTDLSARTEQQAASLEQTAASMEQLTATVKQNAENAHHASQLAANASGKAAQGGDIVSDVVSTMDKISLSSMKIAEITNVINSIAFQTNILALNAAVEAARAGEQGRGFAVVASEVRHLAQRSADAAKEIESLIEASVDLIGDGSILVSNAGKTMNEIVTAVTHVTDIMGEIASASDEQSRGISQVAQAVSEMDNVTQQNASLVQEASAAAASLEQQAEILTQAVAVFQLAGHSSIKEFKSPVSPPTGQNGSGINKKPTDGSLNWETF

SEQ ID NO: 99290 - DNA, 2022 bp, Burkholderia pseudomallei K96243
  CDS (1)..(2022): transl_table=11
atgctgcacaactggtcgatccgcacgacgctgacggccgtcggattcatgctggtgctcgtcgccgcgctggtcggcgggctcgggctgtatgcgctcaatcacgcgagccgctcgctcgacgcgatcgcgcacggcgatctgccgacgatccacacgctcgacgacgcgtcgtcctatctgctgcgctcgcgcgtcgcgctcgaccgcttcaagacgctgtccgaggcgggcaacgccgacgaggcgaagaaagtgctcgcgcgcgcgcaggagctctacgcgaagtcgacgcagaactggcaggcgtacatggccgcgtcgaaggagggcatcgattcggcgctgaccgacgagctcgccgcgcgctacgcgacgctcgcgaaggaaggcgtcgagccggagttcgccgccgcgggcgcgggcgacctcgccgcgtatcacgcgatcgccgacacgaagatcagcccgatgttcgtcgcgtacgacaaggcggccgccgcggtgatcgccgcgtattcgaagcgcgcggaatcgcgcttcgacgcgacgcaggcgcgcatctcgctgatgatcgcgctgatcgcggcgggcatcgccgccgcgttcctgatggtgatcggcattcgcttcgcgctgcgcgggctcatcgtgcagccgctgaacgtcgcgatcgcgcagttcgagcggatcgcggcgggcgacctcacgcaggcgacgcgcatcgccggcaacaacgaaatcggccggcttttccagggcatcggccggatgcagacggccgtcggcgacatggtgaaggccgtgcatcgcggcgcggaagcggtcgacctcggcgcgcgcgagatttcgagcggcaacgcggacctgtccgcgcgcaccgaatcgcaggcggcctcgctgcaggaaaccgcatcgagcatggagcaactgacgggcacggtgcgccagaacgcggaaaacgcgcggcaggcgagccagctcgcggtcaacgcgtccgacatcgcgacgcagggcggcgaggtcgtcggccaggtcgtcacgacgatgcaggacatcgcgacgagctcgtcgaaggtcgccgacatcatcggcacgatcgaggggatcgcgttccagaccaacatcctcgcgctgaacgcggccgtcgaggcggcgcgcgcgggcgaacagggccgcggcttcgcggtggtcgcgggcgaggtgcgctcgctcgcgcagagaagcgcgacggccgcgaaggaaatcaagcagttgatcggcgactccgcgcacaaggtgcaaagcggctccgcgctcgtcgagcgcgcgggcgcgacgatggccgagatcgtccaggcggtgcggcgcgtgaccgacatcatgggcgagatcagcgcggcgtccgaagagcagtcgacgggcatcgtccaggtgaaccgcgcggtcagccagatggacgccgtcacgcagcagaacgcggcactcgtcgagcaagcggcggccgcggccgcgtcgctcgaggatcagacgcggcagatgaagcagatcgtctcggcatggcgcatcgaaggcgcaagcgcggcggcgacgccggccgcgtcgacgtcggcggccgcgagcgtgcgttcgaacgtgaacgcccgcgcgagcgcgtcgagcgagccgcatgcggtcgctcatgccgtcgcatccgcgacgcatgccgcggacgcgacggccggcggagccggatcgccgcgttcgcccgccgccgcgcacgcttcgcacggcgagcagcgcgggacgcacgccgcgccgcatggcgcgaagcccgccgccgcgccgaagcccgccgccgcgccggccgcggccggctatgcaccgaagctcgcgaagccgggcgccgccgcgcgccccgcggcgagcccggccgacgccgccgcgccgcaagccgcccccgctcccgcgtcctccttcgcactcaagcgcccggcgctgtcgggcgagccgaagcccgcggccgcgtcggcatcctccgacgacgactgggaaaccttctaa

SEQ ID NO: 99291 - protein, 673 aa, Burkholderia pseudomallei K96243
MLHNWSIRTTLTAVGFMLVLVAALVGGLGLYALNHASRSLDAIAHGDLPTIHTLDDASSYLLRSRVALDRFKTLSEAGNADEAKKVLARAQELYAKSTQNWQAYMAASKEGIDSALTDELAARYATLAKEGVEPEFAAAGAGDLAAYHAIADTKISPMFVAYDKAAAAVIAAYSKRAESRFDATQARISLMIALIAAGIAAAFLMVIGIRFALRGLIVQPLNVAIAQFERIAAGDLTQATRIAGNNEIGRLFQGIGRMQTAVGDMVKAVHRGAEAVDLGAREISSGNADLSARTESQAASLQETASSMEQLTGTVRQNAENARQASQLAVNASDIATQGGEVVGQVVTTMQDIATSSSKVADIIGTIEGIAFQTNILALNAAVEAARAGEQGRGFAVVAGEVRSLAQRSATAAKEIKQLIGDSAHKVQSGSALVERAGATMAEIVQAVRRVTDIMGEISAASEEQSTGIVQVNRAVSQMDAVTQQNAALVEQAAAAAASLEDQTRQMKQIVSAWRIEGASAAATPAASTSAAASVRSNVNARASASSEPHAVAHAVASATHAADATAGGAGSPRSPAAAHASHGEQRGTHAAPHGAKPAAAPKPAAAPAAAGYAPKLAKPGAAARPAASPADAAAPQAAPAPASSFALKRPALSGEPKPAAASASSDDDWETF

SEQ ID NO: 99292 - DNA, 1614 bp, Burkholderia pseudomallei K96243
  CDS (1)..(1614): transl_table=11
atgttcagcaaaatcaagctcgcatccggcctgctcggcgtgctcgtcacattctgtctatttctgatcgcggtcgaggggctcggcttctggtcgctgtccgcgtcgcgcagcaacgtcgacgctctgtccaacgtcgcgatcaagcagaccgacgcgacgaccgtcgcgacccagcacatgctcgacgcccgcaccaacctgtcgcgcgccagcacgcggatggtgaagggcgacccgatgcccaccgagacgctccagcacgtacgcgaccagctcgcgctcgccgatcgcgcattcgccgcgttcacggccgcgccgacgatcagcgccgagaacaccgagcgcgcggcggcgctcaccgatcgctatcgtaagtatcacgcggcgctcgtcgatctcgtgcagttcctcgaatccaacaacatgcaggcgtttctcgatcagccgacgcagcagatccaggacgcgtacctcggcgagctgcgcaccttctccgaattcagcgggcgcacgagcgagcacgcgctcggcatgatcgacaccgggatgcattggttcgagacggtcggcgcggtgctgctcgtgctgatgctcgcctgcatcgccgggatctacgccgtcgcgcggcgcgcggtggtcgcgccgctcgcgcaggcgctcgtgcatttcgagcggatcgcgcagggccgcctcgacgagacggtggcgccgcacggcgtgtacgaaatcgagcggctgctgcgcgggctcgccgacatgcaggcgagcgtcgcgggcaccgtgcgcgtcgtgcgcaacgcatcgaacgcgatccatctgggcgcggccgagatcgcgagcggcaacgcggacttgtccgcgcgcacgtcgagccaggccgcctcgctcgagcaaacggcggcgagcatggaggaactgaccgccaccgtgcggcagaacagcgacagcgcgcgcgcggcgagcgcgctcgccgacgatgcgctgcgcacgacgcagaacggcggcgcgatcgtcgacgacgtgatcgacaagatgcacggcatcgcgcgcagctcgggccgcatcgcggagatcatcgcggtgatcgacggcatcgcgttccagaccaacatcctcgcgctgaacgcggccgtcgaggcggcgcgcgcgggcgaggagggccgcggcttcgcggtggtcgcgggcgaggtgcgcgcgctcgcgcagcgcagcgcgcagtcggcgaaggagatcaagctgctgatcgaggagtcggtcgcgcagatcgacggcggctcggagctcgtcgagcgcgcgggcgaggcgatgcgctcggtgtccgcgtcgatcgagcgcgtcgcgcagacgatgaccgagatcacggccgcgtcggtcgagcagagcgcggggatcgagcaggtcaaccaggcggtcacgcagatggagcagttgacgcagcagaacgcggcgctcgtcgaggaagtcgcggcggcggccggctcgctcaacgagcagaccgagcagttgcagcagtcggtctcggtgttcgagctcggcgatgcgcgcgcgcgccggcttgccggcggcgcggcgctggccggcgctcgcgcgccgcagctcgcgggcgcgtaa

SEQ ID NO: 99293 - protein, 537 aa, Burkholderia pseudomallei K96243
MFSKIKLASGLLGVLVTFCLFLIAVEGLGFWSLSASRSNVDALSNVAIKQTDATTVATQHMLDARTNLSRASTRMVKGDPMPTETLQHVRDQLALADRAFAAFTAAPTISAENTERAAALTDRYRKYHAALVDLVQFLESNNMQAFLDQPTQQIQDAYLGELRTFSEFSGRTSEHALGMIDTGMHWFETVGAVLLVLMLACIAGIYAVARRAVVAPLAQALVHFERIAQGRLDETVAPHGVYEIERLLRGLADMQASVAGTVRVVRNASNAIHLGAAEIASGNADLSARTSSQAASLEQTAASMEELTATVRQNSDSARAASALADDALRTTQNGGAIVDDVIDKMHGIARSSGRIAEIIAVIDGIAFQTNILALNAAVEAARAGEEGRGFAVVAGEVRALAQRSAQSAKEIKLLIEESVAQIDGGSELVERAGEAMRSVSASIERVAQTMTEITAASVEQSAGIEQVNQAVTQMEQLTQQNAALVEEVAAAAGSLNEQTEQLQQSVSVFELGDARARRLAGGAALAGARAPQLAGA

SEQ ID NO: 99294 - DNA, 1656 bp, Pseudomonas syringae pv. phaseolicola 1448A
  CDS (1)..(1656): transl_table=11
atgaaatggttttacgatctgaagatttccaccaagctgattacctcgtttctggtggttctggcgttgaccgcggccatgggagtctttgccattatccaactgggccaggtcaaccaggccgcccaggacatcaaggaaaactggatgccgtccatgcgcgcggcgtcgggcatgcgcttttacgcagccaacttccggctgaaggaaaaccgccacattgccgccgactctgcccaggaaaaggcgcagatggagcttgaggcagcagaagcgcgcaaacagtttgaaacgcggctggccacttacgacaagttaatcgtcagcgatcaggaccggcagatgttcagtgccgtgagtgcctcatggtccgcctacctgaaagtcagcgacaatctgttcgctctctcccggcagggccaggaggccgaagcgcgtgccttgctgcgcggcgagtccaaactgcacttcgacgaagtcaccaaccagttgcaaaaaatggtcgagctcaacgacgccggcgcgactgccgctggcgacaaaggcaccagcctgtacgaaagcgcgcgcatctcgatcattgccgtgctggttgcagccctgctagtcggcctgggtctggcgctgttcattgcacggatcatttcccgcccactgaaagaggcagcgactgccgccgagcaactggccgagggcaacctgaacgcccacatcgggcacggttccaaggatgaaaccggcatggtgctgaacgccatgcgcaacatggtcggcaagctgtcacacattatcggcgaagtgcgtaacgccgccgacaacctggccagcgcttcggaagaagtcagcgccaccgcgcagtcaatgagccaggctaccagcgaacaggcggccagcgtcgaagagaccagcgcgtcggtcgagcagatgagcgccagcatcaaccagaacaccgagaacgccaaagtcaccgatggcatggccagcaaggctgccaaggaagcgactgacggcggcgaatcggtgcagcagaccgtcgtggcgatgaagaaaatcgcccaacgcatcagcatcatcgacgacatcgcttaccagaccaatctgcttgccctcaacgcggccatcgaagcagcccgtgcgggcgagcatggcaaaggcttcgcggtagtggccgccgaggtgcgcaagctggctgaacgcagccaggtcgcggctcaggagattggcgagctgtcgtccagcagtgtggaaatggccgaaaaggctggcaagctgctggacgaaatggtgccgtcgatcaacaagacgtcagaccttgtgcaggaaatcagcgcggcgtcagaggaacaggctgccggtgtggcgcagatcaacaccgccatgacccagctcaatcaggtcactcagcaaaacgcatcaagcagcgaagaactggccgccaccgctgaagagatgagcagtcaggccgaacagctgcaacaggccatgagcttcttcaccctcgatgcatcgccaagggccgtcgcacaaggcagccctgtcgacggccgcagcaacccgaaccgccagcccccgcgcccaccgcaacaggctccgcgcaaggcgtttgcgcaaagcatggcgggcgccccggacgaatcggaattcactcgtttttga

SEQ ID NO: 99295 - protein, 551 aa, Pseudomonas syringae pv. phaseolicola 1448A
MKWFYDLKISTKLITSFLVVLALTAAMGVFAIIQLGQVNQAAQDIKENWMPSMRAASGMRFYAANFRLKENRHIAADSAQEKAQMELEAAEARKQFETRLATYDKLIVSDQDRQMFSAVSASWSAYLKVSDNLFALSRQGQEAEARALLRGESKLHFDEVTNQLQKMVELNDAGATAAGDKGTSLYESARISIIAVLVAALLVGLGLALFIARIISRPLKEAATAAEQLAEGNLNAHIGHGSKDETGMVLNAMRNMVGKLSHIIGEVRNAADNLASASEEVSATAQSMSQATSEQAASVEETSASVEQMSASINQNTENAKVTDGMASKAAKEATDGGESVQQTVVAMKKIAQRISIIDDIAYQTNLLALNAAIEAARAGEHGKGFAVVAAEVRKLAERSQVAAQEIGELSSSSVEMAEKAGKLLDEMVPSINKTSDLVQEISAASEEQAAGVAQINTAMTQLNQVTQQNASSSEELAATAEEMSSQAEQLQQAMSFFTLDASPRAVAQGSPVDGRSNPNRQPPRPPQQAPRKAFAQSMAGAPDESEFTRF

SEQ ID NO: 99296 - DNA, 1713 bp, Ralstonia eutropha JMP134
  CDS (1)..(1713): transl_table=11
atgtcatttgagaacaatatccagatcaagaccctgttaaggggcgccatggccacgctgtcgttgctgctcatcctgatggggggcgcggggctgcacggaatctctcagagcaatgacgcattgaaggaaacgtattcgaaccagcttgcctcgacgatggcgctgagcgacgccatgctggccacggtccgcatgcgcctggcgctcgaccgcaacgttatgcagggcgaactggacgatcccagggtcaacgtcgaccgctccagggtcttcgtcgaagcctcggattcggcctggaagcgctatgcgagcctgccgcagaacgaccaggagaaggcgctcgccgatgaactcgcacgcaagcgcgccgacttcatgacgcatggcatcgagccgttgcagaaggcttcactggccggaaaccaggaagaggcggttaggctggccagcaaggtcttgcccgaactgcagcgtgccatgtcttcagcgcatgaggcgctgcagaaattccagctgaccgccggccaggacaacttcgacgcggcgcaggctcgtttcgagcggatccgcattctgtcgatcgtgctgatcgtcgccgggcttgccatcgcggcgctgtgcacggtgacgctgaaccgcgccatcgtgcgcccggtccaggaagcgctgacggtgatggagcggatcgcgcgcggcgacctgacctcgcgcatcagcacggtgtcccgcaacgaagtcggacgcatgatgcaggcgctggcggccatgcaggacagccttcaaaagatcgtgtcggaggtccgtgtcggcgccgactccatggcgtcggcgaccgaacagatctccagcggcaacctggacctgtcccaacgcacggaagagcaggcttcctcgctcgaggaaactgcggccagcatggaagaactgacgaccgtggtgcgccagaacgcagacaatgcccgccaggccggcatactggctggcgaggcttcgcagatcgccgtcaagggtggagacgtggtcggccgcgtggtcgacaccatgaacgagatcaacgacgcgtcgcgcaaggtggtcgagatcatcagcgtgatcgaaggcatcgcgttccagacgaatatcctcgcgctcaatgccgcggtcgaagcggcccgcgcgggcgagcaagggcggggctttgcggtggtcgcgggcgaagtgcgcagcctggcgcagcgctcggcgaccgcggccaaggaaatcgaggcgctgatcagtgaatccggccagcgcgtggaaagcgggacgcgcctggtggcggaggcgggccagaccatgggcgagatcgtgcaggctgtgcgccgggtcacggacatcatgaacgagattggtgctgcctcgcaggagcagaccagcggtatcgaacaggtgaaccaggccgtcacccagatggaccaggtcacgcagcagaatgccgcgctggtcgaagaggcggccgcggccgccggttcgctggaagaacaggctcgcaagctcaagagcgtggtttcggtattcaatgtaggcggcggagccggtacagttgcgcaggtcgccgtacgcacgccacaggccaagccggtcaggccgcgcgcggcggcaacgctggcccgctcgtccgtcacggtacgtcctgtccgcgcggttgcggcggtacagcgtggcgcggacgacgactggagcgctttctag

SEQ ID NO: 99297 - protein, 570 aa, Ralstonia eutropha JMP134
MSFENNIQIKTLLRGAMATLSLLLILMGGAGLHGISQSNDALKETYSNQLASTMALSDAMLATVRMRLALDRNVMQGELDDPRVNVDRSRVFVEASDSAWKRYASLPQNDQEKALADELARKRADFMTHGIEPLQKASLAGNQEEAVRLASKVLPELQRAMSSAHEALQKFQLTAGQDNFDAAQARFERIRILSIVLIVAGLAIAALCTVTLNRAIVRPVQEALTVMERIARGDLTSRISTVSRNEVGRMMQALAAMQDSLQKIVSEVRVGADSMASATEQISSGNLDLSQRTEEQASSLEETAASMEELTTVVRQNADNARQAGILAGEASQIAVKGGDVVGRVVDTMNEINDASRKVVEIISVIEGIAFQTNILALNAAVEAARAGEQGRGFAVVAGEVRSLAQRSATAAKEIEALISESGQRVESGTRLVAEAGQTMGEIVQAVRRVTDIMNEIGAASQEQTSGIEQVNQAVTQMDQVTQQNAALVEEAAAAAGSLEEQARKLKSVVSVFNVGGGAGTVAQVAVRTPQAKPVRPRAAATLARSSVTVRPVRAVAAVQRGADDDWSAF

SEQ ID NO: 99298 - DNA, 1680 bp, Thiobacillus denitrificans ATCC 25259
  CDS (1)..(1680): transl_table=11
ttgaagatcggcgctcggctcgggctgggttttgcgagtgtcctgctgctgttggtcgtggtggcggtgattggcgtctggcgcctgcagacggtcggaatgatgaccgactcgctggtcaagaatgaaatgcacaaggcgcgcatcatcaatgagtgggaaagcatcatcaatgccaatgcggtaagagccctcgcggcggccaagaccaataatccggaaaccgaaaaatttttcgtggacgcgagtgccgcggccagcaagggcggcatcgcattgcagaaacagctcgagtcgctgctcacggacgcggaatccagggccctgttcgcggccatcgcggacaagcgtagcgcttacctcgcggcgcgcgacgccgcgctcaaggaaaaagcggccgggaatgttctgggcgcaaagaagttcgtcgatgaagacatgaagcccaggctggatgcgtatctggagagcctgcacgaccttgcgcgctatcagaagcaggctatcgatgcgaccgcagggaatatccatcggcagtatgaaagcggccggatgctgttgatcggtttgagcatcgtggcgctcatgatgggaatcggcttcgcgttctggatcacgcgctcgatcacgcgcccgatgaaccaggcggtgaaggttgcgcagacggtggccgccggcgacctgacgagccgcatcgaggtggaaggcaaggatgaaacgggccgattgctgcaggcgctgaaggacatgaatgacagtctggtgaagattgtcggccaggtacgcctcggcaccgacgccatcgccaccgcctcgagcgagattgcgacggggaacctggatctgtcgagccggacggaagaacaggcaagttctctggaagagaccgcttcctcgatggaacagctcacctcgacggtgaagcagaacgcggaccatgcgcgccaggcgaatcagatggcggtctcggccagcgaagtggcggtcaagggcggagcggtcgtcgcgcaagtggtcgacaccatgggctcgatcaacgagtcttcaaggaaaatcgtcgacatcatcgccgtgatcgacggcatcgcgtttcagaccaacattctggcgctcaatgcggcggtggaagcggcgcgagcgggcgaacaggggcggggcttcgcggtggttgccagcgaggtacgcagcctcgcgcagcgcagtgcgggtgcggccaaggaaatcaaaaccctgataggcgattcggtggagaaggccgacataggcagcaaactggtcggtcaggcgggcgccaccatggacgagatcgtggccagcgtgaagcgcgtgaccgacatcatgggcgagatcacggcggccagccaggaacagagcgccggcatcgaacaggtcaaccaggccatcgcccagatggacgaagtgacgcagcagaatgccgccctggtggaggaggcggcagcggcggcgtcttccatgcaggaccaggcggccaatctggctgaggcggtgagcgtgttcaggctcgccggcgtcaacacgcagcgcccggaacagctgacatcgaacgagcggatcgcggcgctgccggcccggacccatacggccgcggcacccgtggtgcgcacgaagaagctcgcggctatccagggttcaagcggcggcgagtgggaagagttctga

SEQ ID NO: 99299 - protein, 559 aa, Thiobacillus denitrificans ATCC 25259
MKIGARLGLGFASVLLLLVVVAVIGVWRLQTVGMMTDSLVKNEMHKARIINEWESIINANAVRALAAAKTNNPETEKFFVDASAAASKGGIALQKQLESLLTDAESRALFAAIADKRSAYLAARDAALKEKAAGNVLGAKKFVDEDMKPRLDAYLESLHDLARYQKQAIDATAGNIHRQYESGRMLLIGLSIVALMMGIGFAFWITRSITRPMNQAVKVAQTVAAGDLTSRIEVEGKDETGRLLQALKDMNDSLVKIVGQVRLGTDAIATASSEIATGNLDLSSRTEEQASSLEETASSMEQLTSTVKQNADHARQANQMAVSASEVAVKGGAVVAQVVDTMGSINESSRKIVDIIAVIDGIAFQTNILALNAAVEAARAGEQGRGFAVVASEVRSLAQRSAGAAKEIKTLIGDSVEKADIGSKLVGQAGATMDEIVASVKRVTDIMGEITAASQEQSAGIEQVNQAIAQMDEVTQQNAALVEEAAAAASSMQDQAANLAEAVSVFRLAGVNTQRPEQLTSNERIAALPARTHTAAAPVVRTKKLAAIQGSSGGEWEEF

SEQ ID NO: 99300 - DNA, 1968 bp, Burkholderia sp. 383
  CDS (1)..(1968): transl_table=11
atgttgcataactggtcgatccgcacgacgctcacggcggtcggactcatcctcgtggcgctggccgcagctgtcggcgggctcggcctgtacgcgctgaatcacgcgagccgctcgctcgacgagatcgcgcacgtcgacctgccggcgatccacacgctcgacgacacgtcgtcgtacctgctgcgcgcgcgcgtgtcgctcgaccgcttccggtcgctgacggaaggcggcaacacggccgaagcggccaaggtgctcgaccgcgcgcaggagctgtacgcgaagtcgaaccagaactggcaggcgttccagtcgacgccgaagctcggcgtcgagcaggcgctcgtcgacgaactgaccacccgctacacgacgatcgtgaaggaaggcgtcgagcccgaattcgcggccgcacgcgcgggcgacatggccgcgtaccacgcggtcgccgataccaagatcagcccgatgttcgtcgcgtacgaccaggccgcgtcggccgtgatcgcatcgctgcagaagcgtgcggaagatcgccaggccgcgacgcaatcgcagatctcgctgatgatcgggctgatcgcggccggcatcgcgatcgcgttcgtcgtcgtgatcgcgatccgcttcgcgctgcgcgggctgatcgtgcagccgctcgaggacgcgatcgcgcacttcgagcgcatcgccggcggcgacctcacgcagccggtcaacgtgttcagcacgaacgagatcggccgcctgttcggcggcatcaagcggatgcaggacgccgtcacgacgatggtgcaggccgtgcatcgcggcaccgaatcgatcgacgtcggcgcgcgcgagatctcgaccggcaacaccgacctgtcgcagcgtaccgaggagcaggccgcatcgctgcaggaaaccgcgtcgagcatggagcagttgacgggcaccgtgcggcagaacgcggagaacgcgcggcaggccagccagctcgcggtgaacgcatcggacatcgcgacgcagggtggcgacgtggtcggccaggtcgtgtcgacgatgcaggacatcgcggcgagctcgggcaaggtcgtcgacatcatcggcacgatcgaaggcatcgcgttccagaccaacatcctcgcgctgaacgcggcggtcgaagccgcccgcgcgggtgaacagggccgcggcttcgcggtggtcgcgggcgaagtgcgctcgctcgcacagcgcagcgcgagcgccgcgaaggaaatcaagacgctgatcggcgattcggccgagaaggtcgaaagcgggtcggcgctcgtgtcgcgcgccggctcgacgatggacgagatcgtgcaggccgtgcgccgcgtgaccgacatcatgggcgagatcagcgccgcgtcggacgagcagtcgaccggcatcgagcaggtcaaccgcgcggtcggccagatggattcggtcacgcagcagaacgcggcgctcgtcgagcaggcggcggccgcggctgcgtcgctcgaagagcagacgcgccagatgaagacgatcgtgtcgggctggcgcgtgatgggcggcatcacgctcgcgccgtcgcgcggtgtggcgcggccggtcgcgcacgcgcccgcgccggcgctgacgtcggagccgcgtgtcgatgcggcaccggtcgccgcgctgccggccccgcaggccgccgcacaaccggcacggcgcgccgcgccggcgccgcgtgccgccgctgcggctgcgacgggtgcgggccacgaaccgaagcgtgcggccgatacgggcgcacacgcgcagaaggatgcaccggcttcccgcggcacggctgcgggcggctacggtccgcgtctctcgaagaccgccgcaccggccgacaagccggccgcgaagcccgcgctcgtgcgcccggcgctgaacggcgagaagccggcggcggccacggccggcacgtccgacgatgattgggagaccttctaa

SEQ ID NO: 99301 - protein, 655 aa, Burkholderia sp. 383
MLHNWSIRTTLTAVGLILVALAAAVGGLGLYALNHASRSLDEIAHVDLPAIHTLDDTSSYLLRARVSLDRFRSLTEGGNTAEAAKVLDRAQELYAKSNQNWQAFQSTPKLGVEQALVDELTTRYTTIVKEGVEPEFAAARAGDMAAYHAVADTKISPMFVAYDQAASAVIASLQKRAEDRQAATQSQISLMIGLIAAGIAIAFVVVIAIRFALRGLIVQPLEDAIAHFERIAGGDLTQPVNVFSTNEIGRLFGGIKRMQDAVTTMVQAVHRGTESIDVGAREISTGNTDLSQRTEEQAASLQETASSMEQLTGTVRQNAENARQASQLAVNASDIATQGGDVVGQVVSTMQDIAASSGKVVDIIGTIEGIAFQTNILALNAAVEAARAGEQGRGFAVVAGEVRSLAQRSASAAKEIKTLIGDSAEKVESGSALVSRAGSTMDEIVQAVRRVTDIMGEISAASDEQSTGIEQVNRAVGQMDSVTQQNAALVEQAAAAAASLEEQTRQMKTIVSGWRVMGGITLAPSRGVARPVAHAPAPALTSEPRVDAAPVAALPAPQAAAQPARRAAPAPRAAAAAATGAGHEPKRAADTGAHAQKDAPASRGTAAGGYGPRLSKTAAPADKPAAKPALVRPALNGEKPAAATAGTSDDDWETF

SEQ ID NO: 99302 - DNA, 1620 bp, Burkholderia sp. 383
  CDS (1)..(1620): transl_table=11
atgttcggaaaaatcaagctcgcgtcgggtctgctcggcgtgttgaccgtgttttgcctcttcctgttcgcgatcgaggcgctcggcttctgggcgctcaagtcgacgcgcagcggcgtcgacgatctgtcgaacatcgcgatcgcacaggtcgacgcggccagccaggcgacccagcaactgctcgacgcgcgcatcaacctgtcgcgcgccggcacgcggatggtgcgcggcggcccgaagccggaagacatcatccgccatgccggcgcgtcgctcgcggaggcggacaaggcgttcgccgccctgacggccgcgcagccggtcgacgataccaaccgcgcacgcgtcacggcgctcgccgagcgctatcgcgcgctgcgcggcgcgctgggcgaactcgtgcagttcctcgacgccgacaacatccaggccttcctcgaccagccgacgcagagcatccaggacgcgtatatcgccgaactgcgccgcttcaccgactatggcggcgcatcgagccgcacggcgctcgacacgatcgacggcggcatgctctggttcaagtcggtcggcatcgtgctgctggtggcgatgcttgcggcgagcgcggcgatctacgcggccgcgcggcgcgcggtcgtcgcgccgctggaagaagccggccgccatttcgagcggatcgcgcagggccggctcgatgaagtcgtgcgggcaggcggcgtgttcgagatcgaccggatgctgcgcggcctcgccacgatgcagacgagcatcgcgggcaccgtgcgcacggtgcgccacgcgtccgatgcgatccacctcggcgcgggcgagatcgcgggcggcaacgccgacctgtcggcgcgcaccggcacgcaggccgcgtcgctggaggaaacggccgcgagcatggaggaactgacggcgaccgtccggcagaacaccgacagcgcgcgcgcggcgagcgcgctggccgacgcggcgctcgaggcgacgagccacggcggcggcgtggtcgacagcgtgatcgaccggatgcgcggcatcgcgcagagctcggggcggatcgcggagatcatctcggtgatcgacggcatcgcgttccagaccaacatccttgcgctgaacgcggcggtggaagccgcacgcgcgggcgaacaggggcgcggcttcgcggtcgtcgccggcgaagtgcgctcgctcgcgcagcgcagcgcgcaatcggcgaaggagatcaaggcgctgatcgaggattcggtcgcacagatcaacggcggcgcggagcttgtcgagcgcgccggcgaggcgatgcggacggtgtcgtcgtcgatcacgcgcgtcgtgcagacgatgtccgagatcaccgcggcgtcggtcgagcagagcgtcgggatcgagcaggtgaaccaggctgtcacgcagatggatcagctcacgcagcagaacgcggcactggtggaggaggtcgcggcggcggccgcgtcgctgaacgaccagaccgcgcacctgatgcaggcggtgtcggtgttcgagctgggcgatggccgcgccgcacgcggcgagcgcgcagcgccgtcgttcgccgacgcgggttacgcgccggcgggcagcgccgcgtaa

SEQ ID NO: 99303 - protein, 539 aa, Burkholderia sp. 383
MFGKIKLASGLLGVLTVFCLFLFAIEALGFWALKSTRSGVDDLSNIAIAQVDAASQATQQLLDARINLSRAGTRMVRGGPKPEDIIRHAGASLAEADKAFAALTAAQPVDDTNRARVTALAERYRALRGALGELVQFLDADNIQAFLDQPTQSIQDAYIAELRRFTDYGGASSRTALDTIDGGMLWFKSVGIVLLVAMLAASAAIYAAARRAVVAPLEEAGRHFERIAQGRLDEVVRAGGVFEIDRMLRGLATMQTSIAGTVRTVRHASDAIHLGAGEIAGGNADLSARTGTQAASLEETAASMEELTATVRQNTDSARAASALADAALEATSHGGGVVDSVIDRMRGIAQSSGRIAEIISVIDGIAFQTNILALNAAVEAARAGEQGRGFAVVAGEVRSLAQRSAQSAKEIKALIEDSVAQINGGAELVERAGEAMRTVSSSITRVVQTMSEITAASVEQSVGIEQVNQAVTQMDQLTQQNAALVEEVAAAAASLNDQTAHLMQAVSVFELGDGRAARGERAAPSFADAGYAPAGSAA

SEQ ID NO: 99304 - DNA, 1560 bp, Burkholderia sp. 383
  CDS (1)..(1560): transl_table=11
atgaacctgaacgccctgttttcccgtttctcgatccgtacgcggatcttctccacgctcggcctcgttgccgtgctgctcgtcgtgtcggggctgatcggcctcgccggcatgcagagttcgaaccgcgcgctcgacgaggcttatacgcagcaactggctgcgaagaccgcgttgtccgcggccagcctgaacctgacgatcgtgcgcacgacgctcgaccgcgcgatgctgcatccggaagcgccggaagtgcccgatctcgtcaagaaggccgagaactatctcgcgaaggccgacaccgcgtggcgcggctatgcgtcgatgccgcacgacggcgacgaaggcccgctcgcgagccgcctcgacgccgcacgccaggcactgatcgggcaggcgctgaagccgatgatcgacgcggtccgcgacggccgccgcgacgaggccgaccggctgctgatgtcggtggcgccgccgctgtcggtcgcgctcacgcaggcgaccgatgcgctcgacgcgtaccaggtcgcacgcggcaaggacgtgtacgacaccgcgcagacctattacggctggatgcgcgcgggcgcgatcgccggtatcgcgttcggcctggccgcgtgcctcggctgcgcgattggtctgcattacgcgatcacgcagccggtgaatcgcctgctgtcgcattttcgccgcctgtcggacggcgacctgacgtcggaagtgcgctggtcgtcgcgcgacgagatggccgaactggtcaagggcgtgaccggcatgcagcgcagcctcgcggacaccgtgcgtcaggtcagccagggttccgaagcgatctcgacggcgacccaccagatcgcggccggcaacaccgacctgtcgcagcgcaccgaggaacaggcgtccgcgctgcaggagacggccgcgagcatggagcagctcaccgcgaccgtgaagcagaacgcggacaatgcggtggaggcgcaggcctgcgcggataccgcgagcgagatcgccacgcgcggcgcgacggtcgtcggcgaggtgatcggcacgatgaacgagatcgaccagagctcgcagaaggtcgccgacatcatcggcacgatcgaaggcatcgcgttccagaccaacatcctcgcgctgaatgcggcagtcgaagccgcgcgcgcgggcgagcagggccgcggcttcgcggtggtcgcgggcgaggtgcgcacgcttgcgcaacgctcggcttccgcggcgaaggaaatccgcacgctgatcggcgaatcggtcgagcgcgtcgcgatcggctcgcggctcgtcggcacggccggcgcgacgatgcaggacatccagcaggcgatcggacgcgtcacgggcatcatgaccgagatcgcggccgcgtcgagcgagcagcgcgacgggatcgaacaggtgaaccgcgctgtgtcgcagatggaccaggtgtcgcagcagaacgcggcgctcgtcgagcaggccgcggcggcggccgcgtcgctggaagagcaggccgacgggctgcgccgcgcggtcggcgcgttccgcgtagcctga

SEQ ID NO: 99305 - protein, 519 aa, Burkholderia sp. 383
MNLNALFSRFSIRTRIFSTLGLVAVLLVVSGLIGLAGMQSSNRALDEAYTQQLAAKTALSAASLNLTIVRTTLDRAMLHPEAPEVPDLVKKAENYLAKADTAWRGYASMPHDGDEGPLASRLDAARQALIGQALKPMIDAVRDGRRDEADRLLMSVAPPLSVALTQATDALDAYQVARGKDVYDTAQTYYGWMRAGAIAGIAFGLAACLGCAIGLHYAITQPVNRLLSHFRRLSDGDLTSEVRWSSRDEMAELVKGVTGMQRSLADTVRQVSQGSEAISTATHQIAAGNTDLSQRTEEQASALQETAASMEQLTATVKQNADNAVEAQACADTASEIATRGATVVGEVIGTMNEIDQSSQKVADIIGTIEGIAFQTNILALNAAVEAARAGEQGRGFAVVAGEVRTLAQRSASAAKEIRTLIGESVERVAIGSRLVGTAGATMQDIQQAIGRVTGIMTEIAAASSEQRDGIEQVNRAVSQMDQVSQQNAALVEQAAAAAASLEEQADGLRRAVGAFRVA

SEQ ID NO: 99306 - DNA, 1557 bp, Burkholderia thailandensis E264
  CDS (1)..(1557): transl_table=11
atgaatgcttttttctcccgcttttcgattcgcacccggattttctcgacgctcggactcgtcgccgcgctgttgacgatcacgggcgtgatcggcttcttcagcatgcagaactcgaacgccgcgctcgacgacgcgtacacgcggcaactcgcggcgaagacggcgctggcgtcggcgagcctgaatctcgcgatcacgcgcacgacgctcgaccgcgtgatcctgcatccggaggtgcccgacgccgcgaacaccatcgcgaaggcggagcagtatctggccgcatcggaccgcggctggcgcgactacgacgcgctgccgcgcggcgacgacgaaaagacgctcgccgagcaggcgaacgccgcgcgccgcgcgctcgccgaagaggcgctcaagccgatgatcgaagcgctgaaggccggccggcacgacgaagccgatcgcctgatgatgacggtcgcgccgccgctgtccgttgcgtggacgaaggcgacggccgcgctcgacgatgcgcgcgccgcgtatggcaaggccgcgtacgacgccgcggagcagatgtacggatggctgcggctcgtgctcggcgggctgatcgtgttcggcctcgccgcgtgcctcggctgcgcgatcggcctgcacttcgcgatcacccagccgctcgtgcgcatcctcgggcacctgcgccgcctggcggaaggcgatctgacgggcgaactgcgctggacgtcgcacgacgagatggccgagctcgtcgcgggcctcacgacgatgcagcgcagcctgtcggaaaccgtgcgcaaggtgacggacggctccgaatcgatcgcgaccgcgacccgccagatcgcggccggcaacaccgatctgtcgcagcgcacggaggagcaggcggccgcgctgcagcagacggcggcgagcatggagcaattgaccgcgacggtgaagcagaacgcggacaacgcgcgcgaagcgcagaactgcgccgatagcgcgaccgacatcgcgacgaagggcgcgaccgtcgtcggcgaggtggtgggcacgatggccgagatcgaccagagctcgcagaaggtggccgacatcatcggcacgatcgaagggatcgcgttccagaccaacattctcgcgctgaacgcggccgtcgaggcggcgcgcgcgggcgagcagggccgcggcttcgcggtcgtcgcgggcgaggtgcgcacgctcgcgcagcgctccgcgtcggcggccaaggagatcaaggcgctgatcggcgaatcggtcgagcgggtcgcgacgggctcgcggctcgtcggctcggcgggcgacacgatgcaggagatccagcgcgcgatcgctcgcgtgacgggcatcatgaccgagatatcggccgcgtcgaacgagcagcgcgacggcatcgagcaggtcaaccgcgccgtgtcgcaaatggatcaggtgtcgcagcagaacgcggcgctcgtcgagcaggcggcggcggccgccgcgtcgctcgaggagcaggcggacgggctgcgccgcacggtcggcgcgttccgcgtcgtcgcctga

SEQ ID NO: 99307 - protein, 518 aa, Burkholderia thailandensis E264
MNAFFSRFSIRTRIFSTLGLVAALLTITGVIGFFSMQNSNAALDDAYTRQLAAKTALASASLNLAITRTTLDRVILHPEVPDAANTIAKAEQYLAASDRGWRDYDALPRGDDEKTLAEQANAARRALAEEALKPMIEALKAGRHDEADRLMMTVAPPLSVAWTKATAALDDARAAYGKAAYDAAEQMYGWLRLVLGGLIVFGLAACLGCAIGLHFAITQPLVRILGHLRRLAEGDLTGELRWTSHDEMAELVAGLTTMQRSLSETVRKVTDGSESIATATRQIAAGNTDLSQRTEEQAAALQQTAASMEQLTATVKQNADNAREAQNCADSATDIATKGATVVGEVVGTMAEIDQSSQKVADIIGTIEGIAFQTNILALNAAVEAARAGEQGRGFAVVAGEVRTLAQRSASAAKEIKALIGESVERVATGSRLVGSAGDTMQEIQRAIARVTGIMTEISAASNEQRDGIEQVNRAVSQMDQVSQQNAALVEQAAAAAASLEEQADGLRRTVGAFRVVA

SEQ ID NO: 99308 - DNA, 1614 bp, Burkholderia thailandensis E264
  CDS (1)..(1614): transl_table=11
atgttcagcaaaatcaagctcgcatccggcctgctcggcgtgctcgtcgtgttctgcctgtttctgatcgcggtcgaggggctcggcttctggtcgctgtccgcgtcgcgcagcaacgtcgacgatctgtccaacgtcgcgatcaagcaggccgacgcggcgaccgtcgcgacccagcacatgctcgacgcccgcaccaatctgtcccgcgccagcacgcggatggtgaagggcgatccgatgcccgccgagacgctccagcacgtgcgcgaccagctcgcgctcgccgaccgcgcgttcgccgccttcacggccgcgccgacgatcagcgccgagaacaccgagcgcgcggcggcgctcaccgaccgctaccgcaagtaccacgccgcgctcgtcgatctcgtgcagttcctcgaatccaacaacatgcaggcgtttctcgatcagccgacgcagcagatccaggacgcgtatctcggcgaactgcgcacgttctccgaattcagcagccgcacgagcgagcacgcgctcggcatgatcgacaccgggatgcactggttcgagacggtcggcgcggtgctgctcgcgctgatgctcgcgtgcatcgcggggatctacgccgtcgcgcggcgtgcggtggtcgcgccgctcgcgcaggcgggcgtgcatttcgaccggatcgcgcaaggccgcctcgacgagacggtggcgccgcacggcgtgcatgaaatcgagcggctgctgcgcgggctcgccgacatgcaggcgagcgtcgcgggcaccgtgcgcgtcgtgcgcaacgcgtcgaacgcgatccacctgggcgcggccgagatcgcgagcggcaacgcggacctgtccgcgcgcacgtcgagccaggccgcatcgctcgagcaaacggcggcgagcatggaggagctgaccgcgaccgtgcggcagaacagcgatagcgcgcgcgcggcgagctcgcttgccgacgacgcgctgcgaacgacgaagaacggcgcagcgatcgtcgacgacgtggtcgacaagatgcacggcatcgcgcgcagctcgggccgcatcgcggagatcatcgcggtgatcgacggcatcgcgttccagaccaacatcctcgcgctgaacgcggccgtcgaggcggcgcgcgcgggcgaggaggggcgtggcttcgcggtggtcgcgggcgaggtgcgcgcgctcgcgcagcgcagcgcgcagtcggccaaggagatcaagctgctgatcgaggaatcggtcgcgcagatcgacggcggctccgagctcgtcgagcgcgcgggcgaggcgatgcgctcggtgtccgcgtcgatcgagcgggtcgcgcagacgatgaccgagatcacggccgcgtcggtcgagcagagcgcgggaatcgagcaggtcaaccaggcggtcacgcagatggagcagttgacgcagcagaacgcggcgctcgtcgaggaagtcgcggcggcggccggttcgctcaacgagcagaccgagcagttgcagcagtcggtctcggtgttcgagctcggcgatgcgcgcgaacgccggcccgccgccggcgcggcgcgtgccggcgcggccgcgccgcaacgcgcgggcgcgtag

SEQ ID NO: 99309 - protein, 537 aa, Burkholderia thailandensis E264
MFSKIKLASGLLGVLVVFCLFLIAVEGLGFWSLSASRSNVDDLSNVAIKQADAATVATQHMLDARTNLSRASTRMVKGDPMPAETLQHVRDQLALADRAFAAFTAAPTISAENTERAAALTDRYRKYHAALVDLVQFLESNNMQAFLDQPTQQIQDAYLGELRTFSEFSSRTSEHALGMIDTGMHWFETVGAVLLALMLACIAGIYAVARRAVVAPLAQAGVHFDRIAQGRLDETVAPHGVHEIERLLRGLADMQASVAGTVRVVRNASNAIHLGAAEIASGNADLSARTSSQAASLEQTAASMEELTATVRQNSDSARAASSLADDALRTTKNGAAIVDDVVDKMHGIARSSGRIAEIIAVIDGIAFQTNILALNAAVEAARAGEEGRGFAVVAGEVRALAQRSAQSAKEIKLLIEESVAQIDGGSELVERAGEAMRSVSASIERVAQTMTEITAASVEQSAGIEQVNQAVTQMEQLTQQNAALVEEVAAAAGSLNEQTEQLQQSVSVFELGDARERRPAAGAARAGAAAPQRAGA

SEQ ID NO: 99310 - DNA, 1851 bp, Burkholderia thailandensis E264
  CDS (1)..(1851): transl_table=11
atgctgctgaagaacctctcgatcaggacacgcctcgccgtcacgatgacgctcctttccgttctgctgtgcgtcgtcggcgcactgggcctcttcggcatgagccgggccaacgatgcgaacgagcaaacgtcgtcgaaccagttgccgagcacgatcgacgtcgcgagcgccgagctgttcgccgcgcgcgagcgcctcgtgctcgaccgcgcggcgcttctcgcgggcacgccggacgccgcgccgacgatcgagcgcgcgcgccacatgcgcggggtctccgattcgtggtggaaaaagtacctcgacttgccgcgcaacgggcaggaggatcgcctcgcgcaggacgtcgcggcgaaacggcaggtcctgcagcgcgagctcgacggattcgtcgagctcatcaacgcgaacgatcgcgacaggatcatcgaatccgcgaagcggatgcagaacgtgttcaacgatttcgcgctcgcgagcgaggcgctgcgcgcgtttcagctcaagcaggcgagcgtcaatttcagcgatgcgcaaagcgtatatggggcgagccgaatcgccagcatcgcggcgctcgtgcttggcctcgcgatctcgctctattgcttcctgagcctgcgcgcggcgatcgcgcggccgctcgccgacgcgctcggccacttcgacgcgatcgccgcgggcgaattgcgccggccgatcgtcgtcgcgcggcgcgacgagatggggctgctgctcgaagggctcgcgaagatgcaggcgagccttgcggacaccgtgcgctcggtgcgcgtcggcagcgaatcgatcgcgacggcggccaggcagatcgcggcgggcaacatcgacctgtcctcgcgcaccgaacagcaggcggcggcgctcgaggagacggcctcgagcatggaggaactgacgggcacggtgcagcgcaacgcggacaacgcgcgccaggcgagcgcgctggccgcgagcgcatcggagatcgcgaacaagggcaatgccgtggtcggccaggtggtcggcacgatgggcgacatcaaccagagctccgcgaagatcgccgacatcatcacgatcatcgagggaatcgcgttccagaccaacattctcgcgctgaacgcggccgtcgaggcggcgcgcgcgggcgaggaagggcgcggcttcgcggtcgtcgcgggcgaggtgcgcagcctcgcgcagcgttcgtcgacggccgccaaggagatcaaggaactgatcgatacgtcggtcgagcgcgtgcgcacgggctcgtcgctcgtcgacgacgcggggcgcacgatgagcgaggtgatcggcgcggtgcaacgcgtgaccgacatcatgggcgagatcgcggcggcgtctgacgaacagagcaccggcatcgaccaggtatcgcgcgccgtgtcgcagatggacgaagtcacgcagcagaacgcggcgctcgtcgaggaggccgcggcggccgcgcaatcgctcgacgagcaggccgcgcggctgcgcgagaccgtttcggtattccgcgtcgatgacggtgacgcgcgcgaggtcgcgccgcgtgcgccagcgcggcctgcggccggcgtcgcgcaccgggcggggcgcgacgccgcgccgacgcaggccgctgcgccttgcggcgcggcggccgccgtcgcaaagggcaaggcgcctgcgaggcccgcgcgttgcgaatcggccgtgaaggctgaatcggccgcatctgcgccggcgcccgccgccgccccggcagccaagcccaagccggcgcctgcggcgccgcgcgcggtgccggctgctgcggcgtccgccgcaagcgacgacgattgggagaccttctga

SEQ ID NO: 99311 - protein, 616 aa, Burkholderia thailandensis E264
MLLKNLSIRTRLAVTMTLLSVLLCVVGALGLFGMSRANDANEQTSSNQLPSTIDVASAELFAARERLVLDRAALLAGTPDAAPTIERARHMRGVSDSWWKKYLDLPRNGQEDRLAQDVAAKRQVLQRELDGFVELINANDRDRIIESAKRMQNVFNDFALASEALRAFQLKQASVNFSDAQSVYGASRIASIAALVLGLAISLYCFLSLRAAIARPLADALGHFDAIAAGELRRPIVVARRDEMGLLLEGLAKMQASLADTVRSVRVGSESIATAARQIAAGNIDLSSRTEQQAAALEETASSMEELTGTVQRNADNARQASALAASASEIANKGNAVVGQVVGTMGDINQSSAKIADIITIIEGIAFQTNILALNAAVEAARAGEEGRGFAVVAGEVRSLAQRSSTAAKEIKELIDTSVERVRTGSSLVDDAGRTMSEVIGAVQRVTDIMGEIAAASDEQSTGIDQVSRAVSQMDEVTQQNAALVEEAAAAAQSLDEQAARLRETVSVFRVDDGDAREVAPRAPARPAAGVAHRAGRDAAPTQAAAPCGAAAAVAKGKAPARPARCESAVKAESAASAPAPAAAPAAKPKPAPAAPRAVPAAAASAASDDDWETF

SEQ ID NO: 99312 - DNA, 2001 bp, Burkholderia thailandensis E264
  CDS (1)..(2001): transl_table=11
atgctgcacaactggtcgatccgcacgacgctgacggccgtcggattcatgctggtgctcgtcgccgcgctggtcggcgggctcgggctgtatgcgctcaatcacgcgagccgctcgctcgacgcgatcgcgcacggcgatctgccgacgatccacacgctcgacgacgcgtcgtcgtacctgctgcgctcgcgcgtcgcgctcgaccgcttcaagacgctgtccgaggccggcaacgccgacgaggcgaagaaggtgctcgcgcgcgcgcaggagctttacgcgaagtcgacgcagaactggcaggcgtatgtcgccgcgtcgaaggagggcatcgagccggcgctgaccgacgagctcgccgcgcgctacacgacgctcgcgaaggaaggcgtcgagccggaattcgccgccgcgggcgcgggcgacctcgccgcgtatcacgcgatcgccgacacgaaaatcagcccgatgttcgttgcgtacgacaaggcggcggccgctgtgatcgccgcgtattcgaggcgcgcggaatcgcgcttcgacgcgacgcaggcgcgcatctcactgatgatcgcgctgatcgcggcgggcatcgccgccgcgttcctgatggtgatcggcatccgcttcgcgctgcgcgggctcatcgtgcagccgctgaacatcgcgatcgcgcagttcgagcggatcgcggcgggcgacctcacgcaggcgacgcaagtcgccggcaacaacgagatcggccggctgttccagggcatcggccggatgcaggcggccgtcgccgacatggtgaaggccgtgcatcgcggggcggaagcggtcgacgtcggcgcgcgcgagatctcgagcggcaacgcggacttgtccgcacgcaccgaatcgcaggcggcctcactgcaggaaaccgcgtcgagcatggagcaactgacgggcaccgtgcgccagaacgcggagaacgcgcggcaggcgagccagctcgcggtgaacgcgtccgacatcgcgacgcagggcggcgatgtcgtcggccaggtcgtcacgacgatgcaggacatcgcgacgagctcgacgaaggtggccgacatcatcggcacgatcgaaggaatcgcgttccagaccaacatcctcgcgctgaacgcggccgtcgaggcggcgcgcgcgggcgagcaggggcgcggcttcgcggtcgtcgcgggcgaggtgcgctcgcttgcacagcgcagcgcgacggccgccaaggagatcaagcagttgatcggcgactccgcgcacaaggtgcaaagcggctccgcgctcgtcgagcgcgcgggcgcgacgatggcggagatcgtccaggcggtgcgccgcgtgaccgacatcatgggcgagatcagcgcggcgtccgaagagcagtcgacgggcatcgtccaggtgaatcgcgcggtcagccagatggacgccgtcacccagcagaacgcggcgctcgtcgaggaagccgcggccgcggccgcgtcgctcgaggatcagacgcggcagatgaagcagatcgtgtcggcgtggcgcgtcgaaggcgggattgcgccggcggcttcgagcgtgcgctcgaacgtgaccggccgcgcgagcgagccgcacgccgccgcatccgcgtccgcgtccgcatccgcgtcgcacgcctcgagcgcgaccgcaacggccggcgcgtccgggtcgtcgcgggcgtcggcggccgccgcacacggtgagcgtgcgtcgcacgccgccgcgccgcatgccgcgaagactaccgtcgccgcgccgaaatccgccgcatcgccggcgtcgcccgcctatgcgccgaagctcgcgaagcccggcgccgccgcgcgcgccgcaacgggcgcggcggcgagcacggccgccgtcgcgccgcaagccgcccccgcgtcctccttcgcgctcaagcgcccggcgctgtcgggcgagccgaagcccgcggccgcgtcggcatcctccgacgacgactgggaaaccttctaa

SEQ ID NO: 99313 - protein, 666 aa, Burkholderia thailandensis E264
MLHNWSIRTTLTAVGFMLVLVAALVGGLGLYALNHASRSLDAIAHGDLPTIHTLDDASSYLLRSRVALDRFKTLSEAGNADEAKKVLARAQELYAKSTQNWQAYVAASKEGIEPALTDELAARYTTLAKEGVEPEFAAAGAGDLAAYHAIADTKISPMFVAYDKAAAAVIAAYSRRAESRFDATQARISLMIALIAAGIAAAFLMVIGIRFALRGLIVQPLNIAIAQFERIAAGDLTQATQVAGNNEIGRLFQGIGRMQAAVADMVKAVHRGAEAVDVGAREISSGNADLSARTESQAASLQETASSMEQLTGTVRQNAENARQASQLAVNASDIATQGGDVVGQVVTTMQDIATSSTKVADIIGTIEGIAFQTNILALNAAVEAARAGEQGRGFAVVAGEVRSLAQRSATAAKEIKQLIGDSAHKVQSGSALVERAGATMAEIVQAVRRVTDIMGEISAASEEQSTGIVQVNRAVSQMDAVTQQNAALVEEAAAAAASLEDQTRQMKQIVSAWRVEGGIAPAASSVRSNVTGRASEPHAAASASASASASHASSATATAGASGSSRASAAAAHGERASHAAAPHAAKTTVAAPKSAASPASPAYAPKLAKPGAAARAATGAAASTAAVAPQAAPASSFALKRPALSGEPKPAAASASSDDDWETF

SEQ ID NO: 99314 - DNA, 1683 bp, Methylobacillus flagellatus KT
  CDS (1)..(1683): transl_table=11
atgatgaagctactgaatccattgatgaattacatgtatagcctgcagatcaccaagcgcctgatgataggttttggatcgttgctgcttctgctcgcggtgatcgtcattcttagcctggtgctgatgacatccatgagtcaccgtacggatgagattgtcacgcaatccgcgagcaggcaggcgctgctgaatgattggaagctgcataccaatatgaatattaccaatgccgtggcatatatcaggaatcgcagtcagagccaagaagcctacttccttgacagggtgaaccaatactcacaagaaaccgacaagcttcaggcccaggttgtggaatccatgcagggagatgaataccagcctttgttgcagaaggtcaacaaggcacgggaagcgttcgaccaagcacgtagcgaggccttcaaggtgcgggtagggttaaacgtgcgtgccgctgcgctggaaaactggctgactaatgaacaagtgagcctggaagaaaagcgcaatgtcagtaataagctcatctcggacgagaaggcatattacgaaactgtggacagcagcttccaggctgcccgtgatatctaccagaatgcaatggatgagcttttgcagtatgagcgtgacaagacgttggcgctggccgcagccaataaaagtgccagtgtccaggggcgtattctggtggttggtctgggggtgctggcccttgtgctcggtgtggtatttgccagagtgatcacggtgtcgatcatcgagcccatcaactatggtatccgcgtgatcggacgtgtttccaagggcgacctggcgccgcgccagaatgatttgctcgatatgatcgacgagaatgcttctgatgagcctggcaagctgctggtcggcattcgtttcatgatccaggagctacgcaggctggtgactgaggtacgcggcagtacggataccatgctggtcgcgaccagcgaaatttcctctggcaatgcagacctttcctcccgcacggaaagccaggcatccagcttggagcagaccgctagttccatggaagagctgacttcgaccgtacggcagaatgccgacaatgcaagacaggcgaaccagctggtgattacggcgtcggagtctgcggtacggggcggacatgtggtcgaccaggtggtcagcaccatgggatcgatcaaggagagttcacgaaagatcgtggatatcatcggcgtgattgacggcattgcctttcagaccaatatcctggcattgaatgcagccgttgaggcagcacgtgctggcgagcagggacgtgggtttgcggtcgtggcgagcgaagtgcgcaatttggcgcagcgctctgctgctgcagcgaaagaaatcaagggcctgatcggcgactccgttgagaaggttgacatcggcaacaagctggtggaccaagccggtaccacgatgagcgaaatcgtgagctcagtgcagcgcgtggccgacatcatgggtgaaattacttctgccagtcaggaacaaagcgctggtatcgagcaggtgaacatcgcgatcgggcaaatggatgaaatgacccagcagaatgcggctttggttgaacaggcagcggcagcggcagaaagtctcgaggagcaggcgcagaaactgtcctctacggtcggcgtgtttaaaataaattaa

SEQ ID NO: 99315 - protein, 560 aa, Methylobacillus flagellatus KT
MMKLLNPLMNYMYSLQITKRLMIGFGSLLLLLAVIVILSLVLMTSMSHRTDEIVTQSASRQALLNDWKLHTNMNITNAVAYIRNRSQSQEAYFLDRVNQYSQETDKLQAQVVESMQGDEYQPLLQKVNKAREAFDQARSEAFKVRVGLNVRAAALENWLTNEQVSLEEKRNVSNKLISDEKAYYETVDSSFQAARDIYQNAMDELLQYERDKTLALAAANKSASVQGRILVVGLGVLALVLGVVFARVITVSIIEPINYGIRVIGRVSKGDLAPRQNDLLDMIDENASDEPGKLLVGIRFMIQELRRLVTEVRGSTDTMLVATSEISSGNADLSSRTESQASSLEQTASSMEELTSTVRQNADNARQANQLVITASESAVRGGHVVDQVVSTMGSIKESSRKIVDIIGVIDGIAFQTNILALNAAVEAARAGEQGRGFAVVASEVRNLAQRSAAAAKEIKGLIGDSVEKVDIGNKLVDQAGTTMSEIVSSVQRVADIMGEITSASQEQSAGIEQVNIAIGQMDEMTQQNAALVEQAAAAAESLEEQAQKLSSTVGVFKIN

SEQ ID NO: 99316 - DNA, 1710 bp, Methylobacillus flagellatus KT
  CDS (1)..(1710): transl_table=11
gtgaagttttcagatttgaggataggggtgcgtttgggggcggggtttgctgtgatcttgttgctgatgatgatcatggtggctttcggcttggctcagcttgccaatgtgggaagcacggcgaagcaagtggtggaaactgagctgaaaaaggaacgcatcaccacggagtgggtgtcgaatgccacccagaatggattgcgcaccctcgccgcgatcaagagttccgatgcggccatgtatgacatgtacatccagcaaattgctgaaacagcacgagctaacgatagtttgaaacagcagcttgaaacgttgctggtcaagcccgaagggaaggcgaaattcgcggatgccaaggaaaaggcagatgccttcagcaaggttcgcagtgaattgttgcaattaagaaaagatggtgccgaagcatcgcttatcgaaaagaatgtgcaagaggtgttccttcctgcacgcaaggcttatttcgatagcatgaatgaattgcttgaattcgagcggcacctgattgatgaggccggggcagatatccagcgggtgaaaaatgctgcgagcctatggatgctggtgatcggcctggtggcagtcgtgctcggcgcgatctttgcctggcggctttcccttgggattacccgtccacttgccaacgctgtcaagctggccgagacagtggctgctggagacttgaccagcactctcgccatcgactcaaaagatgaaataggacagttgttgaatgcgctgaaatccatgaacgataacctggccaggatagtcagtgaggtgcgaagcggcacggagacgattgccactgcctcctcgcaaattgcatcgggcaacctggatttgtcgtcacgcaccgaggagcaggcgagttcgcttgaggaaaccgcttctgccatggaggaactgacttccaccgtgaagcagaatgcggataatgcccagcaagctaaccagctggcggtttctgcttcagggatcgccacgcagggaggcgaagtcgtggatcaggtcatcgcgaccatgcagtcgatcagtgaatcttcgaaacggattgccgacatcattggtgtgatcgacggcattgctttccagaccaacatcttggcattgaatgctgcggtggaggctgcgcgtgccggtgagcaggggcgtgggtttgccgtggtggcgagcgaggtacgcaacctggcgcagcgttcagccaatgcggccaaggaaatcaaggggttgattacggactcggtggaaagtgttgatgccggtagccgtctggtggagcaggcggggacgacgatgaagcatgtggtggatagcgtgcagcgtgtgaccgatatcgtcagtgagatcagcgcagccagccatgagcaaagcaccggcattgagcaggtgaaccaggcgattgtccagatggatgaagtcacccagcagaatgcggccctggtagaggaggcagcggcggcttctcaatcattgcaggatcaggcggcaagccttgcccaagcagtgagcgtattcaaggtcaatggcatgcaggtacaggctgcagtgcataaagtcagcaaacccaagccagtcgccgtttcaaagcccaaggtggtagtggcctccaagcctgtgacgacaaccaggacaagaactgccatggtgcctgcggtagcaggctcggctgacgagtgggaagaattctag

SEQ ID NO: 99317 - protein, 569 aa, Methylobacillus flagellatus KT
MKFSDLRIGVRLGAGFAVILLLMMIMVAFGLAQLANVGSTAKQVVETELKKERITTEWVSNATQNGLRTLAAIKSSDAAMYDMYIQQIAETARANDSLKQQLETLLVKPEGKAKFADAKEKADAFSKVRSELLQLRKDGAEASLIEKNVQEVFLPARKAYFDSMNELLEFERHLIDEAGADIQRVKNAASLWMLVIGLVAVVLGAIFAWRLSLGITRPLANAVKLAETVAAGDLTSTLAIDSKDEIGQLLNALKSMNDNLARIVSEVRSGTETIATASSQIASGNLDLSSRTEEQASSLEETASAMEELTSTVKQNADNAQQANQLAVSASGIATQGGEVVDQVIATMQSISESSKRIADIIGVIDGIAFQTNILALNAAVEAARAGEQGRGFAVVASEVRNLAQRSANAAKEIKGLITDSVESVDAGSRLVEQAGTTMKHVVDSVQRVTDIVSEISAASHEQSTGIEQVNQAIVQMDEVTQQNAALVEEAAAASQSLQDQAASLAQAVSVFKVNGMQVQAAVHKVSKPKPVAVSKPKVVVASKPVTTTRTRTAMVPAVAGSADEWEEF

SEQ ID NO: 99318 - DNA, 1623 bp, Burkholderia xenovorans LB400
  CDS (1)..(1623): transl_table=11
atgttcagcaagatcaaggtcgcatccggcctgttgtgtgttctggccgcgttctgcgttttccagcttgtcacggtcggcttggggttctggtcgctcacgcgcactcatgacgacgtgaacgatctgtcgaacatcgccttgaagcaggtcgacgcggtcaacgaaacgacccagcgtctgatggacgcgcgcatcaacctctcgcgggccgggacgcgcatggtgcgcggcggctccgagccgaccgacatcgtgcagcacgcccgcgaacagttgacggccgccgaccagtcgttcgccgccttcatgagcgcacccaaaaccagcgacgaaaacggcgcccgcgccgccgcgctcgccgagcgctacaggaagctgcacgacgcgctcgcggaactggtgcagtttctcgactcgaacaatatccaggcttttctcgatcagccgacccagtcgttccaggacgcctatctcggcgaatcgcataacttcgtgcagttcggcaccgcggcgagccgggcatcgctcgattcgatcgatacgcgtatggcgacgtttcgcgcggtgagcatcgtgattctcgtggctctggtggccggcacgttcgccgtgcatacggcgctgcgccggggcgtggtaacgccgctggaagaagcgggccgtcacttcgaccgtatcgcgcaaggccggttggaccagccaatcgccgcgcacggcaccaatgaaatcggccgcctgttctcgggtctcgcgaaaatgcaggcgagcgtggcgcgtacggtgcaaaccgtgcgcgagtccgcagactcgatccacctcggcgccgacgaaatcgcgaccggcaacgccgatctgtcggcgcgcacggaaaaccaggcggcgtcgctcgaagaaaccgcgtcgagcatggaggaactgaccgccaccgtgcgccagaacgccgatcacgcccgtgaggccaacgcactcgccgggaccgcgctcgaagcgacctcgcgcggcagcgaggtggtcaaccaggtggtggagaagatgcgcggcatcgcgcagagttcggacaagatcgccgagatcatttcggtgatcgacggcattgcgttccagaccaatattctcgcgctgaacgcggccgtcgaagcggcgcgcgcgggcgagcaggggcgcggtttcgccgtggtggcgggcgaagtgcggggcctcgcgcagcgcagcgcgcagtcggcgaaggaaatcaaaacgttgatcagcgaatcggtggccgagatccggggcggttcgacgctggtcgagcatgccggagaagcgatgagcaacgtgtcgacgtcgatttcgcgcgtcacgcagatgatggcggaaatcagcgcgtcgtcgctcgaacagagcacgggcatcgagcagatcaaccaggcggtggtgcagatggatgagatgacgcagcagaacgcggcgctcgtcgaacaggccgcggcagcggcggcttcgctgcatcagcagacgcagcagttgaagcaggctgtttccgtgttcgaaatttctgaatctgtgttgcgcacgcaacaaatcgacgaagcacgtgggcgaacagtcgatttcccgttgtcgggcatgcgcgcaatttaa

SEQ ID NO: 99319 - protein, 540 aa, Burkholderia xenovorans LB400
MFSKIKVASGLLCVLAAFCVFQLVTVGLGFWSLTRTHDDVNDLSNIALKQVDAVNETTQRLMDARINLSRAGTRMVRGGSEPTDIVQHAREQLTAADQSFAAFMSAPKTSDENGARAAALAERYRKLHDALAELVQFLDSNNIQAFLDQPTQSFQDAYLGESHNFVQFGTAASRASLDSIDTRMATFRAVSIVILVALVAGTFAVHTALRRGVVTPLEEAGRHFDRIAQGRLDQPIAAHGTNEIGRLFSGLAKMQASVARTVQTVRESADSIHLGADEIATGNADLSARTENQAASLEETASSMEELTATVRQNADHAREANALAGTALEATSRGSEVVNQVVEKMRGIAQSSDKIAEIISVIDGIAFQTNILALNAAVEAARAGEQGRGFAVVAGEVRGLAQRSAQSAKEIKTLISESVAEIRGGSTLVEHAGEAMSNVSTSISRVTQMMAEISASSLEQSTGIEQINQAVVQMDEMTQQNAALVEQAAAAAASLHQQTQQLKQAVSVFEISESVLRTQQIDEARGRTVDFPLSGMRAI

SEQ ID NO: 99320 - DNA, 1650 bp, Burkholderia xenovorans LB400
  CDS (1)..(1650): transl_table=11
atgttgaaaaatctgtcgattcgtacctgtctgaccatgctgatcgcgttcttcggtctcgcgctgctggtcggcgccgccgccggtctgctgtcgctgcgttcgagcaacgcctcgctgcagcagatgtacaccgtcgacacacccgctgtcgccgacctcgaaggcagcgccagccagttgttgcgcctgcgtctcgcgctggcgacgtacgcttcgctcgtcgatctgaacgatcaggacggcgcgaacgccgtgctcaagcgtttcgatcagtaccagaaagcctccgacgaccgccttgcccactttgtgagccgcgcgggcacggacgccgacgaacagcgtctcatcaaggagatgcaggacaggcgcgacgcctttctgcacgaagccgtcgagccggctcttgccgcgctcaggtcgaacgacagggcggccttccagcaattgcaggcgcacaagctgccgtcgctctatagcgcgtacgaaaaggccatgctcgcgctcgaacagttgcagctcgatcacggcgcgcaacgctatcaggctgcgcaggatctgttctacgtgatctgtgtcgtggtggcggtcggcatggtcgtatcgctgctcggctcgctgatcggccgcgcggtgctggtgcgcgcgatcgtcagtccggtcgacgccaccatcgcgcagttccagcgcatgtccagtggcgacctgaccggccagatcgtcgtgagcagcagcaacgaaatgggccgtctcgcggccgcgttgcaaaagatgcaggagtcgctggtcgcgacggtgaactcggtgcgtcaaggcacggaatccatcgacaccggcgtgagcgagattgccgcgggcaataccgatctgtcgcaacgtaccgaggaacaggccgcgtcgctcgaagagacggcggcaagcatcgaacagctcacctcgacggtcaagcagacggcggacaacgcgaagcaggccagctcgctcgcgcagggtgcatccagtctggccgcgcaaggcggcgatctcaccgggcaggtggtgggcacgatgcatggcatcgtcgacgattcgcggcggattgccgacattgtcggcgtgatcgaagggatcgcgttccagaccaatattctggcgctgaacgccgcagtcgaagccgcgcgcgccggtgagcagggacgcggcttcgcggtggtggcgagcgaagtgcgctcgctcgcgcagcgcagtgcggcggcggcgaaggagatcaagggtttgatcgacgaatcgacggcgcgcgtgcaggccggctcgcaactggttgaacgctcgggctcgacgatgaccgagatcgtcgacgcgatcgctcgcgtgagttcgatcatgggcgaaattgcggcggcggccatcgagcagagcaccggcatcgatcaggtcaatctcgcggtcgcgcagatggacgaggtgactcagcaaaatgccgcgctggtggagcaggctgcggcggcggcgagttcgctggaagagcaggcgcggcggttgactgccgccgtgtcggtgttccagacgggcagcggggcgacgtcgtcttccgggtcttccgggcggcgtggcggctcgtcagccgcgccgcagacggccgatgcggatgagttcgctacggcctga

SEQ ID NO: 99321 - protein, 549 aa, Burkholderia xenovorans LB400
MLKNLSIRTCLTMLIAFFGLALLVGAAAGLLSLRSSNASLQQMYTVDTPAVADLEGSASQLLRLRLALATYASLVDLNDQDGANAVLKRFDQYQKASDDRLAHFVSRAGTDADEQRLIKEMQDRRDAFLHEAVEPALAALRSNDRAAFQQLQAHKLPSLYSAYEKAMLALEQLQLDHGAQRYQAAQDLFYVICVVVAVGMVVSLLGSLIGRAVLVRAIVSPVDATIAQFQRMSSGDLTGQIVVSSSNEMGRLAAALQKMQESLVATVNSVRQGTESIDTGVSEIAAGNTDLSQRTEEQAASLEETAASIEQLTSTVKQTADNAKQASSLAQGASSLAAQGGDLTGQVVGTMHGIVDDSRRIADIVGVIEGIAFQTNILALNAAVEAARAGEQGRGFAVVASEVRSLAQRSAAAAKEIKGLIDESTARVQAGSQLVERSGSTMTEIVDAIARVSSIMGEIAAAAIEQSTGIDQVNLAVAQMDEVTQQNAALVEQAAAAASSLEEQARRLTAAVSVFQTGSGATSSSGSSGRRGGSSAAPQTADADEFATA

SEQ ID NO: 99322 - DNA, 1548 bp, Ralstonia metallidurans CH34
  CDS (1)..(1548): transl_table=11
atgaataacctgagcatccgccacggcctgctggcgaccctggtgattttcggcctgatgatcgtgtttggcgccgcgctgggcgtgacccagttgtacgcagccagcgagtccgcggaggacatgcatcaggtatcggcgcacgtgcagttgcttaacagcgcctacaaggacatgacacgcgcgcgcgctgcgctgacgcgtgcgtacaactcggccaaagctggcggcggcatcaacgccgaggcaatcggcaatgcggagggctcgatccgcaagtccaccgatgcgttggaacgctttgccagcgcgcctgtcctggagggcctggatgcctcggcacgcgacggcatggttgctgtcgcacgggcacacaatgacgctgtgcaacggggactcgaagcattgcgtaaggatgatcccgatggcttcgtggcgatcaacgacaaggacatcaccgcgacaggtatgaagtattcagctgatgtcgagcgtttcgaggcgctcgccacccagcacactgaagccgtgatcgccaggatcagcacccgtttcaaccgggtgctgatcctggtgtgtgtcggcatggtggcgtcggtgctgctgatcgtggtcgtgcatctggcgctgcgcaagctggttgtggcgccgctgcaccaggcgtgcgacctgatcatgcgcgtggcggacggcgatctgacgatcaaggtgcccgaagccggccgcaatgaaatcggacagttgctgcgcgcgctgtcgcgaatgcagcatgggctgacggacaccgtggcgaaggtgcgggcgggctccgatgcggtgacaacaggcgcgcgggagattgccgcgggcaataccgacctgtcgtcgcgtaccgagcagcaatcgtcggcgctggagcagacggccgccagcatggaggagttgacgtcgacggtggccaataacgcggagagcgccacgcgcgccagcggcctggcccgcgatgcggcggatctggcatcgcgcggtggcgaggtggtgcgtggcgtggtgcagacgatgagcgagatcaacgccagctcgcagaagatcgtggacatcatcgccgtaatcgacggcattgcattccagaccaacatccttgcgctcaatgccgccgtggaagcggcacgtgctggcgagcagggtcgcggtttcgcggtggtggctggcgaggtgcgcgcgctggctcagcgcagcgcaggagccgccaaggagatcaagtcgttgatcgattcgtccgtcgacaaggtaggcgccggcagcgcgcaggtagagcaggccggcagcacgatcgaggacatcgtggtggccgtgcggcgactggccgataccgtcaacgagatctcggctgcatcgatcgaacagtcttcaggtatctcgcaggtcagcgaggcggtgtcgcagatggagcaggtgaaccagcagaacgctgcattggtggagcaggctgctgctgccgcagattcgctcgaatcccatgccaaccagcttgccgccgccgtgacaacgttcaagctggcggcttga

SEQ ID NO: 99323 - protein, 515 aa, Ralstonia metallidurans CH34
MNNLSIRHGLLATLVIFGLMIVFGAALGVTQLYAASESAEDMHQVSAHVQLLNSAYKDMTRARAALTRAYNSAKAGGGINAEAIGNAEGSIRKSTDALERFASAPVLEGLDASARDGMVAVARAHNDAVQRGLEALRKDDPDGFVAINDKDITATGMKYSADVERFEALATQHTEAVIARISTRFNRVLILVCVGMVASVLLIVVVHLALRKLVVAPLHQACDLIMRVADGDLTIKVPEAGRNEIGQLLRALSRMQHGLTDTVAKVRAGSDAVTTGAREIAAGNTDLSSRTEQQSSALEQTAASMEELTSTVANNAESATRASGLARDAADLASRGGEVVRGVVQTMSEINASSQKIVDIIAVIDGIAFQTNILALNAAVEAARAGEQGRGFAVVAGEVRALAQRSAGAAKEIKSLIDSSVDKVGAGSAQVEQAGSTIEDIVVAVRRLADTVNEISAASIEQSSGISQVSEAVSQMEQVNQQNAALVEQAAAAADSLESHANQLAAAVTTFKLAA

SEQ ID NO: 99324 - DNA, 1698 bp, Ralstonia metallidurans CH34
  CDS (1)..(1698): transl_table=11
gtgctcaatgcatcacactgtgatgcaacaacatccatatcgccgaggaatcggcaactgggggtagctgtgaaaatccgcgatctgtcgatcaagaccaggctccttgcggggtttggcgcgctggcactcatcgtgctggtggtttcggggctgtctttgcgtgcgctgagtcaggcgaccgacgggttcagtgcctacatcaacgggctcaacgcccgtggcgagatggcgtccaaggtgcgcacgtcagtcgatcgtcgcgccatcgccgcgcgcaatctcgtgctggtcaccacgccggcagacatcagtctggaaaaggaagcggtgctcaaggcgcacgacgacgtgaaggcgcggctgggccagcttaacgagatgatcaaagccgagggtgtaagcgagaccgcccgaaatctggtggccgaggtcgaccgcatcgaggcgcgttacggtcccgtggccacggccatcgtcgccctggcgctcgagggcaagcgtgacgccgccatcgagaaaatgaacaacgaatgccgcccactgctggccgagctgatcaaggcgaccaacacctatgccagcttcaccaaggagcgccaggacgaaatgatccggaagctgcaggacgactatgtcgcgcagcgcaatctgctgatcatcgtgtcgctagccgcggtggcctttgccatgaccggcggcatgttgctgacccgcgcgatcaccgggccgatagagcgcgccgtgggcgtggccagcaccgtcgcgcgcggcgagcttggcatgcgcatcgaggtgaattccaccgacgagaccggccggctgctcggcgcattgcgtgacatgaacgagcgcttgagcgaaacggtggcgcgcgtgcgcgagggcagttcgagcatcgcggtggccacaggccagatcgccgagggcaacatggacctgtcgagccgtaccgagcagcaggcggcgtcactggaggaaaccgcggcgagcatcgaggaactggcggcgacggtccgccacaacaccgagaacgcccgacaagccagcgaactggcccgcaacgccaccgaagtggcccaacagggcagcagcaccgtgggccgcgtggtcgatacgatggaaggcatcagtgcaagctcgaccaagatcgcggagatcaccggcatcatcgaaggcattgcattccagaccaatatcctggcgctcaacgccgcagtggaagctgcgcgtgccggcgagcaggggcgcgggtttgccgtggtggccagcgaggtgcgtgggctcgcacagcggtcgtcgagtgcggccaaggaaatcaaggagttgatcgacgcatcggttgcccaggtgcaggctggctcgtcgttggccagcgaagcgggcaagaccatgaccgacgtcacgcaggccgtggctcgcgtcaccaatatcgtcgacgagattgccaccgcgtccgccgagcagaaccgtggcatcgagcaggtgaaccaggcgatcgtgcagatcgatcaggtcacgcagcagaatgcctcgctggtgcacgaggccgcggaagcgtcgaaggcgcttgaggagcagagccggtcgctggacgatgctgtggcgttcttcaagctgccatcgggcggcgggcgccttcatgacgcgcaccgcgccgtcgttggtcagcggacggcaggcatcgcgttcacgtaa

SEQ ID NO: 99325 - protein, 565 aa, Ralstonia metallidurans CH34
MLNASHCDATTSISPRNRQLGVAVKIRDLSIKTRLLAGFGALALIVLVVSGLSLRALSQATDGFSAYINGLNARGEMASKVRTSVDRRAIAARNLVLVTTPADISLEKEAVLKAHDDVKARLGQLNEMIKAEGVSETARNLVAEVDRIEARYGPVATAIVALALEGKRDAAIEKMNNECRPLLAELIKATNTYASFTKERQDEMIRKLQDDYVAQRNLLIIVSLAAVAFAMTGGMLLTRAITGPIERAVGVASTVARGELGMRIEVNSTDETGRLLGALRDMNERLSETVARVREGSSSIAVATGQIAEGNMDLSSRTEQQAASLEETAASIEELAATVRHNTENARQASELARNATEVAQQGSSTVGRVVDTMEGISASSTKIAEITGIIEGIAFQTNILALNAAVEAARAGEQGRGFAVVASEVRGLAQRSSSAAKEIKELIDASVAQVQAGSSLASEAGKTMTDVTQAVARVTNIVDEIATASAEQNRGIEQVNQAIVQIDQVTQQNASLVHEAAEASKALEEQSRSLDDAVAFFKLPSGGGRLHDAHRAVVGQRTAGIAFT

SEQ ID NO: 99326 - DNA, 1743 bp, Acidovorax sp. JS42
  CDS (1)..(1743): transl_table=11
atgcatctcagcaacctcaaggtcggcacgcgcctggccttgtccttcggcttggttctgctcatcaccgtggtcatcgcggcggtaggcatatggcgtttgcaggaattggcaagcgtcacccaccagctcaccagcacggacaacgaacggctgcgcgccgccagcacatggcggcaggcgattgacctgaactgggtgcgcacgcgcgccgccatcctggatgcggacacctcccatctctcgagctggcaaagcgagattgccaagacctccgaagaagcatccaaggcgcaggaggtggtggagcggctggtgaccaccgacgaagggcgccgcctgctcgccgacattgcgaagacgcgcgaagcctatcgcggcccgcgggctgaattgctcaagcgcaaggctgccggcgagagtgtgggtgagttgctcgacagtcaactcaagccgctggccgacgcttacctacagtccatcgttgccatggaacagcgccagcgcgcgctctacgaaagcacccgcgacaacgctgccaagcaggccacgcgcagtcgcgccatcctgatggtcgtgaccgcagtggcgctgctggtgggcgcgggcgccgcgatcttgttgagccgctccgtgaccgggcccttgcagttggccgtgcgcggcgcaggcttgatcgccgagggcgacctcacccagtccatccaggcccacggccgcgacgaagccgcggcgctgctgaaggcactgggccacatgcagggcaacctcgctcgcgtagtggccggcgtgcgcgccaatgcggagagcgtcgcgtcggccagcgcggagatctcgcagggcaaccacgacctgtccggccgcaccgagagccaggccagcgccctggaagaaacggccgcctccatggagcagttgggcgccaccgtgcgccagaacgccgacaacgcccgccaggccaaccagctcgccatgaatgccagcaccgtcgccgtgcagggcggcgaggtggtctccgaggtggtggacaccatgcgcggcatcaatgagtccagccgcaagatcgccgacatcatcggggtgatcgatggcattgccttccagaccaacatcctggcgctgaatgccgccgtggaagccgcgcgtgccggtgagcaaggccgcgggtttgccgtggtggccggcgaggtgcgcgcgctggcgcagcgctctgccgaggccgccaaggagatcaagcagctcatcaccgccagcgtggagcgcgtggagcagggctcgcagctggtggacaaggccggtgccaccatgaccgaggtggtcaccgccattcgccgcgtgaccgacatcatgggagagatcagcgccgccagcagcgaacaaagcgcgggcgtggcccaggtgggcgaggccatcacccagatggaccaggccacgcagcagaacgccgcgctggtcgaggagatggccgccgccgccagcagcctcagcggccaggcccgcgagctcgtcgaggccgtcgccgtgttcaagctggcgcagaaggcctccgccctgccgcgcatggcgcccgtgcatgccacggctgcgccggctcccgtacccgccacctccgcgacacccgccgcccctgcccggcccgccacgccgccggcggccgccttggcacgtccggcagcagcgcgccctcaacccgcgcaggcggcccgcacgactgccgataacgacgaatgggagagcttctga

SEQ ID NO: 99327 - protein, 580 aa, Acidovorax sp. JS42
MHLSNLKVGTRLALSFGLVLLITVVIAAVGIWRLQELASVTHQLTSTDNERLRAASTWRQAIDLNWVRTRAAILDADTSHLSSWQSEIAKTSEEASKAQEVVERLVTTDEGRRLLADIAKTREAYRGPRAELLKRKAAGESVGELLDSQLKPLADAYLQSIVAMEQRQRALYESTRDNAAKQATRSRAILMVVTAVALLVGAGAAILLSRSVTGPLQLAVRGAGLIAEGDLTQSIQAHGRDEAAALLKALGHMQGNLARVVAGVRANAESVASASAEISQGNHDLSGRTESQASALEETAASMEQLGATVRQNADNARQANQLAMNASTVAVQGGEVVSEVVDTMRGINESSRKIADIIGVIDGIAFQTNILALNAAVEAARAGEQGRGFAVVAGEVRALAQRSAEAAKEIKQLITASVERVEQGSQLVDKAGATMTEVVTAIRRVTDIMGEISAASSEQSAGVAQVGEAITQMDQATQQNAALVEEMAAAASSLSGQARELVEAVAVFKLAQKASALPRMAPVHATAAPAPVPATSATPAAPARPATPPAAALARPAAARPQPAQAARTTADNDEWESF

SEQ ID NO: 99328 - DNA, 1770 bp, Acidovorax sp. JS42
  CDS (1)..(1770): transl_table=11
atgaatcacttcaagatctcgacccgccttgtgttcctcatcggactgatgtccgtcctgcagctcatcgtgggaggcataggcctctatggcacagaccagaccaaagaaggcctgcgcaccgtgtacgaagaccgtgccgtgcccctgggtcagctgtcgcaaatccagtccaacctgctggaaaaccgtctggcgctgaccagcgcccttgccaacttcacacccgaagaagtcacacgcactgctacagaaatcgaccgaatcctggcggaaaccagcaagatctgggtagcgtacgctgccaccagcatgactgccgccgagaaggtgctggccaacaagttcgaggccgaccacaccagatttgtgaatgaagccctcaaacctgcagtcgccgcgttgcaggcgggtgattttgacaaaggcaaaagcctcaacgacaccatggtgcgcccgggctatgcccccctgcgggaaggcatacaggccctggtcgatctgcagctgaatgaaaccaaagccgagttcaatgccgccaccagccgctacaacacgctgcgcgctctctcgatcggctccattgtcctcgggatcgcctttggtgtgctttttgggctggccgtgatgcgcaacatcacccgctccctgaaagaagccgtggaagccgccgacgccgttgcccatggtgacctgagccgcagcatcccagtccatggcaaggacgaaatatcgctgctcttgcgctcgctcgctgccatgcaggaatcgctggcacatgtcgtgcagcgggtacgcagcggttccgaatctgtggcgatggccagtgccgaaattgcccagggcaatcaggacctgtcgggccgcaccgaaagccaggccagcgcactggaagaaaccgccgccagcatggagcaactgggctccaccgtgcgccagaacgccgacaacgcgcgtgcggccaaccagttggcccaaagtgccagcatcgtggctgttcagggtgggcaggtcgtggcccaggtggtggacaccatgaagggcatcaacgacagcagcaagcggattgccgacatcatcagcgtcattgatggcatcgccttccagaccaacatcctggccctcaatgcggccgtggaagccgcccgggccggcgagcagggccggggctttgccgtggtggccagcgaggtgcgcagcctggccgggcgcagcgccgaagcggccaaggaaatcaagagcctcatcaccgacagcgtcaaccgtgtcgaggccggcagcgccctggtggatcaggcgggcaccaccatgcaggaggtggtgggctccattcgccgcgtgaccgacatcgtgggcgagatcagcgcggccagcagcgagcagagcgccgccgtgacgcaggtcggcgaagccgtgacacagatggatcaggtcacgcagcagaacgcagcactggtcgaggaaatggccgccgcggccagcagcctgcgcagccaggcggccgatctggtcaacaccgtggccgtcttcaagctcggtgcgcagggcggcaacacgcccgtgcgcccggcagccccgcaggctcccgcagcacaggccccggcgcccatgcccgcaccagccccccgccccgctctgcgcacggcggcacccgcagccaaacgcgcgcccgcccccgccaaagccaaggcggtggccgcacttccgcccagcacgcccaaggcgccacccgccagcgcgggcaaggacgatgaatgggagtccttctga

SEQ ID NO: 99329 - protein, 589 aa, Acidovorax sp. JS42
MNHFKISTRLVFLIGLMSVLQLIVGGIGLYGTDQTKEGLRTVYEDRAVPLGQLSQIQSNLLENRLALTSALANFTPEEVTRTATEIDRILAETSKIWVAYAATSMTAAEKVLANKFEADHTRFVNEALKPAVAALQAGDFDKGKSLNDTMVRPGYAPLREGIQALVDLQLNETKAEFNAATSRYNTLRALSIGSIVLGIAFGVLFGLAVMRNITRSLKEAVEAADAVAHGDLSRSIPVHGKDEISLLLRSLAAMQESLAHVVQRVRSGSESVAMASAEIAQGNQDLSGRTESQASALEETAASMEQLGSTVRQNADNARAANQLAQSASIVAVQGGQVVAQVVDTMKGINDSSKRIADIISVIDGIAFQTNILALNAAVEAARAGEQGRGFAVVASEVRSLAGRSAEAAKEIKSLITDSVNRVEAGSALVDQAGTTMQEVVGSIRRVTDIVGEISAASSEQSAAVTQVGEAVTQMDQVTQQNAALVEEMAAAASSLRSQAADLVNTVAVFKLGAQGGNTPVRPAAPQAPAAQAPAPMPAPAPRPALRTAAPAAKRAPAPAKAKAVAALPPSTPKAPPASAGKDDEWESF

SEQ ID NO: 99330 - DNA, 1641 bp, Escherichia coli B
  CDS (1)..(1641): transl_table=11
atgaatacaactccctcacagcgattaggttttttgcatcacatcaggctggttccgttatttgcctgcattcttggcggtatcttagttctattcgcattaagttctgctctggctggctatttcctctggcaggccgatcgcgatcagcgtgatgttactgcggagattgagattcgaaccgggttagcgaacagttcagattttttgcgttcagcccggatcaatatgattcaggccggggctgcgagtcgtattgcggaaatggaagcaatgaagcgaaatattgcgcaagccgaatcggagattaaacagtcgcagcaaggttatcgtgcttatcagaatcgaccggtgaaaacacctgctgatgaagccctcgacactgaattaaatcaacgctttcaggcttatatcacgggtatgcaacctatgttgaaatatgccaaaaatggcatgtttgaagcgattatcaatcatgaaagtgagcagatccgaccgctggataatgcttataccgatattttgaacaaagccgttaagatacgtagcaccagagccaaccaactggcggaactggcccatcagcgcacccgcctgggtgggatgttcatgattggcgcgtttgtgcttgccctggtcatgacgctgataacatttatggtgctacgtcggatcgtcattcgtccactgcaacatgccgcacaacggattgaaaaaatcgctagtggcgatctgacgatgaaggatgaaccggcgggtcgtaatgaaatcggtcgcttaagtcgtcatttacagcaaatgcagcattcactggggatgacagtagggactgttcgacagggtgcggaagagatttatcgtggcaccagcgaaatttcagctggcaatgcggacctgtcatctcgcaccgaagaacaagcggcggctatcgaacaaactgccgctagcatggagcaactcactgcgacggtgaaacagaatgcggataacgcgcatcatgccagcaaactggcgcaagaggcttctattaaagccagcgatggcgggcagacggtttccggtgtagtaaaaacgatgggcgctatctctacaagttcgaagaaaatttccgagatcaccgccgtcatcaacagtattgctttccagacgaatattctggcactgaatgctgccgttgaagccgcgcgagcgggtgagcaaggccgtggatttgccgttgtcgccagcgaagtacggacactcgcaagccgcagcgcccaagcggcgaaagagattgaaggcttgatcagtgaatcagtcaggttaattgacctggggtcggatgaggtggcaacggcagggaaaaccatgagcactattgttgatgccgtcgcgagtgtcacacatatcatgcaggaaatcgccgccgcctcggatgaacaaagtagaggcataacgcaggttagccaggcgatttctgaaatagataaggtgacgcaacagaatgcttctctggtagaagaggcctcagcggcggcgttgtcccttgaagaacaggcggcacgattaactgaggcggtggatgtattccgtctgcacaaacattctgtgtcggcaaaacctcgcggagcgggtgaaccagttagtttcgctacggtgtga

SEQ ID NO: 99331 - protein, 546 aa, Escherichia coli B
MNTTPSQRLGFLHHIRLVPLFACILGGILVLFALSSALAGYFLWQADRDQRDVTAEIEIRTGLANSSDFLRSARINMIQAGAASRIAEMEAMKRNIAQAESEIKQSQQGYRAYQNRPVKTPADEALDTELNQRFQAYITGMQPMLKYAKNGMFEAIINHESEQIRPLDNAYTDILNKAVKIRSTRANQLAELAHQRTRLGGMFMIGAFVLALVMTLITFMVLRRIVIRPLQHAAQRIEKIASGDLTMKDEPAGRNEIGRLSRHLQQMQHSLGMTVGTVRQGAEEIYRGTSEISAGNADLSSRTEEQAAAIEQTAASMEQLTATVKQNADNAHHASKLAQEASIKASDGGQTVSGVVKTMGAISTSSKKISEITAVINSIAFQTNILALNAAVEAARAGEQGRGFAVVASEVRTLASRSAQAAKEIEGLISESVRLIDLGSDEVATAGKTMSTIVDAVASVTHIMQEIAAASDEQSRGITQVSQAISEIDKVTQQNASLVEEASAAALSLEEQAARLTEAVDVFRLHKHSVSAKPRGAGEPVSFATV

SEQ ID NO: 99332 - DNA, 1602 bp, Escherichia coli B
  CDS (1)..(1602): transl_table=11
atgtttaatcgtattcgaatttcgaccacgctgtttttaattttgattctctgcgggatcttgcagattggcagtaacggcatgtctttttgggcatttcgcgacgatttgcaacgactgaatcaggtcgagcagagcaatcagcaacgtgcggcattagcggaaactcgggcggtaatgttacaggccagtaccgcgctgaacaaagcgggcactctgacggcacttagctatccggcggatgacattaaaacgttgatgacgacggcgcgcgccagtctgacgcaatccaccacgctgtttaaaagttttatggcgatgactgcgggcaacgagcacgtcaggggattgcaaaaagagacggagaaaagttttgcccgctggcacaacgatctcgaacatcaggcgacctggcttgaaagtaatcaactttcggatttcctcactgcgccggtgcagggatcacagaatgcgtttgacgttaactttgaggcctggcagctggagatcaaccatgtgctggaagccgccagtgcgcaaagccagcgtaactatcagatttcggcactggtgtttatcagcatgattattgttgcggcgatctacatcagcagtgcgctgtggtggacgcgcaagatgattgttcaaccactggccattatcggtagccattttgacagcattgctgcgggtaatctggcgcgtccgattgcggtatatggtcgtaatgagatcaccgccatttttgccagtctgaagaccatgcagcaggctttgcgtgggacggtaagtgatgtgcgtaagggaagccaggagatgcacattggtatcgcggagattgtcgcaggcaataacgatctctcaagtcgtaccgaacagcaggcggcatcgctggcacaaacggccgccagtatggagcaattaaccgccacggtagggcaaaacgccgataacgcacgacaggcgtcggaactggcaaaaaatgccgcgacaacggcgcaggcgggcggtgttcaggtcagtaccatgactcacaccatgcaggagatcgccaccagctcgcaaaaaattggcgacattatcagcgttatcgacggaattgctttccagaccaatattctggccctgaatgcggcagtggaagcggctcgcgccggagagcaggggcgtggttttgcggtagtggcaggtgaagtgcgcaatcttgccagccgtagcgcgcaggcagcaaaagagatcaaagggctgatcgaagagtcagtcaatcgtgtccagcagggttcgaaactggtgaataacgccgccgcgaccatgatcgatattgtcagttcggtgacccgcgtgaacgacattatgggagaaattgcctctgcgtcggaagaacaacagcgggggattgagcaggttgcacaggctgtcagccagatggatcaggtgactcagcagaacgcctcgctggtagaagaagcggcggtggcaacggaacaactggcgaatcaggccgaccatctttcgtcgcgtgtggcggtatttacccttgaagaacatgaagtagcacgacatgagtcggtgcagttacaaattgcgccagtggtatcctga

SEQ ID NO: 99333 - protein, 533 aa, Escherichia coli B
MFNRIRISTTLFLILILCGILQIGSNGMSFWAFRDDLQRLNQVEQSNQQRAALAETRAVMLQASTALNKAGTLTALSYPADDIKTLMTTARASLTQSTTLFKSFMAMTAGNEHVRGLQKETEKSFARWHNDLEHQATWLESNQLSDFLTAPVQGSQNAFDVNFEAWQLEINHVLEAASAQSQRNYQISALVFISMIIVAAIYISSALWWTRKMIVQPLAIIGSHFDSIAAGNLARPIAVYGRNEITAIFASLKTMQQALRGTVSDVRKGSQEMHIGIAEIVAGNNDLSSRTEQQAASLAQTAASMEQLTATVGQNADNARQASELAKNAATTAQAGGVQVSTMTHTMQEIATSSQKIGDIISVIDGIAFQTNILALNAAVEAARAGEQGRGFAVVAGEVRNLASRSAQAAKEIKGLIEESVNRVQQGSKLVNNAAATMIDIVSSVTRVNDIMGEIASASEEQQRGIEQVAQAVSQMDQVTQQNASLVEEAAVATEQLANQADHLSSRVAVFTLEEHEVARHESVQLQIAPVVS

SEQ ID NO: 99334 - DNA, 1626 bp, Pseudomonas putida GB-1
  CDS (1)..(1626): transl_table=11
atgcttgccaacctgaagatccgcaccggaatgttctgggtgttgtcgctgttcagcctgaccctgctgttttccaccgtcagtgcctggtgggcagcagtgggcagcgaccagcagatcaccgagctggaccagacggcgcaccagtcggaccggttgaacaatgcgttgttgatggcgattcgttccagcgccaatgtgtcctcgggcttcatcgagcagttgggtggccatgacgagagtgctggcaagcgcatggtgttgtcggtggagctgaacgacaagagccaggcgctggtcgacgcgtttgtcgaaaacgcccgtgagccagcccttcgcacgttggcactcgagctgcaggctacctttgccgaatacgccaaggcggttgccgggcagcgagaggcgacccgtcagcgttcgctggagcagtacttcaaggtcaacagcgatgccggcaatgccatgggccggctgcaagcgctacgccaacagttggtgggcgcactgagcgaacgtggtcagcagatcatgcaggagtccgaccggcgtctggcccgtgcgcagtttctgagcctgtgcctgctgggtgtgactttgctgctggcggcactgtgctgggctttcattgcccagcgtgtgctgctcccgctgcgtgaagccggtcggcatttccagcgcattgccggtggcgacctgagcgtaccggtgcaagggcagggcaacaacgagatcggccagctgttccatgagctgcagcgcatgcagcagagccaacgcgacacccttgggcagatcaatcactgtgcccagcagttggatgccgccgccacggcgttgaatgcggtcaccgagcaaagcgccaacaacctgcgccagcaggggcaggagctggagcaggccgctaccgccgtgaccgaaatgaccacggccgtggaggaggttgcgcgcaacgccatcaccacctcgcaaaccaccagcgagtccaaccagctggctgcgcaaagtcgccggcaagtcggtgacaacatcgacggcaccgaagccatgacccgcgagatccagaccagcagtgcgcatctggaacagttggtcgggcaggtgcgggatatcggcaaggtactggaagtgattcgctcggtgtccgagcaaaccaacctgctggcgctcaatgctgccatcgaagccgcccgcgccggtgaggccgggcgcggctttgcggtggtggcagacgaggtgcgcacgctggcctaccgcacgcaacaatcgacccaggaaatcgagcagatgatcgcccgcgtgcaagccggcaccgaggcggcggtggcttcgatgcaggccagcaccaaccgggcgcaatcgacactggaggtgaccctggcctcggggcaggtgctggagggcatttacagtgcgatcggcgaaatcaacgagcgcaacctggtcattgccagtgcggccgaagagcaggcccaagtggcgcgggaggtagaccgcaacctgctcaatattcgcgagctgtctcaccattcagcggcgggcgcgcagcagaccagcgaagcgagcaaggcgctagcgggcctggtgggggagatgacggcgttggtggggcggttcaaggtttga

SEQ ID NO: 99335 - protein, 541 aa, Pseudomonas putida GB-1
MLANLKIRTGMFWVLSLFSLTLLFSTVSAWWAAVGSDQQITELDQTAHQSDRLNNALLMAIRSSANVSSGFIEQLGGHDESAGKRMVLSVELNDKSQALVDAFVENAREPALRTLALELQATFAEYAKAVAGQREATRQRSLEQYFKVNSDAGNAMGRLQALRQQLVGALSERGQQIMQESDRRLARAQFLSLCLLGVTLLLAALCWAFIAQRVLLPLREAGRHFQRIAGGDLSVPVQGQGNNEIGQLFHELQRMQQSQRDTLGQINHCAQQLDAAATALNAVTEQSANNLRQQGQELEQAATAVTEMTTAVEEVARNAITTSQTTSESNQLAAQSRRQVGDNIDGTEAMTREIQTSSAHLEQLVGQVRDIGKVLEVIRSVSEQTNLLALNAAIEAARAGEAGRGFAVVADEVRTLAYRTQQSTQEIEQMIARVQAGTEAAVASMQASTNRAQSTLEVTLASGQVLEGIYSAIGEINERNLVIASAAEEQAQVAREVDRNLLNIRELSHHSAAGAQQTSEASKALAGLVGEMTALVGRFKV

SEQ ID NO: 99336 - DNA, 1626 bp, Pseudomonas putida GB-1
  CDS (1)..(1626): transl_table=11
atgcagttacggaatatgaagatcggcattcgcgctgccagcgtattcgccctgttgggcatcctggtcctgttcatgggccttatcgcactctacgaaacccgccagatggacacggctaccgacgagatccgggtcacctggatgcccgccgtggtggcgttgggtgacatcagcagcaacctcgggcgcgctcgcgccgtcaccctgcgcgccgcgctggacgacaaccccgacgaacgcacacgcaacctgcagctgctcgatggcatcaatgccgagctcaaggatgggttgaaagcctacgccgataccatcatcgcggccgacgaccgtgccctgttcaacacgttcaacgacgcctaccagcagtatttcgacctgcaagtgagggtgctgcaggacattgctgctggccgcatgagcgaggccaagcagcagatcggcggcccactcacgcagcgcgccgacggcatgatgaaggccttgaccgcgttgatcgcctacaacagcaagggtgccgaagatgcctcgcagcgcagcagcgatgtggccgacgaggcattcactgccatcatcgtctcgttgctggtgatcatgcttgcgctcgccgccattgccaccgtgctcacccgcagtatcgttgtgccgctggccgatgccgtggctgtcgccgagcgtgtggccaccggcgacctcacccgggaaattcgcgtgatcggccaggacgagccagccttgctgctgcgcgccttgggccgtatgcaagacagccttcgcgacaccctgcgcaagatcgcggcttcgtccgaccaactggcctcggcctcggaagagctgcacacggtcactgaggacaccagccgtggcctgcaccagcagagcgcagaaatcgaccaggcggcgacggccgtcaaccagatgactgcagcggtcgaggaagtggcgaacaatgcggtcagcaccgccgacgcctcgaaaggcgccgaccagactacccgcgacggccgcgaccgggtcaaccaggcactggcgtccatccagcacctggtggctgacgtgaccggtacctcggccgagatcgaacagctggccaccaatgccaacgaaatcagccgcgtgctggatgtgattggtgcgattgccgggcagaccaacttgctggcgttgaacgccgccatcgaagcggctcgcgctggtgaggcaggccgtggctttgccgtggtggccgacgaggtccgcgccctcgcccaccgcacccagcagtcgacggcagagatcgagcaaatgattgccggtatccagaacggtaccgaacgcgcggtgacggcgatgcacagcagccaggggcgtgccaccggcacgttggaggtggcgcaaggcgccgggctggcgttggaagtgattgccgaggcgattgcgtcgatcaaccagcgcaacctggtgattgccagtgcttcggaggagcaggcacaggtggcgcgggaggtggaccgtaacctggtgaacattcgcgacctggcgatgcagacgtcggcaggggcgaaccagaccagtgcggcggcacaggatttgtcgcggttggcggtggatctgaacggcatggtggcgcagttcaaggtctga

SEQ ID NO: 99337 - protein, 541 aa, Pseudomonas putida GB-1
MQLRNMKIGIRAASVFALLGILVLFMGLIALYETRQMDTATDEIRVTWMPAVVALGDISSNLGRARAVTLRAALDDNPDERTRNLQLLDGINAELKDGLKAYADTIIAADDRALFNTFNDAYQQYFDLQVRVLQDIAAGRMSEAKQQIGGPLTQRADGMMKALTALIAYNSKGAEDASQRSSDVADEAFTAIIVSLLVIMLALAAIATVLTRSIVVPLADAVAVAERVATGDLTREIRVIGQDEPALLLRALGRMQDSLRDTLRKIAASSDQLASASEELHTVTEDTSRGLHQQSAEIDQAATAVNQMTAAVEEVANNAVSTADASKGADQTTRDGRDRVNQALASIQHLVADVTGTSAEIEQLATNANEISRVLDVIGAIAGQTNLLALNAAIEAARAGEAGRGFAVVADEVRALAHRTQQSTAEIEQMIAGIQNGTERAVTAMHSSQGRATGTLEVAQGAGLALEVIAEAIASINQRNLVIASASEEQAQVAREVDRNLVNIRDLAMQTSAGANQTSAAAQDLSRLAVDLNGMVAQFKV

SEQ ID NO: 99338 - DNA, 1944 bp, Pseudomonas putida GB-1
  CDS (1)..(1944): transl_table=11
atgctcggctacctcaaccgcaagctcggcaacatcagtgtcgctgccaagctggccctcggcttcgccgtggtcctgctactcaccctggccaccacactcagtggctggcgcgccctggatggcgcgatcgtgcgctcgcagcagctcggcgaaataaacctgatcaacgacctgggcaaagacctgcgcgcagaacgcatcacctaccgcgtgctcagcgacgacaccagcaagacgcgcatgaccggcatctacgaccagctcgaaaacctcctgaccacgttgcagcatcgcagcagcatcgatgaatcacggcagttgctggctaaagacctggcactgttgcagcgcatgcgcagcgacttcagcgaactgcagcaatacgtcgccaagcgtactggcttgcgtaaggccatgcagatacaggagcagaaactcaacgaggcgatcgacgaactgcaaacccaggctttactgaagatgcctgcagacagccagcaaaacggtgtactggggctgatggacaccctcacccggcatgtcgacggggccaaccagcaaagcctggtgccggcctataccttcgatccggtcgaggatttcgccaaagtcggcgacaacgccctggatgccgccaacagtagcctcgggcaactgcttgcaggccttgcgccgctgggcttgccacgcgcagtcagcgagcagcctggtgtcgagctggccaagtaccgcgccagccttgagcagtaccgccacgccgccgtacgtgtcgagcagttgcagaacaacctggacatcatgggcaccgagctgcgggcgacgagcctcgaactgggcaaacgcaaggtcgaacaacgcgacagtgaggccctggccgcccgctcgctgctgaccagcgtggcgctgatggcactggtggtaggggtattggccgcctggctgatcaccgtgcagatcacccaaccgttgcgccagacactcgccgtggccgcgcgtatcgccaagggtgacctgagccaggttgacgcagtgcaccgccgcgacgaaatgggccagctgcaaaccagcatgcgccagatgaccttgagcctgcgcgaactgatcggtggcatcgaccagggtgtcggccaactgtcacaggccgccactcagttggcggccagtagcgaggacaccaagctgcgcatcaaccaacagcgcgaagagaccgaccaagtggccaccgccatgaaccagatgagcgccaccgtgcaggaagtggcacagaacgccgagcaggcctcgctggccgcgagcaacgccgaccagcaggcacaactgggcgaccgagtggtggcagaggccatcggccgtatcgaacaactggccgggcagatggaccattgcctggcggccatgcaacacctggcgggcgagagccagcgcattggcagcatcctcgacgtgatcaagtcggtttccgaacagaccaacctgctggccctgaacgcggcgatcgaagctgcacgggcgggagaagccgggcgtggctttgccgtggtggccgatgaagtgcgcggcctggcccagcgcacctcgacggcgaccgaggagattggccagttgatcgacagcctgcacaacggtaccgacgaagtgacccgcctgctggacagcagcaagagcctgaccgagcaaagcgtggagctgagccgcaaggccgggcaggcgttgggccagataaccgatacggtgtcgagcattcagggcatgaaccagcaaatcgccacggccagtgaagaacagagcgtggtggccgagcagatcaaccgcagtgtgatcaacgtgcgggatgtgtcggatcagaccagtgcggccagtgaacagacggcggcttcgagcggggagctggagcagctggggcagcagttgcgggggatggtggggcggttcaacatctga

SEQ ID NO: 99339 - protein, 647 aa, Pseudomonas putida GB-1
MLGYLNRKLGNISVAAKLALGFAVVLLLTLATTLSGWRALDGAIVRSQQLGEINLINDLGKDLRAERITYRVLSDDTSKTRMTGIYDQLENLLTTLQHRSSIDESRQLLAKDLALLQRMRSDFSELQQYVAKRTGLRKAMQIQEQKLNEAIDELQTQALLKMPADSQQNGVLGLMDTLTRHVDGANQQSLVPAYTFDPVEDFAKVGDNALDAANSSLGQLLAGLAPLGLPRAVSEQPGVELAKYRASLEQYRHAAVRVEQLQNNLDIMGTELRATSLELGKRKVEQRDSEALAARSLLTSVALMALVVGVLAAWLITVQITQPLRQTLAVAARIAKGDLSQVDAVHRRDEMGQLQTSMRQMTLSLRELIGGIDQGVGQLSQAATQLAASSEDTKLRINQQREETDQVATAMNQMSATVQEVAQNAEQASLAASNADQQAQLGDRVVAEAIGRIEQLAGQMDHCLAAMQHLAGESQRIGSILDVIKSVSEQTNLLALNAAIEAARAGEAGRGFAVVADEVRGLAQRTSTATEEIGQLIDSLHNGTDEVTRLLDSSKSLTEQSVELSRKAGQALGQITDTVSSIQGMNQQIATASEEQSVVAEQINRSVINVRDVSDQTSAASEQTAASSGELEQLGQQLRGMVGRFNI

SEQ ID NO: 99340 - DNA, 1695 bp, Pseudomonas putida GB-1
  CDS (1)..(1695): transl_table=11
atggcagcctttttttggcctgccagtaatggggctgtacagcggcctcagcctacccctctggttccgagaccctcgatgttgcgtaaatccctcagagtgcaaattctctcgctgctcggcggcagcgtggtggcgatgctgctgatcgccctggtgtgtttccagtttctgtcgtccagcgtgcgtggttacgccgagttggtggacgggccgctgcgggcctcgcaattgattgacgaagccaacctgcagttcaagatccaggtgcaggaatggaagaacgtgctgctgcgcgggcgccaaccggcagagatggacaagtactggcagcagttccaggcccgcgagcagcaggtgcaacaattgctcgggcaactaatcgacagcagcgacgccaggctcaaggagccactacagcaattgcgcgacagccaccgccagctgggccaggcctatgcgcaggggcggcaggccttccttgccgcaggtggcgacccggtagcaggcgaccaggcggtgaagggcgtggatcgcgccgccagtgagcagatgagccaactggtcgagcaactgcgtgccgatgcccgccagcgtgcgatgagcatcagcgccagcgccgagcgcacggtatggctgggcctgctggtgatgctggcttctgcggtgctggtggggctgcttagcctgtggttggtcaatcgcagcctgatcgagccgatccgccagttgatcgagtatgttgcgcaactcagccaaggccgctttgccgcccgggtcgacagccgccgtgaggacgaactggggcggctggcgcgggcggccaacaccctgcgcgatttcctggccgacacggttggccggttgcaggacaacgcgcaggagctggaaggcgccagtggccagttgcgcagtattgccggcgacatggctcgcggtactcatgaccagttccagcgtaccgaccaggtggcgacggccatgcacgagatgtccgccaccgcacaggaggtggctcgccacgccgccgaggcagcccgtgcagcggatgacgccgaccacagcgcccaggcgggcgagcaggtgatgcagcagaccatcgacatcatcggtgtggtcaaccgtgaaatcgctggcacggcgtcggtgatccgcgatctggagcatgacagcacgcgcattggcaaagtgctggaagtgattcgtggcattgccgagcaaaccaacctgctggcgctcaacgcggccatcgaggcggcccgtgctggtgaagccgggcgcggctttgcggtggtcgccgatgaggtgcgcagcctggcccagcgcacggcggcgtcgattgccgaaatcaaccagatcatcgaagcggtacagtctggggcggtggaggcggtgaaggccatcgaaagcggccagcagcgaagccaggaaggggctgaacaggtcgagcaggccgggcagatgctgcaacgtatcacccaggctgtggaggcgatacgcgatatgaaccggcagatcgccacagcagctgaagagcagaccagcgtagccgacgatatctcgcgcaacctgatcgagattacccgcattgccacggccaaccaggaagcggtgcagcataccgagcaggcggggcatcgcctgcatggtttgtcggggcaactgggcgaagtcacctcgcgcctgagcgcctga

SEQ ID NO: 99341 - protein, 564 aa, Pseudomonas putida GB-1
MAAFFWPASNGAVQRPQPTPLVPRPSMLRKSLRVQILSLLGGSVVAMLLIALVCFQFLSSSVRGYAELVDGPLRASQLIDEANLQFKIQVQEWKNVLLRGRQPAEMDKYWQQFQAREQQVQQLLGQLIDSSDARLKEPLQQLRDSHRQLGQAYAQGRQAFLAAGGDPVAGDQAVKGVDRAASEQMSQLVEQLRADARQRAMSISASAERTVWLGLLVMLASAVLVGLLSLWLVNRSLIEPIRQLIEYVAQLSQGRFAARVDSRREDELGRLARAANTLRDFLADTVGRLQDNAQELEGASGQLRSIAGDMARGTHDQFQRTDQVATAMHEMSATAQEVARHAAEAARAADDADHSAQAGEQVMQQTIDIIGVVNREIAGTASVIRDLEHDSTRIGKVLEVIRGIAEQTNLLALNAAIEAARAGEAGRGFAVVADEVRSLAQRTAASIAEINQIIEAVQSGAVEAVKAIESGQQRSQEGAEQVEQAGQMLQRITQAVEAIRDMNRQIATAAEEQTSVADDISRNLIEITRIATANQEAVQHTEQAGHRLHGLSGQLGEVTSRLSA

SEQ ID NO: 99342 - DNA, 1920 bp, Pseudomonas putida GB-1
  CDS (1)..(1920): transl_table=11
atgaacagctggttcgccaacatcagcgtcaacctcaaactcggcctgggcttcggccttgtgctggtcctcactggcctgctggccctcaccggctggaccagcctgggcagcctgatcgaccgcagcaactggatgggcgatatcggccagttgaacaaggatctcactgacctgcgcattgcgcgcctgcagtacatgatcgccaacggcgacgatactgccgccgccaacacccaggccaagctggacgccttcagcaagcagcaagcctacctggccaccacgttcaaaagcccggaaaacatcaagctgctgggtgagctgggcgacaccatcagcgcctacaagctttcgctgaacaagatgcgccagggctacgacgccacccgcagcgcacgcgttaccatggacagctcggccacccgtgccgaccaggccatggacgccctcagccaggaagtgatggcacgccccgaggcggacagcgtgcgcctggcccagtaccaactgatcagcaaggcccgccagcaactgctgcaggtacgcatcgatgtgcgcggctacatcgccgacaacagcagcgccaacgagcaggccgccctgcgccagctggatgcagcgctggccgacatcgacaacctcaagcgccagctgcccgccgaagacgcccgcctgcaacagttcgaaagctcggtactggcttaccgtgacgccgtgcgccagttccgcgatgcggtcgccaacatcaccacctcacgtgccgaaatgactgtgcagggcgccgatatcgtcaagcgaagcgatgcgctgtaccagatccagctgcagcgccgtgacatcgagagcacccaggcccgcagcctgcaggccatcgcaacgttgctggcgctgctggtcggtgtgctggcagcggtgctgatcacccgccagatcactcgcccgttgcacgacaccctggtggccgtggagcagatcgccagcggcgaccttacccagcacatgcgcgtcacccgccgcgacgaactgggcgtactgcagcaaggcatcgcgcgaatgggcactaccttgcgcgaacttatcagtggcatccgcgatggcgtcacccaaatcgccagcgccgccgaagagctgtcggcagtaaccgaacagaccagcgccggcgccaacagccagaaggtcgagaccgaccaggtagccaccgccatgcacgaaatggccgccaccgttcaggaagtggcgcgcaatgccgagcaggcctcgcatgccgcaaccggtgccgatgacgaagcccgcgccggtgaccgcgtggtgggcgaggcgattggccagatcgagcgcctggccgaagacatgcaccgctccaccgaggccatgaccctgttgcagcaggaaagccagaagatcggtagcgtgatggacgtgatcaagtcagtggccgaacagaccaacctgctggcactcaacgcggcgatcgaggcggcgcgcgccggcgaggccgggcgtggctttgccgtggtcgccgacgaagtgcgcggcctggcccaacgcacgcagaagtccaccgaagagatcgaagagctgattgccagcctgcagcagggtacccagcaagtggccagtgccatgcagggcagccgtagcttgaccgacagcagcgtcgaactggcgcgcaaggccggggcttcgctggagagcatcaccagcacggtgtcgagcattcagtcgatgaaccagcagattgccgcggcggcagagcagcagagtgcggtggctgaagagatcagccgcagcattctgaatgtacgtgatgtgtcggagcagacggcggcggccagtgacgagacggcgtcggcgagcgttgagctggcgcggttgggtgggcagttgcagacactggtcagccagttccgcgtctga

SEQ ID NO: 99343 - protein, 639 aa, Pseudomonas putida GB-1
MNSWFANISVNLKLGLGFGLVLVLTGLLALTGWTSLGSLIDRSNWMGDIGQLNKDLTDLRIARLQYMIANGDDTAAANTQAKLDAFSKQQAYLATTFKSPENIKLLGELGDTISAYKLSLNKMRQGYDATRSARVTMDSSATRADQAMDALSQEVMARPEADSVRLAQYQLISKARQQLLQVRIDVRGYIADNSSANEQAALRQLDAALADIDNLKRQLPAEDARLQQFESSVLAYRDAVRQFRDAVANITTSRAEMTVQGADIVKRSDALYQIQLQRRDIESTQARSLQAIATLLALLVGVLAAVLITRQITRPLHDTLVAVEQIASGDLTQHMRVTRRDELGVLQQGIARMGTTLRELISGIRDGVTQIASAAEELSAVTEQTSAGANSQKVETDQVATAMHEMAATVQEVARNAEQASHAATGADDEARAGDRVVGEAIGQIERLAEDMHRSTEAMTLLQQESQKIGSVMDVIKSVAEQTNLLALNAAIEAARAGEAGRGFAVVADEVRGLAQRTQKSTEEIEELIASLQQGTQQVASAMQGSRSLTDSSVELARKAGASLESITSTVSSIQSMNQQIAAAAEQQSAVAEEISRSILNVRDVSEQTAAASDETASASVELARLGGQLQTLVSQFRV

SEQ ID NO: 99344 - DNA, 2013 bp, Burkholderia glumae
  CDS (1)..(2013): transl_table=11
atgctgcagaactggtcgattcgcacgacgctgactgcggtcagtctctcgttcgtgctactcaccgccgtggtcggcgggctcggcctcgtcgcgctcaagcatacgggcagcgcgctcgacgagatcgtgggcggcgacatgccggccatccaggcgctcagcgacacctcgtcctatctgctgcgcacgcgcgtcgcgctggatcgcgtccgcgcgctgacggaggcgggcaatgtcgaggaaacccagagcgcgctcaatcgcgcctcggagctgtacgacacctcggcgaagaactggcaggcattccaggacgcgaagaaggtgggcgtggacagcgccatggctgacgaactcgccacgcgtcacagcgcgctcacggccgcggtcgatgccgagttcgccgccatcaagggttccgacatcgccgcctaccatgcgatcgccgactcgcagatcagccccatgttcgtggcctacgacagcgccgtggcgtcggtactcggcgcgctcggcaagcgcgtggcctcgcaccgcgagaacatccagacgcagatcgggctgatgatcagctgcatcgcggtcggcatcggcctggccgtgctgatggtgttcggcgtgcgcgtcacgctgcgccggctgatcgtcgggccgctcgagcgcgccatcgaccagttcgagcggatcgcctcgggcgacctgtccgggcaggtgcgcgagcacggcaccaacgaggtcggacgcctgttcgccggcatcggccggatgcagacggcgatgatcgagatggtgaagtcggtgcaccgcggtgccgagtcgatcgacgtcggcgcgcacgagatctcgagcggcaacgtggatctctcgcagcgcaccgagcagcaggccgcctcgctgcaggaaaccgcctccagcatggagcagctgacgggcaccgtgcgccagaacgccgagaacgcgcgccaggcgagccagctggccgtcaacgcgtcggacatcgccacgcgcggcggccaggtggtcagcgaagtggtctcgaccatgcaggcgatcacggtcagctcgaacaaggtggtcgacatcatcggcaccatcgaaggcatcgcgttccagaccaatatcctggcgctgaacgcggccgtggaagcggcgcgggccggcgagcagggccgcggcttcgcggtggtggcaggcgaagtgcgctcgctcgcgcagcgcagcgccagcgccgccaaggaaatcaagcagttgatcggcgactcggccgacagcgtcaagagcggctccgagctggtcggccgcgccggcgacacgatggccgagatcgtgcaggcggtgcgccgcgtgaccgacatcatcggcgaaatcagcgccgcgtcgcacgagcagtccaccggcatcgagcagatcaaccgcgcggtcggccagatggacgccgtgacgcagcagaatgcggcgctcgtcgagcaggccgcggccgccgcggcctcgctcgaggaccagacgcgccagctgaagagcgtggtcgcgcgctggcgcgtggagggtggcagcgccgcgctcgcgcaggccgcggccgaaccggtgctgcgcgcgccggctccgcagccggtgcgtccgtcgaagccggccgtgccggtggtgcgtgcggcctccgcgccggcggtcgctgccccggctgcggcgcctgtcccggcggcagtggccgcgcttgccgcgccggcctccggcgcggcgaaagaacccgcgccggccgagcccgttgccagcccggcagtgccggccgaaccggttgccgtcaaggcgccgcgccgccccgcagccggcgccgcccgccgcggcagcacggccgcgccggccggcggtgccgcgaagccggcccacgcgccgcggacggccaagccggccgccgtcggcggtggcgcgctcaagcgtccggcgctcggcagcgagccgaagccggcgctggccgcctcggccggttccgacgacgattgggaaaccttctga

SEQ ID NO: 99345 - protein, 670 aa, Burkholderia glumae
MLQNWSIRTTLTAVSLSFVLLTAVVGGLGLVALKHTGSALDEIVGGDMPAIQALSDTSSYLLRTRVALDRVRALTEAGNVEETQSALNRASELYDTSAKNWQAFQDAKKVGVDSAMADELATRHSALTAAVDAEFAAIKGSDIAAYHAIADSQISPMFVAYDSAVASVLGALGKRVASHRENIQTQIGLMISCIAVGIGLAVLMVFGVRVTLRRLIVGPLERAIDQFERIASGDLSGQVREHGTNEVGRLFAGIGRMQTAMIEMVKSVHRGAESIDVGAHEISSGNVDLSQRTEQQAASLQETASSMEQLTGTVRQNAENARQASQLAVNASDIATRGGQVVSEVVSTMQAITVSSNKVVDIIGTIEGIAFQTNILALNAAVEAARAGEQGRGFAVVAGEVRSLAQRSASAAKEIKQLIGDSADSVKSGSELVGRAGDTMAEIVQAVRRVTDIIGEISAASHEQSTGIEQINRAVGQMDAVTQQNAALVEQAAAAAASLEDQTRQLKSVVARWRVEGGSAALAQAAAEPVLRAPAPQPVRPSKPAVPVVRAASAPAVAAPAAAPVPAAVAALAAPASGAAKEPAPAEPVASPAVPAEPVAVKAPRRPAAGAARRGSTAAPAGGAAKPAHAPRTAKPAAVGGGALKRPALGSEPKPALAASAGSDDDWETF

SEQ ID NO: 99346 - DNA, 1800 bp, Acidovorax avenae subsp
  CDS (1)..(1800)
atggtcgcccgcacccgttccctgaccgtttcccagcgcctgctcatcgctttcggcctggtgatcgccatcttcatcgccgtggccaccagcgcgctcgtcaccagccgcagcctcgcggaagcggaatcctggaacgagcacacctaccaggtgctcgaccgctccaacaccctgctcggcagcatggtcaacatggaaaccggcgcccgcggcttcctgctgagcggggatgacaagttcctggagccctggaccaccggcacccaggaattcaccaagacgctccccgacatcaaggccctcacggccgacaaccccgtccagcagcgacgcctggatgacatgaaggcccgggagaccgaattcacctccgtgatgtccggtctgatccaggcccgccgtgacgtcacggcaggcagcaagaccatgcaggacttcatcgcgcagttcgcccagggcaaggacaaggccgccatggacggcttccgggcgttgcagaaggaactggaccagacggaatccagcctgctggccgaacgcaaggcgggggtcgaccgcatgcgcggcatcaataccatcgtgatcctggccggatccgcgctggccgtggcactggccatcgcactgggcatctgggtcacccgctccatcacgcgccagctgggcggcgagcccgactatgcgaccggcatcgtgcggcagatcgcgcagggcaacctcgcggtggacgtggaggcccgcgcaggtgaccagtccagcctgctggctggcatgaaggacatgcgcgaccagctggcccgcgtggtcgggcaggtgcggcagagcagcgactccatcgccacgggcagcacgcagatcgccaccggcaacgccgacctgagccagcgcaccgaggaacaggcctccaacctgcagcagacggccgcctccatggagcagctgacggccaccgtgaagaacaacggcgacaccgcccggcaggccacgcaactggcgaactccgccagcgaggtcgccgaacgcggcggcacggtgatgggacaggtcgtgagcaccatgggcgccatcaccgactccagccgccggatctcggacatcatcggcgtcatcgacagcatcgccttccagaccaacatcctggcgctcaatgccgcggtggaggccgcccgcgccggcgagcagggccgcggcttcgcggtggtggcgagcgaagtgcgcagcctcgcgcagcgcagcgccgatgccgccaaggagatcaaggcactcatctccaccagcgtggagaaggtggaagccggcagccagcaggtcgaggaagccggccggaccatgtccgacatcgtcacccaggtcaagcgcgtgaacgacctgatcagcgaaatcagcgccgccacccaggaacaggcccagggcatcggccaggtgagcgacgcggtgagccagctcgaccaggtgacgcagcagaacgccgcactggtcgaggaaagcgccgccgccgcggacagcctgcgggcccaggccggccggctcgtggatgcggtgagccagttccgcctgcaccacgaccagggcctgccagccccggcaccaaccccggtggccgcaccgcgcgccgccgcaacgccggcggcagccggcacactggctgccgcaaaaccggcaccggcccgggtgcctgccgcgccgcgcgctccggccgtggcggcccgccggcccgtgcctgcgtccacgaaggcccccgcgccttcgctggcccaggcgggcagcgcgagcgaggacgactggacgagcttctga

SEQ ID NO: 99347 - protein, 599 aa, Acidovorax avenae subsp
MVARTRSLTVSQRLLIAFGLVIAIFIAVATSALVTSRSLAEAESWNEHTYQVLDRSNTLLGSMVNMETGARGFLLSGDDKFLEPWTTGTQEFTKTLPDIKALTADNPVQQRRLDDMKARETEFTSVMSGLIQARRDVTAGSKTMQDFIAQFAQGKDKAAMDGFRALQKELDQTESSLLAERKAGVDRMRGINTIVILAGSALAVALAIALGIWVTRSITRQLGGEPDYATGIVRQIAQGNLAVDVEARAGDQSSLLAGMKDMRDQLARVVGQVRQSSDSIATGSTQIATGNADLSQRTEEQASNLQQTAASMEQLTATVKNNGDTARQATQLANSASEVAERGGTVMGQVVSTMGAITDSSRRISDIIGVIDSIAFQTNILALNAAVEAARAGEQGRGFAVVASEVRSLAQRSADAAKEIKALISTSVEKVEAGSQQVEEAGRTMSDIVTQVKRVNDLISEISAATQEQAQGIGQVSDAVSQLDQVTQQNAALVEESAAAADSLRAQAGRLVDAVSQFRLHHDQGLPAPAPTPVAAPRAAATPAAAGTLAAAKPAPARVPAAPRAPAVAARRPVPASTKAPAPSLAQAGSASEDDWTSF

SEQ ID NO: 99348 - DNA, 1536 bp, Bordetella pertussis
  CDS (1)..(1536): transl_table=11
atgcttgaaaggatcaaggtccgcaccgcgatggtggcggtattcgcgtgcttcctggcggtgctgatgctgtcgggcgccctgacgtggcgcaacgcgggcaggagcgccgccgagatcgaggggctgaaccaggtcgccgtcaaccaggtcgacccgctgttcgaggccagcggcgcggcgcagcgccaggcggccacgcaattccagcgctacgtggacgtgcccaaggagccggccgcggccgagctggccgcgaccctgcagacgcgctggcgcgcctaccagtcggtgctggacgagctggccgccgccgtcgacgccggccaggccgagcccgccctggccgccatgcatcgcgcgcagcaggccgaacatgcattccagcgcgacatggaagcctttctggccagggtacaggcgcacagcgacgaagtgcgcagcggcgccgaggacacccatgtcgtggcccgctggagcgccatcgcgctgaccacgctgggcgtgctgctgaccctggccggctggctgttcgtgcgccgcgcggtgctgcgccccttgctggaggccggccatcatttcgaccgcatcgccgacggcgacctcaccgcgcgcatcgaggtgcgctcggccaatgaaatcggcgcgctgttcgcggcgctcaagcgcatgcaggaaggcctgacgcgcaccatcgccgtcatgcggcgcggcgtcgacgaaatcaacgtcggcgcggccgagatctcggccggcaacgccaacctgtccagccgcacggaggagcaggccgccgccctggaagagaccgcggccaccatggaggaactggccaccacggtcaagcagaacgccgacaatgccgcgcaggccaatcagctggccgccgtcagcatgcaggtggcgcagcgcggcggcgagtcggtcgcgcaggtggtgcagaccatgcacggcatctccgcgagctcgcgccagatcgccgacatcgtcaccgtgatcgacggcatcgccttccagaccaatatcctggcgctgaacgccgcggtcgaggcggcgcgcgccggcgaacagggcaagggcttcgcggtggtggcgggcgaggtgcgcagcctggcccagcgcgccgcgcaggcggccaaggagatcaaggccctgatcgagagctcggtggcgacggtgcgcgccggctcgcaacaggtcgccagcgccggcggcaccatggacgaggtggtggcctcggtacagcgcgtggccgacatcatgggggagatctcggccgcctcggcccagcaggccagcggcatcgaccaggtcagcctggcgatttcgcaaatggacgaaaccacccagcagaatgccgcgctggtcgaacaggccgcggcggcggccacggccatggaagaacaggcccgccacctggcggccgcggcggcggtcttcaggacgcagggcggcgccatcatcgacgtcgccgccgcgccgctggccgggccggcgggcggccatgccgccctgccgccggccgcggcccactga

SEQ ID NO: 99349 - protein, 511 aa, Bordetella pertussis
MLERIKVRTAMVAVFACFLAVLMLSGALTWRNAGRSAAEIEGLNQVAVNQVDPLFEASGAAQRQAATQFQRYVDVPKEPAAAELAATLQTRWRAYQSVLDELAAAVDAGQAEPALAAMHRAQQAEHAFQRDMEAFLARVQAHSDEVRSGAEDTHVVARWSAIALTTLGVLLTLAGWLFVRRAVLRPLLEAGHHFDRIADGDLTARIEVRSANEIGALFAALKRMQEGLTRTIAVMRRGVDEINVGAAEISAGNANLSSRTEEQAAALEETAATMEELATTVKQNADNAAQANQLAAVSMQVAQRGGESVAQVVQTMHGISASSRQIADIVTVIDGIAFQTNILALNAAVEAARAGEQGKGFAVVAGEVRSLAQRAAQAAKEIKALIESSVATVRAGSQQVASAGGTMDEVVASVQRVADIMGEISAASAQQASGIDQVSLAISQMDETTQQNAALVEQAAAAATAMEEQARHLAAAAAVFRTQGGAIIDVAAAPLAGPAGGHAALPPAAAH

SEQ ID NO: 99350 - DNA, 1656 bp, Escherichia coli
  CDS (1)..(1656): transl_table=11
atgttaaaacgtatcaaaattgtgaccagcttactgctggttttggccgtttttggccttttacaactgacatcaggcggtctgttctttaatgccttaaagaatgacaaagaaaatttcactgttttacaaaccattcgccagcagcaatccacgctgaatggcagctgggtcgcgttgttgcagacgcgtaacaccctcaaccgcgcgggtatccgctacatgatggatcagaataatattggtagcggttcaaccgttgctgagctgatggagagtgccagtatttcgctgaaacaggcggaaaaaaactgggcggattacgaagcgttgccgcgtgacccgcgtcagagcaccgccgcagcggcagagatcaaacgtaattacgatatttatcacaatgcgctggcggagctgatccaactgttaggtgcaggcaaaatcaacgagttctttgatcagccgacccagggatatcaggacggtttcgagaagcagtatgtggcttacatggagcaaaacgatcggctccatgatatcgccgtcagcgataacaatgcctcctacagccaggcgatgtggattctggtgggcgtgatgatcgtcgtactggcggtcatcttcgccgtctggttcggtattaaagcctcgctggtagcgccaatgaatcgcctgattgacagcattcgtcatattgcaggcggcgatctggtgaaaccgattgaggtggatggctctaatgagatggggcaactggcagagagtttgcgccatatgcagggagagctgatgcgtaccgtcggtgatgtgcgcaacggggccaatgccatctatagcggtgccagcgaaatcgccaccggcaataacgatctctcttcgcgcaccgagcaacaggccgcttcgctggaagagacggcagccagcatggagcaactgaccgcaacggtgaagcagaacgccgaaaatgcgcgccaggccagccatctggcgttaagtgcttctgaaacggcgcaacgcggcggtaaagtggtagataacgtggtgcagactatgcgcgatatctccaccagttcgcagaaaatcgccgatattatcagcgtaattgacggcattgccttccagaccaatattctggctttgaacgcggcggttgaggctgcgcgtgcgggtgagcaagggcgcggttttgcggtggtcgcgggagaagtgcgtaatctggcccagcgcagcgcccaggcggctcgtgaaattaaaagcctgattgaagactcggtggggaaagtggatgttggctctacgctggtcgaaagcgccggggaaacaatggcggagattgtcagcgccgtgacccgcgtgacggacattatgggcgaaattgcttctgcttctgatgagcagagccgtggtatcgatcaggttggcttagcggttgctgagatggaccgggtaactcaacagaacgccgcgctggtggaagagtctgccgctgccgccgccgcgctggaagagcaggccagtcgcctgaccgaagcagtggcagtgttccggattcagcaacagcagcgtgaaacatcggctgtggtaaaaaccgtgacgccagctgcgccgcgtaaaatggccgtggcagatagcgaggagaactgggaaacattttaa

SEQ ID NO: 99351 - protein, 551 aa, Escherichia coli
MLKRIKIVTSLLLVLAVFGLLQLTSGGLFFNALKNDKENFTVLQTIRQQQSTLNGSWVALLQTRNTLNRAGIRYMMDQNNIGSGSTVAELMESASISLKQAEKNWADYEALPRDPRQSTAAAAEIKRNYDIYHNALAELIQLLGAGKINEFFDQPTQGYQDGFEKQYVAYMEQNDRLHDIAVSDNNASYSQAMWILVGVMIVVLAVIFAVWFGIKASLVAPMNRLIDSIRHIAGGDLVKPIEVDGSNEMGQLAESLRHMQGELMRTVGDVRNGANAIYSGASEIATGNNDLSSRTEQQAASLEETAASMEQLTATVKQNAENARQASHLALSASETAQRGGKVVDNVVQTMRDISTSSQKIADIISVIDGIAFQTNILALNAAVEAARAGEQGRGFAVVAGEVRNLAQRSAQAAREIKSLIEDSVGKVDVGSTLVESAGETMAEIVSAVTRVTDIMGEIASASDEQSRGIDQVGLAVAEMDRVTQQNAALVEESAAAAAALEEQASRLTEAVAVFRIQQQQRETSAVVKTVTPAAPRKMAVADSEENWETF

SEQ ID NO: 99352 - DNA, 1662 bp, Salmonella typhimurium
  CDS (1)..(1662): transl_table=11
atgtttaaccgtatccgcgttgtcacaatgctgatgatggtgctgggggttttcgcactgctacagcttgtttccggtggtttgctgttttcttcattacagcataaccagcaaggttttgttatttctaacgaattacgtcagcaacaaagcgaactcacgtcgacatgggacttaatgctgcaaacgcgcattaacctgagccgctccgccgcacgcatgatgatggacgcttctaaccagcagagcagcgccaaaacggatttactccagaatgcaaaaacgactctcgcacaggcggcggcgcactacgccaatttcaaaaatatgacgccattgccagcgatggcggaggccagcgcgaacgtcgatgaaaaatatcagcgctatcaggccgcattagccgaacttattcagtttctggacaatggcaatatggatgcctacttcgcccagccaacccagggaatgcaaaacgcgttgggcgaggcgctgggcaattacgcccgggtgagcgaaaacctgtaccgccagacatttgatcaaagtgctcatgactaccgttttgcgcaatggcaactgggggttcttgcggtcgtgctggtgctgattttgatggtggtttggttcggcattcgtcatgccctgcttaacccattagcgcgagtgattactcatatccgtgaaattgccagcggcgatctgacgaaaacgctcaccgtctcaggacgtaatgaaattggcgaactggcgggaacggttgaacatatgcaacgctcgctgattgacaccgtaacgcaggttcgtgaaggttcggatgcgatttattccggcaccagtgaaattgccgccggtaataccgacctctcttcccgtaccgaacagcaggcctccgctctggaggagacggctgccagcatggaacaactgacggccaccgtgaagcaaaacgccgataacgcccgccaggcttcgcaactggcgcaaagcgcctccgagaccgcgcgtcatggcggcaaagtggtcgacggcgtagtaaacactatgcacgaaattgccgacagttcgaaaaaaatcgctgacattatcagcgttatcgacggtattgccttccagactaacattctggcgctgaacgcggcggtagaagcggcgcgcgcgggagagcaggggcgcggttttgcggtcgtggcaggcgaggtgcgtaatctggccagccgcagcgcccaggcggcgaaagaaataaaagcgttgattgaagattccgtctcgcgtgtcgataccggttctgtgctggtggaaagcgccggggaaaccatgactgacatcgtcaatgccgttacgcgcgtcacggatatcatgggcgaaatcgcctccgcctcggatgagcaaagccggggtatcgatcaggtcgctttggccgtttccgaaatggatcgcgtaacgcaacagaacgcctcgctggttcaggaatccgcagcggccgccgccgcgctggaagagcaggccagccgtctgacccaggcggtatcggctttccgcctggcatcgcgaccgctggcggtaaataaacctgagatgcgtttgtcagtgaacgctcagtccggcaatacgccgcagtcattagccgccagggatgatgcgaactgggaaaccttctga

SEQ ID NO: 99353 - protein, 553 aa, Salmonella typhimurium
MFNRIRVVTMLMMVLGVFALLQLVSGGLLFSSLQHNQQGFVISNELRQQQSELTSTWDLMLQTRINLSRSAARMMMDASNQQSSAKTDLLQNAKTTLAQAAAHYANFKNMTPLPAMAEASANVDEKYQRYQAALAELIQFLDNGNMDAYFAQPTQGMQNALGEALGNYARVSENLYRQTFDQSAHDYRFAQWQLGVLAVVLVLILMVVWFGIRHALLNPLARVITHIREIASGDLTKTLTVSGRNEIGELAGTVEHMQRSLIDTVTQVREGSDAIYSGTSEIAAGNTDLSSRTEQQASALEETAASMEQLTATVKQNADNARQASQLAQSASETARHGGKVVDGVVNTMHEIADSSKKIADIISVIDGIAFQTNILALNAAVEAARAGEQGRGFAVVAGEVRNLASRSAQAAKEIKALIEDSVSRVDTGSVLVESAGETMTDIVNAVTRVTDIMGEIASASDEQSRGIDQVALAVSEMDRVTQQNASLVQESAAAAAALEEQASRLTQAVSAFRLASRPLAVNKPEMRLSVNAQSGNTPQSLAARDDANWETF

SEQ ID NO: 99354 - DNA, 1641 bp, Escherichia coli
  CDS (1)..(1641): transl_table=11
atgaatacaactccctcacagcgattaggttttttgcatcacatcaggttggttccgttatttgcctgcattctaggcggtatcttagttctattcgcattaagttcagccctggctggctatttcctctggcaggccgatcgcgatcagcgtgatgttactgcggagattgagattcggaccgggttagcgaacagttcagattttttgcgttcagcccggatcaatatgattcaggccggggctgcgagtcgtattgcggaaatggaagcaatgaagcgaaatattgcgcaagccgaatcggagattaaacagtcgcagcaaggttatcgtgcttatcagaatcgaccggtgaaaacacctgctgatgaagccctcgacactgaattaaatcaacgctttcaggcttatatcacgggtatgcaacctatgttgaaatatgccaaaaatggcatgtttgaagcgattatcaatcatgaaagtgagcagatccgaccgctggataatgcttataccgatattttgaacaaagccgttaagatacgtagcaccagagccaaccaactggcggaactggcccatcagcgcacccgcctgggtgggatgttcatgattggcgcgtttgtgcttgccctggtcatgacgctgataacatttatggtgctacgtcggatcgtcattcgtccactgcaacatgccgcacaacggattgaaaaaatcgccagtggcgatctgacgatgaatgatgaaccggcgggtcgtaatgaaatcggtcgcttaagtcgtcatttacagcaaatgcagcattcactggggatgacagtagggactgttcgacagggcgcggaagagatttatcgtggcaccagcgaaatttcagctggcaatgcggacctgtcatctcgcaccgaagaacaagcggcggctatcgaacaaactgccgccagcatggagcaactcactgcgacggtgaaacagaatgcggataacgcgcatcatgccagcaaactggcgcaagaggcttctattaaagccagcgatggcgggcagacggtttccggtgtagtaaaaacgatgggcgctatctccacgagttcgaagaaaatttctgagatcaccgccgtcatcaacagtattgctttccagacgaatattctggcactgaatgctgccgttgaagccgcgcgagcgggtgagcaagggcgtggatttgccgttgtcgccagcgaagtacggacactcgcaagtcgcagcgctcaggcggcgaaagagattgaaggcttgatcagtgaatcagtcaggttaattgacctggggtcggatgaggtggcaacggccgggaaaaccatgagcactattgttgatgccgtcgcgagtgtcacacatatcatgcaggaaatcgccgccgcctcggatgaacaaagtagaggcataacgcaggttagccaggcgatttctgaaatggataaggtgacgcaacagaatgcttctctggtagaagaggcctcagcggcggcggtgtcccttgaagaacaggcggcacgattaactgaggcggtggatgtattccgtctgcacaaacattctgtgtcggcagaacctcgcggagcgggtgaaccagttagtttcgctacggtgtga

SEQ ID NO: 99355 - protein, 546 aa, Escherichia coli
MNTTPSQRLGFLHHIRLVPLFACILGGILVLFALSSALAGYFLWQADRDQRDVTAEIEIRTGLANSSDFLRSARINMIQAGAASRIAEMEAMKRNIAQAESEIKQSQQGYRAYQNRPVKTPADEALDTELNQRFQAYITGMQPMLKYAKNGMFEAIINHESEQIRPLDNAYTDILNKAVKIRSTRANQLAELAHQRTRLGGMFMIGAFVLALVMTLITFMVLRRIVIRPLQHAAQRIEKIASGDLTMNDEPAGRNEIGRLSRHLQQMQHSLGMTVGTVRQGAEEIYRGTSEISAGNADLSSRTEEQAAAIEQTAASMEQLTATVKQNADNAHHASKLAQEASIKASDGGQTVSGVVKTMGAISTSSKKISEITAVINSIAFQTNILALNAAVEAARAGEQGRGFAVVASEVRTLASRSAQAAKEIEGLISESVRLIDLGSDEVATAGKTMSTIVDAVASVTHIMQEIAAASDEQSRGITQVSQAISEMDKVTQQNASLVEEASAAAVSLEEQAARLTEAVDVFRLHKHSVSAEPRGAGEPVSFATV

SEQ ID NO: 99356 - DNA, 1602 bp, Escherichia coli
  CDS (1)..(1602): transl_table=11
atgtttaatcgtattcgaatttcgaccacgctgtttttaattttgattctctgcgggatcttgcagattggcagtaacggcatgtctttttgggcatttcgcgacgatttgcaacgactgaatcaggtcgagcagagcaatcagcaacgtgcggcattagcgcaaactcgggcggtaatgttacaggccagtaccgcgctgaacaaagcgggcactctgacggcacttagctatccggcggatgacattaaaacgttgatgacgacggcgcgcgccagtctgacgcaatccaccacgctgtttaaaagttttatggcgatgactgcgggcaacgagcacgtcaggggattgcaaaaagagacggagaaaagttttgcccgctggcacaacgatctcgaacatcaggcgacctggcttgaaagtaatcaactttcggatttcctcactgcgccggtgcagggatcacagaatgcgtttgacgttaactttgaggcctggcagctggagatcaaccatgtgctggaagccgccagtgcgcaaagccagcgtaactatcagatttcggcactggtgtttatcagcatgattattgttgcggcgatctacatcagcagtgcgctgtggtggacgcgcaagatgattgttcaaccactggccattatcggtagccattttgacagcattgctgcgggtaatctggcgcgtccgattgcggtatatggtcgtaatgagatcaccgccatttttgccagtctgaagaccatgcagcaggctttgcgtgggacggtaagtgatgtgcgtaagggaagccaggagatgcacattggtatcgcggagattgtcgcaggcaataacgatctctcaagtcgtaccgaacagcaggcggcatcgctggcacaaacggccgccagtatggagcaattaaccgccacggtagggcaaaacgccgataacgcacgacaggcgtcggaactggcaaaaaatgccgcgacaacggcgcaggcgggcggtgttcaggtcagtaccatgactcacaccatgcaggagatcgccaccagctcgcaaaaaattggcgacattatcagcgttatcgacggaattgctttccagaccaatattctggccctgaatgcggcagtggaagcggctcgcgccggagagcaggggcgtggttttgcggtagtggcaggtgaagtgcgcaatcttgccagccgtagcgcgcaggcagcaaaagagatcaaagggctgatcgaagagtcagtcaatcgtgtccagcagggttcgaaactggtgaataacgccgccgcgaccatgatcgatattgtcagttcggtgacccgcgtgaacgacattatgggagaaattgcctctgcgtcggaagaacaacagcgggggattgagcaggttgcacaggctgtcagccagatggatcaggtgactcagcagaacgcctcgctggtagaagaagcggcggtggcaacggaacaactggcgaatcaggccgaccatctttcgtcgcgtgtggcggtatttacccttgaagaacatgaagtagcacgacatgagtcggtgcagttacaaattgcgccagtggtatcctga

SEQ ID NO: 99357 - protein, 533 aa, Escherichia coli
MFNRIRISTTLFLILILCGILQIGSNGMSFWAFRDDLQRLNQVEQSNQQRAALAQTRAVMLQASTALNKAGTLTALSYPADDIKTLMTTARASLTQSTTLFKSFMAMTAGNEHVRGLQKETEKSFARWHNDLEHQATWLESNQLSDFLTAPVQGSQNAFDVNFEAWQLEINHVLEAASAQSQRNYQISALVFISMIIVAAIYISSALWWTRKMIVQPLAIIGSHFDSIAAGNLARPIAVYGRNEITAIFASLKTMQQALRGTVSDVRKGSQEMHIGIAEIVAGNNDLSSRTEQQAASLAQTAASMEQLTATVGQNADNARQASELAKNAATTAQAGGVQVSTMTHTMQEIATSSQKIGDIISVIDGIAFQTNILALNAAVEAARAGEQGRGFAVVAGEVRNLASRSAQAAKEIKGLIEESVNRVQQGSKLVNNAAATMIDIVSSVTRVNDIMGEIASASEEQQRGIEQVAQAVSQMDQVTQQNASLVEEAAVATEQLANQADHLSSRVAVFTLEEHEVARHESVQLQIAPVVS

SEQ ID NO: 99358 - DNA, 1840 bp, Salmonella typhimurium
  CDS (131)..(1774): transl_table=11
cacgcgaaaattatttattttctattacttatcaaaccattaatcagaaatagcgtgatttgatgtaaggttaatttttatccaaccgatattgatcataccgtctacaaaataaggaatgttaggcactatgaaaaatatcaaagtcatcaccggcgttatcgcgacgctgggcatatttagcgccttattgctggtgacaggaatactgttttattccgccgtcagcagcgatcggctgaatttccagaatgcgagcgcactgagttaccaacaacaggaactgggcggcagttttcagacattgatcgaaacccgcgtcaccattaaccgcgtggcgatacgcatgttaaaaaatcagcgcgatcccgcctcactggacgccatgaacacgctgttaaccaacgctggcgcgtcgctcaacgaagcggaaaaacatttcaacaactacgtgaactccgaagcgatcgcgggcaaagatccggcgttggatgcccaggccgaagccagctttaagcagatgtatgacgttttgcagcagtctatccactatcttaaagccgataattacgccgcctatggcaaccttgacgcgcaaaaagcgcaggatgacatggagcaggtatatgaccagtggctctctcaaaatgcgcaattaataaaattagccagcgatcagaatcagagcagctttacccagatgcaatggacgctggggataattctacttatcgtactcatcgtgctggcgtttatctggctggggctgcaacgcgttctactccgcccgctgcaacggattatggcgcacattcaaacgatcgccgacggcgatcttacccatgagatagaggctgaaggacgcagtgaaatgggccaactggccgccggtctcaaaacgatgcagcagtcgttaatccgtaccgtcagcgcggtgcgcgataacgcagactctatctatactggcgcaggcgaaatttccgccggcagcagcgacctctcttcccgtaccgaacagcaggcctcggcgctggaggagaccgccgccagcatggaacagttaaccgccacggtacggcaaaacaccgataacgcacgacaggcgacgggtctggcgaaaaccgcatcagaaaccgcgcgtaaaggaggacgcgtggtggataacgtagtgagcaccatgaacgatatcgccgaaagctcggaaaaaattgtggacatcaccagcgtgattgacggtatcgccttccagactaatatcctggcgctgaacgccgcggtagaagccgcccgcgccggcgaacaggggcgaggattcgcggtcgtggccggagaggtacgcacgttggccagccgtagcgcgcaggccgccaaagagatcaaagtactgattgaaaactccgtgtcgcgcattgataccggctctacgcaggtacgcgaagcgggagaaaccatgaaagagatcgtcaacgccgtgacccgcgtgaccgatattatgggcgaaatcgcctctgcctccgatgagcaaagcaaaggcattgagcaggtggcgcaggcggtatcggaaatggacagcgtgacgcagcaaaacgcctcgctggtagaagaatccgcagcagcggcggcggcgctggaagatcaggctaacgaacttcgtcaggcggtcgccgcgttccgcatccagaaacagcctcgtcgggaggcgtcgccaacgacgttaagcaaaggtttaacgccacagcccgccgcagaacaggcgaactgggaaagcttctaatcagaatagtatctgccgtgcagttaatgcgctttacgcaataaataacggtacggcagaccctcc

SEQ ID NO: 99359 - protein, 547 aa, Salmonella typhimurium
MKNIKVITGVIATLGIFSALLLVTGILFYSAVSSDRLNFQNASALSYQQQELGGSFQTLIETRVTINRVAIRMLKNQRDPASLDAMNTLLTNAGASLNEAEKHFNNYVNSEAIAGKDPALDAQAEASFKQMYDVLQQSIHYLKADNYAAYGNLDAQKAQDDMEQVYDQWLSQNAQLIKLASDQNQSSFTQMQWTLGIILLIVLIVLAFIWLGLQRVLLRPLQRIMAHIQTIADGDLTHEIEAEGRSEMGQLAAGLKTMQQSLIRTVSAVRDNADSIYTGAGEISAGSSDLSSRTEQQASALEETAASMEQLTATVRQNTDNARQATGLAKTASETARKGGRVVDNVVSTMNDIAESSEKIVDITSVIDGIAFQTNILALNAAVEAARAGEQGRGFAVVAGEVRTLASRSAQAAKEIKVLIENSVSRIDTGSTQVREAGETMKEIVNAVTRVTDIMGEIASASDEQSKGIEQVAQAVSEMDSVTQQNASLVEESAAAAAALEDQANELRQAVAAFRIQKQPRREASPTTLSKGLTPQPAAEQANWESF

SEQ ID NO: 99360 - DNA, 1539 bp, Enterobacter aerogenes
  CDS (1)..(1539): transl_table=11
atgtttaaccgaatccgtatctctaccagtcttttcctgctgctgatctccttttgcatcatgcaactgatcagcaccgggctctcttacgtccggtacgcgccgacaaccacaatcttgaacgtattaccgtcagtagccagcacggatgcgcttagcctgagctgggtatcgctgttacaggcgagaaatacccttaaccgcgccggtacccgcggcgctgaaggtgccgcaggagcaggtggaagtgcgctgatggcggcgcccgcagctcgctgcaaaaagccgatctctattttaaccagttcctcgacacgcctcgcgcggatgagcaggaacagcagttggccgatgccacgcgtgatagctacgagaatctacgcgctgcgcgaactgatcgtgttcctcgaaaatcgcaacctgcaggcctttatggaccagccgacgcagaaaatacaggaccgctttgaggccgactttgtgcaatatctgcagctggcgaaggcgacgaccgatgaagccagcgcctccagccagcaggcctacgcgttggttccaatctggttggttgccggggcggtgctgatgctcttggtagtcaccctcagcgcgatgtggtggctgcgaaccatgctggtgcagccgctgaatattattcgcggccatttcgaacgtatcgccagcggcgatctttccgcaccgattgaggtctatgggcgtaacgaaatcagccagctatttgccagcctgcagcgcatgcaacagtcgctgattggtaccgtcggcgcggtgcgcgacggcgcggagtcgattcttatcggcctgcaggagattgccgaaggcaacaacgatctctcctcgcgcaccgaacaacaggaccgttcgctggaagagaccgccgccagtatggagcagctaacggcgacggtaaaacagaatgccgataacgcccgccaggcatcgcagctggcgcgtgatgcctcctccaccgccgccaaacggacgctggcggatgacgtggtcaccacgatgcacgatatcgccaacagttcgcaaaaaatcggcgcgattaccagcgtcatcgacggcatcgctttccagaccaatattctggcgcttaacgcggcggtggaggcggcgcgcgccggtgaacaggggcgcggctttgcggtggtggccggtgaagtgcgcaacctggccagccgcagcgcccaggcggcaaaagaaatcaagctgctgatcgatgaatccgtcagccgcgtcaaacacggctcggtgctggtggaaaattccggcgccaccatgcaggacatcgtgcgctcggtcacccgggtcaccgacatcatgggcgaaatcgcctccgcctccgatgagcagagccgcggcatcgagcaggtgacgcaggcgttacccagatatcaggtcacgcaacagaacgccgccctggtggtggaatcggcttccgccgccgctgcgctggaagagcaggcgattaccctcgccgatgcagtggcggtattccgtctggcggacgactaa

SEQ ID NO: 99361 - protein, 512 aa, Enterobacter aerogenes
MFNRIRISTSLFLLLISFCIMQLISTGLSYVRYAPTTTILNVLPSVASTDALSLSWVSLLQARNTLNRAGTRGAEGAAGAGGSALMAAPAARCKKPISILTSSSTRLARMSRNSSWPMPRVIATRIYALRELIVFLENRNLQAFMDQPTQKIQDRFEADFVQYLQLAKATTDEASASSQQAYALVPIWLVAGAVLMLLVVTLSAMWWLRTMLVQPLNIIRGHFERIASGDLSAPIEVYGRNEISQLFASLQRMQQSLIGTVGAVRDGAESILIGLQEIAEGNNDLSSRTEQQDRSLEETAASMEQLTATVKQNADNARQASQLARDASSTAAKRTLADDVVTTMHDIANSSQKIGAITSVIDGIAFQTNILALNAAVEAARAGEQGRGFAVVAGEVRNLASRSAQAAKEIKLLIDESVSRVKHGSVLVENSGATMQDIVRSVTRVTDIMGEIASASDEQSRGIEQVTQALPRYQVTQQNAALVVESASAAAALEEQAITLADAVAVFRLADD

SEQ ID NO: 99362 - DNA, 1674 bp, Enterobacter aerogenes
  CDS (1)..(1674): transl_table=11
atgtttaatcgtattaaggtcgtcaccagtctcttattagtgctggtgctatttggcgcattgcagctgatttcaggcggtctgtttttttcgtcgctgaaaggcgataaagagaactttaccgtcctgcaaaccatccgtcagcagcagttgctgctgagtgaaagtcgggtcgatctgctgcaggcgcgtaactccctgaaccgcgcagggatccgctacatgatggataccaacaaaatcggcagcggcgcgactatcgacgagctgctggcgaaagcggaaaaagaaaagctggcgcgcgccgagcgcaactacaccgcctatgaaaaaatcccgcaggacccgcgtcaggatcctcaggcgacggaaaagcttaagcagcagtatggcatcctgtacggcgcgctgtcggagctgatccagctgctgggcggagggtgtaaaatcaacgccttcttcgaccagccgacgcaaaaataccaggacgatttcgagcagacctataacgcctatctgcagcaaaacggcaagctgtatcaaatcgccgttgacgctagcaacagctcgtatagctcggcgatctggaccttaattgtggtcatcatcgtggtgctggcggcgatcgtcggcgtgtggatgggtatccaccatatcctggtgcgcccgctgaaccgcatgatagaacacatcaaacggatcgcgtccggcgatctgacccagcctattccggtgaccagccgtaatgaaatcggcgtgctggccgccagcctcaagcacatgcagaacgagcttatcgaaacggtaagcggcgtgcgtcagggggcggatcgatctattgacggcgcatcggaaagcgccgccgggaataacgatctctcttcgcgcaccgaacagcaggcggcagcgctggaagagaccgccgccagtatggaacagctgacagcgacggtgaaacagaacgccgaaaacgcgcgtcaggccagccagctggcgctgagcgcctccgaaactgcgcagaagggcggcaaagtggtggctaacgtggtcgaaaccatgcacgacatcgccagcagctcgcagaaaattgccgatatcaccggcgttatcgacgtaatcgccttccagaccaacatcctggcgcttaacgccgcggtagaagcggcgcgtgcgggtgaacaaggtcgcgcgttcgcggtcgtggcgggcgaagtccgcaacctggcgcagcgcagcgcccaggcggccaaagagatcaaagcgctgatcgaagactcggtcaaccgtgtggatatgggctcggtactggtggaaagcgccggcgacaccatgggcgatatcgtcaatgcggtcacccgcgtgaccgacatcatgggtgaaatcgcctctgcttccgatgaacagagccgcggtatcgaccaggtcggccaggcggtacgggaaatggatcgcgtcacccagcagaacgcctcgctggtggaggagtcggcctcggccgccgcgctggaagagcaggccagcctgctgacgcagtcggttgccgtcttccgcctgaagtcggaagggcaggaagagtataaagcgccggtcagcaataaaaccgcgcctgccgccatcgctacgcataaaaaaaccagcgccagcgactaccaggataactgggagacgttctaa

SEQ ID NO: 99363 - protein, 557 aa, Enterobacter aerogenes
MFNRIKVVTSLLLVLVLFGALQLISGGLFFSSLKGDKENFTVLQTIRQQQLLLSESRVDLLQARNSLNRAGIRYMMDTNKIGSGATIDELLAKAEKEKLARAERNYTAYEKIPQDPRQDPQATEKLKQQYGILYGALSELIQLLGGGCKINAFFDQPTQKYQDDFEQTYNAYLQQNGKLYQIAVDASNSSYSSAIWTLIVVIIVVLAAIVGVWMGIHHILVRPLNRMIEHIKRIASGDLTQPIPVTSRNEIGVLAASLKHMQNELIETVSGVRQGADRSIDGASESAAGNNDLSSRTEQQAAALEETAASMEQLTATVKQNAENARQASQLALSASETAQKGGKVVANVVETMHDIASSSQKIADITGVIDVIAFQTNILALNAAVEAARAGEQGRAFAVVAGEVRNLAQRSAQAAKEIKALIEDSVNRVDMGSVLVESAGDTMGDIVNAVTRVTDIMGEIASASDEQSRGIDQVGQAVREMDRVTQQNASLVEESASAAALEEQASLLTQSVAVFRLKSEGQEEYKAPVSNKTAPAAIATHKKTSASDYQDNWETF

SEQ ID NO: 99364 - DNA, 24 bp, Artificial sequence
  primer
atgattaaccgtatccgcgtagtc

SEQ ID NO: 99365 - DNA, 27 bp, Artificial sequence
  primer
ttaaaatgtttcccagtttggatcttg

SEQ ID NO: 99366 - protein, 334 aa, Artificial sequence
  consensus sequence
  Variant (2)..(12): Xaa in position 2 to 12 is any amino acid
  Variant (13)..(16): Xaa in position 13 to 16 is any or no amino acid
  Variant (18)..(18): Xaa in position 18 is any amino acid
  Variant (20)..(20): Xaa in position 20 is any amino acid
  Variant (22)..(30): Xaa in position 22 to 30 is any amino acid
  Variant (31)..(38): Xaa in position 31 to 38 is any or no amino acid
  Variant (40)..(41): Xaa in position 40 to 41 is any amino acid
  Variant (42)..(42): Xaa in position 42 is any or no amino acid
  Variant (44)..(49): Xaa in position 44 to 49 is any amino acid
  Variant (52)..(53): Xaa in position 52 to 53 is any amino acid
  Variant (55)..(57): Xaa in position 55 to 57 is any amino acid
  Variant (59)..(60): Xaa in position 59 to 60 is any amino acid
  Variant (63)..(74): Xaa in position 63 to 74 is any amino acid
  Variant (76)..(77): Xaa in position 76 to 77 is any amino acid
  Variant (80)..(80): Xaa in position 80 is any amino acid
  Variant (84)..(84): Xaa in position 84 is any amino acid
  Variant (88)..(88): Xaa in position 88 is any amino acid
  Variant (91)..(92): Xaa in position 91 to 92 is any amino acid
  Variant (94)..(95): Xaa in position 94 to 95 is any amino acid
  Variant (98)..(98): Xaa in position 98 is any amino acid
  Variant (102)..(102): Xaa in position 102 is any amino acid
  Variant (105)..(105): Xaa in position 105 is any amino acid
  Variant (108)..(108): Xaa in position 108 is any amino acid
  Variant (112)..(112): Xaa in position 112 is any amino acid
  Variant (115)..(116): Xaa in position 115 to 116 is any amino acid
  Variant (118)..(119): Xaa in position 118 to 119 is any amino acid
  Variant (122)..(123): Xaa in position 122 to 123 is any amino acid
  Variant (125)..(127): Xaa in position 125 to 127 is any amino acid
  Variant (129)..(130): Xaa in position 129 to 130 is any amino acid
  Variant (132)..(133): Xaa in position 132 to 133 is any amino acid
  Variant (134)..(134): Xaa in position 134 is any or no amino acid
  Variant (136)..(137): Xaa in position 136 to 137 is any amino acid
  Variant (139)..(140): Xaa in position 139 to 140 is any amino acid
  Variant (141)..(154): Xaa in position 141 to 154 is any or no amino acid
  Variant (157)..(158): Xaa in position 157 to 158 is any amino acid
  Variant (160)..(161): Xaa in position 160 to 161 is any amino acid
  Variant (164)..(165): Xaa in position 164 to 165 is any amino acid
  Variant (167)..(168): Xaa in position 167 to 168 is any amino acid
  Variant (170)..(171): Xaa in position 170 to 171 is any amino acid
  Variant (174)..(175): Xaa in position 174 to 175 is any amino acid
  Variant (206)..(206): Xaa in position 206 is any amino acid
  Variant (210)..(210): Xaa in position 210 is any amino acid
  Variant (213)..(213): Xaa in position 213 is any amino acid
  Variant (217)..(217): Xaa in position 217 is any amino acid
  Variant (223)..(224): Xaa in position 223 to 224 is any amino acid
  Variant (227)..(228): Xaa in position 227 to 228 is any amino acid
  Variant (229)..(242): Xaa in position 229 to 242 is any or no amino acid
  Variant (244)..(249): Xaa in position 244 to 249 is any amino acid
  Variant (251)..(253): Xaa in position 251 to 253 is any amino acid
  Variant (255)..(256): Xaa in position 255 to 256 is any amino acid
  Variant (259)..(260): Xaa in position 259 to 260 is any amino acid
  Variant (262)..(270): Xaa in position 262 to 270 is any amino acid
  Variant (272)..(273): Xaa in position 272 to 273 is any amino acid
  Variant (276)..(276): Xaa in position 276 is any amino acid
  Variant (279)..(280): Xaa in position 279 to 280 is any amino acid
  Variant (283)..(283): Xaa in position 283 is any amino acid
  Variant (286)..(287): Xaa in position 286 to 287 is any amino acid
  Variant (290)..(290): Xaa in position 290 is any amino acid
  Variant (293)..(294): Xaa in position 293 to 294 is any amino acid
  Variant (296)..(298): Xaa in position 296 to 298 is any amino acid
  Variant (301)..(302): Xaa in position 301 to 302 is any amino acid
  Variant (308)..(308): Xaa in position 308 is any amino acid
  Variant (312)..(313): Xaa in position 312 to 313 is any amino acid
  Variant (318)..(318): Xaa in position 318 is any amino acid
  Variant (319)..(319): Xaa in position 319 is any or no amino acid
  Variant (321)..(322): Xaa in position 321 to 322 is any amino acid
  Variant (324)..(326): Xaa in position 324 to 326 is any amino acid
  Variant (328)..(330): Xaa in position 328 to 330 is any amino acid
  Variant (332)..(333): Xaa in position 332 to 333 is any amino acid
PXXXXXXXXXXXXXXXAXGXLXXXXXXXXXXXXXXXXXEXXXLXXXXXXMQXXLXXXVXXVRXXXXXXXXXXXXIXXGNXDLSXRTEXQAXXLXXTAXSMEXLTXTVXQNAXNAXXAXXLAXXAXXXAXXGXXXVXXVXXXXXXXXXXXXXXXXTMXXIXXSSXXIXXIXXVIXXIAFQTNILALNAAVEAARAGEQGRGFAVVAXEVRXLAXRSAXAAKEIXXLIXXXXXXXXXXXXXXXXSXXXXXXGXXXVXXAGXXMXXXXXXXXXVXXIMXEIXXASXEQXXGIXQVXXAXXXMDXXTQQNAXLVEXXAAAAXXLXXQXXXLXXXVXXF

SEQ ID NO: 99367 - protein, 57 aa, Artificial sequence
  protein pattern
  Variant (2)..(3): Xaa in position 2 to 3 is any or no amino acid
  Variant (5)..(6): Xaa in position 5 to 6 is any amino acid
  Variant (7)..(7): Xaa in position 7 is any or no amino acid
  Variant (9)..(9): Xaa in position 9 is Asp, Glu or Asn
  Variant (10)..(10): Xaa in position 10 is Gly or Ser
  Variant (34)..(34): Xaa in position 34 is Lys or Arg
  Variant (37)..(37): Xaa in position 37 is Ala or Ser
  Variant (41)..(41): Xaa in position 41 is Ala, Gly or Ser
  Variant (45)..(45): Xaa in position 45 is any amino acid
  Variant (48)..(48): Xaa in position 48 is Gly, Gln or Ser
  Variant (50)..(51): Xaa in position 50 to 51 is Ala or Ser
  Variant (52)..(52): Xaa in position 52 is any amino acid
  Variant (53)..(53): Xaa in position 53 is Ala or Ser
  Variant (55)..(55): Xaa in position 55 is Lys or Arg
IXXIXXXIXXIAFQTNILALNAAVEAARAGEQGXGFXVVAXEVRXLAXRXXXXAXEI

SEQ ID NO: 99368 - protein, 47 aa, Artificial sequence
  protein pattern
  Variant (2)..(7): Xaa in position 2 to 7 is any or no amino acid
  Variant (10)..(10): Xaa in position 10 is any amino acid
  Variant (14)..(14): Xaa in position 14 is Ala, Gly, Gln or Ser
  Variant (15)..(15): Xaa in position 15 is His or Arg
  Variant (17)..(17): Xaa in position 17 is Glu, Gly or Ser
  Variant (18)..(18): Xaa in position 18 is Glu, Gly, Asn, Gln, Ser or Thr
  Variant (20)..(20): Xaa in position 20 is Ala, Asp, Ser or Val
  Variant (21)..(21): Xaa in position 21 is any amino acid
  Variant (22)..(22): Xaa in position 22 is Ala, Asn or Ser
  Variant (23)..(23): Xaa in position 23 is Ile or Leu
  Variant (24)..(24): Xaa in position 24 is Ala, Glu or Gln
  Variant (25)..(25): Xaa in position 25 is any amino acid
  Variant (27)..(28): Xaa in position 27 to 28 is Ala or Ser
  Variant (29)..(29): Xaa in position 29 is Ala, Ser or Thr
  Variant (30)..(30): Xaa in position 30 is Ile or Met
  Variant (32)..(32): Xaa in position 32 is Glu or Gln
  Variant (33)..(33): Xaa in position 33 is Leu or Met
  Variant (34)..(34): Xaa in position 34 is Ala, Gly or Thr
  Variant (35)..(35): Xaa in position 35 is Ala, Gly, Ser or Thr
  Variant (36)..(36): Xaa in position 36 is any amino acid
  Variant (38)..(39): Xaa in position 38 to 39 is any amino acid
  Variant (40)..(40): Xaa in position 40 is Asn or Thr
  Variant (41)..(41): Xaa in position 41 is Ala, Gly, Ser or Thr
  Variant (42)..(42): Xaa in position 42 is Asp, Glu or Gly
  Variant (43)..(43): Xaa in position 43 is any amino acid
  Variant (45)..(46): Xaa in position 45 to 46 is any amino acid
AXXXXXXGNXDLSXXTXXQXXXXXXTXXXXEXXXXXVXXXXXXAXXA

SEQ ID NO: 99369 - protein, 21 aa, Artificial sequence
  protein pattern
  Variant (2)..(2): Xaa in position 2 is Asp or Glu
  Variant (3)..(4): Xaa in position 3 to 4 is any amino acid
  Variant (5)..(5): Xaa in position 5 is Asn, Ser or Thr
  Variant (10)..(10): Xaa in position 10 is Ala or Ser
  Variant (13)..(13): Xaa in position 13 is any or no amino acid
  Variant (15)..(16): Xaa in position 15 to 16 is any amino acid
  Variant (17)..(17): Xaa in position 17 is any or no amino acid
  Variant (19)..(19): Xaa in position 19 is any or no amino acid
  Variant (21)..(21): Xaa in position 21 is Ala or Thr
MXXXXQQNAXLVXEXXXAXAX

SEQ ID NO: 99370 - protein, 19 aa, Artificial sequence
  protein pattern
  Variant (2)..(2): Xaa in position 2 is Ala, Glu, Gly, Asn or Ser
  Variant (3)..(4): Xaa in position 3 to 4 is any amino acid
  Variant (6)..(7): Xaa in position 6 to 7 is any amino acid
  Variant (8)..(8): Xaa in position 8 is Met or Val
  Variant (9)..(11): Xaa in position 9 to 11 is any amino acid
  Variant (13)..(14): Xaa in position 13 to 14 is any amino acid
  Variant (16)..(17): Xaa in position 16 to 17 is any amino acid
  Variant (19)..(19): Xaa in position 19 is Ala or Ser
GXXXVXXXXXXMXXIXXSX

SEQ ID NO: 99371 - DNA, 591 bp, Escherichia coli
  CDS (1)..(591): transl_table=11
atgaacgtggtgatccttgataccggctgcgccaacctgaactcggtgaagtctgccattgcgcgtcacggttatgaacccaaagtcagccgtgacccggacgtcgtgttgctggccgataaactgtttttacccggcgttggcactgcgcaagcggcgatggatcaggtacgtgagcgcgagctgtttgatctcatcaaagcctgtacccaaccggtgctgggcatctgcttagggatgcaactgctggggcggcgcagcgaagagagcaacggcgtcgacttgctgggcatcatcgacgaagacgtgccgaaaatgaccgactttggtctgccactgccacatatgggctggaaccgcgtttacccgcaggcaggcaaccgcctgtttcaggggattgaagacggcgcgtacttttactttgttcacagctacgcaatgccggtcaatccgtggaccatcgcccagtgtaattacggcgaaccgttcaccgcggcggtacaaaaagataacttctacggcgtgcagttccacccggagcgttctggtgccgctggtgctaagttgctgaaaaacttcctggagatgtaa

SEQ ID NO: 99372 - protein, 196 aa, Escherichia coli
MNVVILDTGCANLNSVKSAIARHGYEPKVSRDPDVVLLADKLFLPGVGTAQAAMDQVRERELFDLIKACTQPVLGICLGMQLLGRRSEESNGVDLLGIIDEDVPKMTDFGLPLPHMGWNRVYPQAGNRLFQGIEDGAYFYFVHSYAMPVNPWTIAQCNYGEPFTAAVQKDNFYGVQFHPERSGAAGAKLLKNFLEM

SEQ ID NO: 99373 - DNA, 591 bp, Actinobacillus pleuropneumoniae serovar 1 str. 4074
  CDS (1)..(591): transl_table=11
atgaatttagtcatcatcaacacaggttgtgcaaacctgtcatctgtaaaatttgcattcgatcgcttgggtattcaggcggagattagttgtgatttagacaaaatcaaatcagcggataaattgctgttgcccggagtggggacggctgcggcggcgatgaagattttgcaagatcgcgatttgattgacacgatccgcaacgccactcagccaatgcttggtatttgtttgggtatgcagttaatgactgaattttctgccgaaggcgatgtggacacactcaagctaatgagtggcaaaaccgagttaatccccaatacaggtttgccgttgccacatatgggctggaacaaggttcagtatcaagccgaccacccgttatttcacggcattgagcaaaacagccatttctattttgtacatagctatgcggtgttgccgaatgaaaacaccattgctaccgctgattatggcgtgcctttctcggctgcgattgcgagcaaaaacttctacggcgtacagttccaccccgagcgttcgggcaaaaatggcgcacagttgttgcgaaattttgtggagaatatttaa

SEQ ID NO: 99374 - protein, 196 aa, Actinobacillus pleuropneumoniae serovar 1 str. 4074
MNLVIINTGCANLSSVKFAFDRLGIQAEISCDLDKIKSADKLLLPGVGTAAAAMKILQDRDLIDTIRNATQPMLGICLGMQLMTEFSAEGDVDTLKLMSGKTELIPNTGLPLPHMGWNKVQYQADHPLFHGIEQNSHFYFVHSYAVLPNENTIATADYGVPFSAAIASKNFYGVQFHPERSGKNGAQLLRNFVENI

SEQ ID NO: 99375 - DNA, 1707 bp, Oryza sativa (japonica cultivar-group)
  CDS (1)..(1707)
atggccgccgccacctccatcaacgccgtcccctgctccgctggtcggccgaagcggaggagccagcgccgcggcgcctctacggtcgccgtgcgcgcgtccggcgacgctagcaccgtgacgctgctggactacggcgcgggcaacgtgcgcagcgtgcgcaatgccatccgccacctcggcttcggcatccgcgacgtgcgcagcccggaggacatcctcgccgccgaccgcctcgtcttcccgggggtcggcgccttcggctcagccatggacgtcctcacccgctccgggatggccgacgcgctccgcgagtacatccgcagggaccgccccttcctcggcatctgcctcggcctccagcttctcttcgactctagcgaggagaatggcccgataagcggccttggtgtgatacctggagttgtcaggcgatttgactcttcgaagggtctcattgtgcctcacattggctggaatgctttggagatcaccaaagacacgcagctgctcaagggagctgaaggccaccatgtgtactttgttcactcctatcatgctctgccttcagatgaaaacaaagagtggatttcttctgtgtgcaactatggcgagagtttcatatcatccatctcaatgggcaacattcaggcagttcagtttcacccagaaaagagcggagctactgggctttcaattttgaaaaattttctcagtccaaacacttcaggatcaaaggtcccatctcgtaggaaagcatcgaaccttgcaaagagagtcattgcatgtcttgatgttcggtcaaatgatagtggggatcttgtggtaacaaaaggtgaccagtatgatgtaagagaccatagtagtagcaaagaggtaagaaacctcgggaagccagtggatttagcaagccagtactacatagatggtgctgatgaggttagcttcttgaatataactggtttccgtgactttccgttgggagatttgccaatgctagaggtattacgttgtgcatctgagaaagtatttgtgccacttacagttggtggaggtataagagacttcacagatgcaaatgggagatactactcaagtttggaagtagcgtcagagtacttcaggtctggtgctgacaagatttcaattggtagtgatgccgtttttgctgctgaagcctatttgcagactggtgtaaagacaggaaaaagcagcttggagcaaatctctagagtatatggcaaccaggcagttgttgtaagtattgaccctcgaagagtatatgtcaagaatccggaagaggtgcaattcaaaactgtaaaggtgtccaataaaggtccattaggagaagaatatgcatggtaccagtgcacagtaagtggtgggcgtgacagccgtcctataggagcatatgaactagccaaagcagttgaagaattgggtgctggagaaatacttcttaattgcattgattgtgatggccagggctgcggatttgacatagatctggtaaaaatggtgtcagatgctgtgactatccctgtcattgcaagcagtggtgctggtactgtcgaacatttttctgaggtctttgagaaaacaaatgcttctgctgcccttgctgctggcattttccatcggaaagaggttccgatttcagcagtgaaagagcatctggtagatgctggcgtggaggtcagagtgtag

SEQ ID NO: 99376 - protein, 568 aa, Oryza sativa (japonica cultivar-group)
MAAATSINAVPCSAGRPKRRSQRRGASTVAVRASGDASTVTLLDYGAGNVRSVRNAIRHLGFGIRDVRSPEDILAADRLVFPGVGAFGSAMDVLTRSGMADALREYIRRDRPFLGICLGLQLLFDSSEENGPISGLGVIPGVVRRFDSSKGLIVPHIGWNALEITKDTQLLKGAEGHHVYFVHSYHALPSDENKEWISSVCNYGESFISSISMGNIQAVQFHPEKSGATGLSILKNFLSPNTSGSKVPSRRKASNLAKRVIACLDVRSNDSGDLVVTKGDQYDVRDHSSSKEVRNLGKPVDLASQYYIDGADEVSFLNITGFRDFPLGDLPMLEVLRCASEKVFVPLTVGGGIRDFTDANGRYYSSLEVASEYFRSGADKISIGSDAVFAAEAYLQTGVKTGKSSLEQISRVYGNQAVVVSIDPRRVYVKNPEEVQFKTVKVSNKGPLGEEYAWYQCTVSGGRDSRPIGAYELAKAVEELGAGEILLNCIDCDGQGCGFDIDLVKMVSDAVTIPVIASSGAGTVEHFSEVFEKTNASAALAAGIFHRKEVPISAVKEHLVDAGVEVRV

SEQ ID NO: 99377 - DNA, 666 bp, Agrobacterium tumefaciens str. C58
  CDS (1)..(666): transl_table=11
atggaaggcgctgacatgcgtgtcgcgattatcgactacggttcgggcaatttgcgttcggccaccaaagctttcgagcgtgccgcccgcgaggctggcatcgacgcaaccatcgatctgaccgacaagccggatcacgtcgcttcggcggaccgcatcgtcctgccgggcgtcggtgcctatgcggattgcagtgcgggtctgaatgccatgcccggtatgcacgaggcgctcatcgaagccgtcgagaaaaaagcccatcctttcctcggcatctgcgtcggcatgcagctgatgtcctcgcgcggactggaaaagaccgtcagcaccgggctcggctggatcgaaggtgacgtcgtggaaatgacgccgtccgatcccactcttaaaatcccgcagatcggctggaatacgctggaaatccgccacgcgcacccgctgttcgacggcataaagaccggtgcggatgggctgcacgcctatttcgtgcattcctatcatctggcggccaagcactcgactgacgtcatcgccaccaccaattatggtggcgcgatgacggctttcgtcggccgcgacaacatggcgggcgcgcagttccacccggaaaaaagccagacgctcggccttgccctgatttccaatttcctgcgctggaagccctga

SEQ ID NO: 99378 - protein, 221 aa, Agrobacterium tumefaciens str. C58
MEGADMRVAIIDYGSGNLRSATKAFERAAREAGIDATIDLTDKPDHVASADRIVLPGVGAYADCSAGLNAMPGMHEALIEAVEKKAHPFLGICVGMQLMSSRGLEKTVSTGLGWIEGDVVEMTPSDPTLKIPQIGWNTLEIRHAHPLFDGIKTGADGLHAYFVHSYHLAAKHSTDVIATTNYGGAMTAFVGRDNMAGAQFHPEKSQTLGLALISNFLRWKP

SEQ ID NO: 99379 - DNA, 1668 bp, Magnaporthe grisea 70-15
  CDS (1)..(1668)
atgcccaaagtatacctgctggactatgttgccggcaatgttcgtagcctggtcaacgctatcgaaaaggtcggctttgaagtggaatgggtcaaaactccagaagaggttgccaaggcagataaattgatcctgccaggcgtaggccactttggccactgcctctctcaactttccaaggctggcttcctaccagccatccagaagcacattgccgatggcaagtcctttatgggcatctgtgtcggcatgcaagccattttctctggctcgtcagaagacccggcatgtcccggtctcggcctgatcaaggggtcactggaccgcttcaacgacagcacaaaggccgtacctcacatcggctggaacgatgctaccattactacgaccacacagccaaacagcaacaatgagccatcaacgctccttgaccttcgtccctcctccaagtattactacgtccactcgtataaatacccttatgtccctggcgagcttgaagcgcaggggtggacggtagcaacaggagtttatggcgaggagacgttcgtcggtgcagtcgctcgcggcaacgtcctggttacgcagttccaccccgagaagagtggcgtcgccggcctgcgagtcctccgatccttcctggacccctccggcgctgcctcactaggatcggccgccgtcgcaccacggaaccccgtacccgcaggactgacccgccgcgtgattgcatgcctggacgtacgcaccaacgatgcgggtgacctcgtagtgaccaagggcgaccagtacgacgtccgcgagaagtcatccgaccgtggcgtccgaaacctcggcaagccggtcgacctggccaagaagtactacgaacagggcgccgacgaggtcacgttcctcaacattacctccttccgcgactgccccctagccgacctgcccatgctcgaggtcctccgcctcacgtccgagacggtgtttgtgccgctgacagtcggcggcggcatccgcgacacggtcgacgttgacgggaccaaggtgtctgccctcgacgtcgcgagcatgtacttccgcagcggcgccgacaaggtcagcatcgggtccgacgccgtgaccgccgccgaggagtactacgccgccggcaagaccttgtccggctccaccgccatcgagcagatcagccgcgcgtacggcaaccaggccgtcgtggtgtccgtcgacccgaagcgcgtctacgtggcctcgcccgaagcgacacgtcacgccaccatccaaaccgcgttcccgggccccaacggcgaagcttactgctggtacgcgtgcacggccaagggtgggcgggagacgcgcgatgtcgacgtggtggagctgacacaggccgtagaggccatgggtgccggcgagatcctgctcaactgcatcgacaaggacggcaccaacagcggtttcgacctggagctgatcgcgcaggtcaaggccgccgtcaagatccccgtcatcgccagcagcggagccggcaacccgggacactttgaggaggtgtttgaaaagaccacgactgacgccgcgctcggggctggtatctttcaccgcggagagtacaccgttacgcaggtcaaggatcacctggcgaccaagggattgctggtgagacagttcgagggggagttgtga

SEQ ID NO: 99380 - protein, 555 aa, Magnaporthe grisea 70-15
MPKVYLLDYVAGNVRSLVNAIEKVGFEVEWVKTPEEVAKADKLILPGVGHFGHCLSQLSKAGFLPAIQKHIADGKSFMGICVGMQAIFSGSSEDPACPGLGLIKGSLDRFNDSTKAVPHIGWNDATITTTTQPNSNNEPSTLLDLRPSSKYYYVHSYKYPYVPGELEAQGWTVATGVYGEETFVGAVARGNVLVTQFHPEKSGVAGLRVLRSFLDPSGAASLGSAAVAPRNPVPAGLTRRVIACLDVRTNDAGDLVVTKGDQYDVREKSSDRGVRNLGKPVDLAKKYYEQGADEVTFLNITSFRDCPLADLPMLEVLRLTSETVFVPLTVGGGIRDTVDVDGTKVSALDVASMYFRSGADKVSIGSDAVTAAEEYYAAGKTLSGSTAIEQISRAYGNQAVVVSVDPKRVYVASPEATRHATIQTAFPGPNGEAYCWYACTAKGGRETRDVDVVELTQAVEAMGAGEILLNCIDKDGTNSGFDLELIAQVKAAVKIPVIASSGAGNPGHFEEVFEKTTTDAALGAGIFHRGEYTVTQVKDHLATKGLLVRQFEGEL

SEQ ID NO: 99381 - DNA, 1650 bp, Gibberella zeae PH-1
  CDS (1)..(1650)
atgcccactgttcacctattagattatgttgccggcaacatcaggagtctggtgaatgccattgagaagtgtggctacgaggtcgaatgggtccgatctcctgaggaagttcccaatgcagagaaacttatcctccccggtgtcggccactttggccattgtctttcccagctttctcaagccggctatctagaacctatcaagaaacacattgctgatgggaagccctttttcggtgtttgcgttggcctacaagctcttttccagggttctgtcgaggatcctgacatccccggtctcggagtcgtgccagctactttggatcgatttgacgactcaagtaaatcggtacctcacatcggttggaacaatgccttcacggctgggaaggccatgtacgaccttcagccggactcaaagtattattatgttcattcgtacaagtgcccctacaagccaggagagcttgagtcgcagggatgggctgttgcgactggcacatacggcgccgagactttcgtaggtgccatcgccaagggcaatatctacgcaacccaattccacccagagaagtccggcgccgccggtctaaggacactccgtgcctttctcacgggtgaaggactgaaaaccctcggcaatgtagtcgatgaagctgtcgccaatgctcccatcaagttcgaggacagcctgacacgacgagtcattgcatgcttggatgtgcgaacaaacgaccagggcgatttggttgttaccaagggtgaccagtacgatgtccgcgagaagggtgacgatcgcaacgtgcgtaacctgggcaagcctgttgagatggctaagcgatactacgaatctggggcggacgaggtcacgttccttaacatcacttctttccgggactgcccagtcgccgatctccccatgcttgagatcgttcgtcaaacgtctcgcactgtttttgtgcccctaaccattggtggtggtatccgtgataccgtagacactgatggcacaaaggtttcagcgctcgagattgccaccatgtacttcaagtctggtgctgacaaggtctcgatcgggtctgatgctgttcttgctgccgaagagtactactctctcggtcgtaagctatttggtaacactgccatcgaacagatttcacgggcctatggcaaccaggccgtcgttgtgagcgttgaccccaagcgcgtctacgttcccaagccagatgctacccgacacaacatcgtcaagacacagttccccggtcccaagggtgaggagtactgttggtacgcctgcacgatcaagggcggtcgtgaaactcgggatatggatgtagtcgagcttacacaggctgtcgaggcgatgggaaccggagagattctcctcaactgcattgacaaagacggtactaacagtgggttcgactttgagctcatcaaccaagtcaagggagctgtcaagatccccgtcattgcctcaagtggtgctggcaacccgtctcactttgaagatgtattccaaaagaccccgacagatgccgctttgggtgctggaatgttccaccgcggcgagtacacagtcaagcaagtgaaggattacctacaagaaaagggtctcaaggtgagacagttcgaagagggcttttag

SEQ ID NO: 99382 - protein, 549 aa, Gibberella zeae PH-1
MPTVHLLDYVAGNIRSLVNAIEKCGYEVEWVRSPEEVPNAEKLILPGVGHFGHCLSQLSQAGYLEPIKKHIADGKPFFGVCVGLQALFQGSVEDPDIPGLGVVPATLDRFDDSSKSVPHIGWNNAFTAGKAMYDLQPDSKYYYVHSYKCPYKPGELESQGWAVATGTYGAETFVGAIAKGNIYATQFHPEKSGAAGLRTLRAFLTGEGLKTLGNVVDEAVANAPIKFEDSLTRRVIACLDVRTNDQGDLVVTKGDQYDVREKGDDRNVRNLGKPVEMAKRYYESGADEVTFLNITSFRDCPVADLPMLEIVRQTSRTVFVPLTIGGGIRDTVDTDGTKVSALEIATMYFKSGADKVSIGSDAVLAAEEYYSLGRKLFGNTAIEQISRAYGNQAVVVSVDPKRVYVPKPDATRHNIVKTQFPGPKGEEYCWYACTIKGGRETRDMDVVELTQAVEAMGTGEILLNCIDKDGTNSGFDFELINQVKGAVKIPVIASSGAGNPSHFEDVFQKTPTDAALGAGMFHRGEYTVKQVKDYLQEKGLKVRQFEEGF

SEQ ID NO: 99383 - DNA, 1659 bp, Candida glabrata CBS 138
  CDS (1)..(1659)
atgtctacggtacatgttattgatgttgagagtggtaacttgcagtctctgaccaatgcaattgaatatctagggtttagagtccaattgatcaaggactcccaagatcctgaactgctgaaagcagaaaagttgatactgccaggtgttggtaactatgggcatgtgtatgagaatatattatccagagggtttgagaagcccatcagggaatacatagcttctggcaaaccgatcatgggtatttgtgttggtctacaagttttgtttaatagctctaccgaaagtccctccagcggcgggtttggctatgtgaaccatagactatctcgcttcaatgatgatgaaaagccagttcctgaaattggctggaacagcgtcatcccagaaaaggacttgttctttggcttagatccttacaagagatattatttcgttcactcatatgctggtatactagatgcagcaacagaatcaagcttgaaagctgacggctggaggattgcgaaggctaaatatggttctgaggaatttattgctgcagtttacaaggacaatatatttgctactcagttccaccctgagaaatcaggtttggcaggtttgcatataattgaaaactttctaaaacaggcacatccagggttaccagcttactcagaggatgaaaagtccttgcttggcaatgattactcaaactatggattaacgagaagaattatagcgtgtttggacgtacgtactaatgatcaaggagatctcgttgttacaaagggagaccaatatgatgtcagagagaaaagtggtgacaacgacgtaagaaatcttggtaagccagttcaattggctcaaaaatattatgaacaaggtgccgatgaagtgacatttttaaatattacatcattcagagacagtccggtgaaagataccccaatgcttgaagtgttgagacagactgcgaaaaaggtttttgtcccattaaccgttggtggtggtatcaaggatatcgtcgatccggatggaacccatgttagcgctcttgaagtagcaagtctgtacttcagatcaggtgctgataaagtctctatcgggaccgattctgtttatgctgcagagaaatactatgcgaatgaaggaaaaggggatggtacatcgccaattgaaactatctcaaaagcttacggtgctcaagcagttgtaatttctgttgatcccaagagagtttatgttaacgatccaagtgaaactaaaaacaaaacaataaaaacaaaattccctaatgagaagggacaagatgtatgctggtaccaatgcacaattaaaggtggtagagagagtagagatattggtgtttgggaactagctagagcgtgtgaagcattgggtgctggtgaaattcttctaaattgtattgataaagatggttctaactcaggctatgatcttgaactcatcaaccatgctaaggaagctgtgaaaattcccgttattgcgtcttcgggtgcgggaaaccctgcacattttgaagaaggtttcaagcaatctgctgcagatgcttgtctgggtgcaggtatgttccacagagaagaatacactgtaaatgatgtaaaggaatacttattgaaaaaagggttgaaagttagagtagataaaaactaa

SEQ ID NO: 99384 - protein, 552 aa, Candida glabrata CBS 138
MSTVHVIDVESGNLQSLTNAIEYLGFRVQLIKDSQDPELLKAEKLILPGVGNYGHVYENILSRGFEKPIREYIASGKPIMGICVGLQVLFNSSTESPSSGGFGYVNHRLSRFNDDEKPVPEIGWNSVIPEKDLFFGLDPYKRYYFVHSYAGILDAATESSLKADGWRIAKAKYGSEEFIAAVYKDNIFATQFHPEKSGLAGLHIIENFLKQAHPGLPAYSEDEKSLLGNDYSNYGLTRRIIACLDVRTNDQGDLVVTKGDQYDVREKSGDNDVRNLGKPVQLAQKYYEQGADEVTFLNITSFRDSPVKDTPMLEVLRQTAKKVFVPLTVGGGIKDIVDPDGTHVSALEVASLYFRSGADKVSIGTDSVYAAEKYYANEGKGDGTSPIETISKAYGAQAVVISVDPKRVYVNDPSETKNKTIKTKFPNEKGQDVCWYQCTIKGGRESRDIGVWELARACEALGAGEILLNCIDKDGSNSGYDLELINHAKEAVKIPVIASSGAGNPAHFEEGFKQSAADACLGAGMFHREEYTVNDVKEYLLKKGLKVRVDKN

SEQ ID NO: 99385 - DNA, 1659 bp, Kluyveromyces lactis NRRL Y-1140
  CDS (1)..(1659)
atgacagtcgtgcatattattgatgtggaatctggtaatttgcaatccttgcagaatgctatcaatcatttaggttacgagacaagattaatcaagtctgcttcagatccagagttacaaactgctgaaagaatcatcctgccaggtgtcggtaattttggccattttgtcgataacttaacttctcgtgggtttgagcaacctatcaaagattatattgcatccggaaggccgttgatgggtatttgtgttggcttgcaagcgcttttcgatggatcttctgaatctccttcaagcagagggttaggtttaatcccaggtactttgtccaaatttgatatcagtgaaggtaaaagtgttcccgaaattggatggaataccattattccacaggacgatctttcatttggtttagatccttataaaaggtactacttcgttcattcttttgctatgatcgtcgatgatgtacaacttgatgacttgcatagtaagggatggaaagttgctttgacaagatacggtaacgaaagatttgttgccgccattcacaaggataatgtgttttctacacaattccatccggagaaatctggtaaggccggtctagaaattatagataactttttgaaaggtattcacccagttacagagtacacagatgaacaaaaatctcttttagggaatgactatacaaactttggtttgacaagaagaataattgcttgtctcgatgtccgtacgaatgatcaaggtgatctagtggtaaccaaaggggaccaatacgatgtccgtgaaaaaacagaaggaggcaacgttagaaacttgggaaaacctgtagagctcgcacaacgttactatgaacaaggtgctgatgaagttactttcttaaatatcaccagtttcagaaactgtccattaaaggatactccaatgttggatgtgctaagacttgctgccaagactgtgtttgtaccactgacagtcggaggtggtatcaaagatgtcgtggatgttgacggcacaaaagtaccggctttagatgtggccggcatgtatttcagatctggtgctgataaggtttctattggtacagatgcagtgtttgctgcagaaaagtactatgctaacggagaaaagggtgatggaaaatctccaattgaaacgatttctaaagcttatggtgcacaagcggtggttatttctgtggaccctaaaagagtttatgttaacaataggaacgaaacccctaataaatgtttccaaactttatcgcctaatcctgaggggcaaaattggtgctggtatcaatgtacaatcaagggtggtagagaatccagagacctaggagcctgggaattggctcatgcatgtgaagcccttggtgctggtgagattctcctaaactgtattgataaagacggctcaaactcaggatacgatttggaattaatcgatcatattaaaagtgccgtttcaattcctgttattgcctcatcaggtgcagggaatccaggtcactttgaacaaggatttacaaagacaaaggctgatgcttgtttaggtgcaggtatgttccatagaggagaatacactgttaaccaggtcaaggattacctgatctctaaaggtttaaaagtcagaattgataacgagtaa

SEQ ID NO: 99386 - protein, 552 aa, Kluyveromyces lactis NRRL Y-1140
MTVVHIIDVESGNLQSLQNAINHLGYETRLIKSASDPELQTAERIILPGVGNFGHFVDNLTSRGFEQPIKDYIASGRPLMGICVGLQALFDGSSESPSSRGLGLIPGTLSKFDISEGKSVPEIGWNTIIPQDDLSFGLDPYKRYYFVHSFAMIVDDVQLDDLHSKGWKVALTRYGNERFVAAIHKDNVFSTQFHPEKSGKAGLEIIDNFLKGIHPVTEYTDEQKSLLGNDYTNFGLTRRIIACLDVRTNDQGDLVVTKGDQYDVREKTEGGNVRNLGKPVELAQRYYEQGADEVTFLNITSFRNCPLKDTPMLDVLRLAAKTVFVPLTVGGGIKDVVDVDGTKVPALDVAGMYFRSGADKVSIGTDAVFAAEKYYANGEKGDGKSPIETISKAYGAQAVVISVDPKRVYVNNRNETPNKCFQTLSPNPEGQNWCWYQCTIKGGRESRDLGAWELAHACEALGAGEILLNCIDKDGSNSGYDLELIDHIKSAVSIPVIASSGAGNPGHFEQGFTKTKADACLGAGMFHRGEYTVNQVKDYLISKGLKVRIDNE

SEQ ID NO: 99387 - DNA, 1773 bp, Debaryomyces hansenii CBS767
  CDS (1)..(1773)
atgaagacagtatacgttatagatgttgagagcggtaatttgcaatccttattcaatgccataaaacgcatagggggttatgatgttaagtttattcatgatgcaaaagaattcgccgactacaatgatagtattgaaaaattaatattcccaggtgtgggtaactatgctcattttatcaagcaattacacgatagagagttagtggatccaattactaagtatatcgagagtggtagggctcttatgggtatttgtgttggattacaagcatttttcgaaagtagtgaagagagtgataattcggaatatcagggtttgggatatttgaaatttggcttatccaaattcaataagtcagatccagtctttactcaaagaaaacaattgaaagcggttccgcatatcggctggaatagtgttaatacaatcaaggctaataataccactctttcgaagacaacgtctttttttggaatcaatacagttaataaatactattttgttcattcatacgcggctatactaaaagatgaacaacaagaaaaggtgatcagcgaagccatttcaaatggctgggatattgcttttgcaagatacggatcagaaatcttcttagcagcggtatcgtataagaacttcttcgccacgcagttccacccagaaaaatctggcgttgctggtttgaaagttatcaaaagcttcttggaaggctcaaggtttagtgaggtcactacatctgatgctcagccggttgataatattgaaaatactttgagtggattaaccagaagaattattgcctgccttgatgttagaagtaatgatgacggagatttggttgtcacgaaaggtgatcaatataatgttcgtgaatcgtccggagattctgatgaaagtaaggtaagaaacttaggaaaacctgttgaattagcaacgagatattacaatcaaggggctgatgaggttacgtttttaaatataacttcattccgtaattcacctttgaaggatttgcccatgttgaaagtcttgagtacagcagcagaaacaatctttgtacctttaacagtaggtggtggaattaaagatttagttgacccaatctctggtgaaaaagtgccagctgccaaggtagccagtttgtattttagatctggtgctgataaagtgagtattggctctgatgctgtcacaatagccgagaattattatgcgaacaacaaacataagacgggaactacttcgattgaaaccatttctgctacctttggtagccaggctgtggttatatctgttgacccaaagcgtaaatacgttctgtccccatctgaaaccacaatggaaaccattcatattcaggatcctctgaagtatggtccagcaggcgagaaatattgctattatcaagtgacttctcaaggtggaagagtaactcacgaattaggtgcgcttgagttatgtcttgcgtgtgaagatttaggtgctggtgaaattttattgaattcaattgatcatgatggttctaataaaggttttaatttggaattattaagacaagttaaagaaaaagcttcaatccctgttatagctagttctggtgctggaaagcctgaacatttccaagaagtttttgacatggattgtggaattgacgctgctttaggagctggtttatttcacagaggtgaatatgaagtcaacgatgttaagagatatttacaaaaagaatgctctatggatgtcaggttagatgacactgtggaattatag

SEQ ID NO: 99388 - protein, 590 aa, Debaryomyces hansenii CBS767
MKTVYVIDVESGNLQSLFNAIKRIGGYDVKFIHDAKEFADYNDSIEKLIFPGVGNYAHFIKQLHDRELVDPITKYIESGRALMGICVGLQAFFESSEESDNSEYQGLGYLKFGLSKFNKSDPVFTQRKQLKAVPHIGWNSVNTIKANNTTLSKTTSFFGINTVNKYYFVHSYAAILKDEQQEKVISEAISNGWDIAFARYGSEIFLAAVSYKNFFATQFHPEKSGVAGLKVIKSFLEGSRFSEVTTSDAQPVDNIENTLSGLTRRIIACLDVRSNDDGDLVVTKGDQYNVRESSGDSDESKVRNLGKPVELATRYYNQGADEVTFLNITSFRNSPLKDLPMLKVLSTAAETIFVPLTVGGGIKDLVDPISGEKVPAAKVASLYFRSGADKVSIGSDAVTIAENYYANNKHKTGTTSIETISATFGSQAVVISVDPKRKYVLSPSETTMETIHIQDPLKYGPAGEKYCYYQVTSQGGRVTHELGALELCLACEDLGAGEILLNSIDHDGSNKGFNLELLRQVKEKASIPVIASSGAGKPEHFQEVFDMDCGIDAALGAGLFHRGEYEVNDVKRYLQKECSMDVRLDDTVEL

SEQ ID NO: 99389 - DNA, 1662 bp, Yarrowia lipolytica CLIB122
  CDS (1)..(1662)
atgccaattatccacgtgatcaacgtcgagtctggcaacctgcggtctctggaaaacgccctcaacgtgctgggatacacggtggagtgggtctctagcccagaccagatcactgactccattgagaagctcattttccccggagttggcaactttggccactttgtgaaggagattgacgcccgaggattcattggccccctcaagaagtacattgagagcaaacggccgttgtttggcatctgtgtgggtctccaggctttttttgagggatccgaggagtccaagactgttgcaggactgggtcttgtgcccggtgttctgagcaagtttgacgataaggacaagagcgtgccccagattggctggaactcggtggatagccgagatttcgccgagcacaagtctctgtacggcatggtgccttcttccaagtactactttgtgcattcgtacgcttgtattctggatgaggccgtcaagaacaagatcgaggctgcaggctgggatattgccacgtcacaatatggtaaccagacatttgtggctgctatttccaaggacaatgttgttgctacccaattccaccccgagaagtctggagcagccggtctgcgtgtgattgacgctttcctcaagggtaagaagtacgtggaggaccctgtaattgctccccagacatcgttcggtctcacaaagcgagtcatcgcctgtctggacgttcgaaccaacgaccagggtgatcttgttgttaccaagggagaccagtatgacgtgcgagagaagactggagagggccacgtacgaaacctcggaaagccagtttccatggccgaaaagtactacaaggacggagccgatgaggtcactttccttaacattacttcgttccgagactgccctgttcaggatcttcccatgctggaggttcttcgacagacttccaagactgtttttgtgcccctgactgtcggaggtggtatccgagacgtaactgactcttctggaaacgtcaccaccgctctacaggttgctacccagtactttatgtctggtgccgacaaggtgagtattggtagtgatgcggtctttgctgccgaggagtactacaagagcggcaagaagctatctggtaagacccccatggagactatttccgccgcatacggagtccaggccgttgttgtttctgtcgaccccaagcgagtctacgttgatgctcccctgaccgacagagtttgcattgagaccaaatacccctctgccgacggaaagaagtactgctggtaccagtgcaccgtcaagggcggacgagaggcccgagatcttggcgttttcgagctcgtccaggcgtgcgaggctctgggagctggagagattctgctcaactgcattgataaggacggaaccaactccggtttcgatcttgagctcatcgaccacgtcaagtctgccgtcaagatccccgtcattgcttcctccggcgctggaaaccccggtcacttcgaggaggtcttccgagagacctctgctgacgcggctcttggagctggtatgttccaccgaggagagtactccgtcaaggatgtcaaggacttcctggagaacaagggcgaggttgtgcgagcctttgagccaattgagctggttcacgttgagtaa

SEQ ID NO: 99390 - protein, 553 aa, Yarrowia lipolytica CLIB122
MPIIHVINVESGNLRSLENALNVLGYTVEWVSSPDQITDSIEKLIFPGVGNFGHFVKEIDARGFIGPLKKYIESKRPLFGICVGLQAFFEGSEESKTVAGLGLVPGVLSKFDDKDKSVPQIGWNSVDSRDFAEHKSLYGMVPSSKYYFVHSYACILDEAVKNKIEAAGWDIATSQYGNQTFVAAISKDNVVATQFHPEKSGAAGLRVIDAFLKGKKYVEDPVIAPQTSFGLTKRVIACLDVRTNDQGDLVVTKGDQYDVREKTGEGHVRNLGKPVSMAEKYYKDGADEVTFLNITSFRDCPVQDLPMLEVLRQTSKTVFVPLTVGGGIRDVTDSSGNVTTALQVATQYFMSGADKVSIGSDAVFAAEEYYKSGKKLSGKTPMETISAAYGVQAVVVSVDPKRVYVDAPLTDRVCIETKYPSADGKKYCWYQCTVKGGREARDLGVFELVQACEALGAGEILLNCIDKDGTNSGFDLELIDHVKSAVKIPVIASSGAGNPGHFEEVFRETSADAALGAGMFHRGEYSVKDVKDFLENKGEVVRAFEPIELVHVE

SEQ ID NO: 99391 - DNA, 1848 bp, Ustilago maydis 521
  CDS (1)..(1848)
atgctctacctgctcgattacggagccggcaatgtgcgcagtctcgccaactcgatcagccagctcggcttcgagttcaaatgggtggagtcgcctcaggatctcgccaaggcggacaagcttctgttccccggtgtgggcgcttttggacctgcaatggagtcgattcgcgaaaaaggatatgcggagccgttgaaagcatacattgcttccggaaagccgtacatgggcatttgcatcggcctgcagacactgtttgaggggtcggacgaagcaccgggcgttgctggtctcggcatcgtccctggaatcgtctcgagcttctcggcgtatgaagaggagcgcaagctcaacaaatcggtcccgcagatgggctggaattccgcacaagtcgtcaagacgcgcaatgacaatggtgatcaggatgcgctcaagtatggcttcccggatcgtgcatcgggcgaaacaagtcactactactttgtacactcgtatcgcgcagcataccagccggacaaacatgcagactgggtgttgacgacaacgcagtatggatccgaggtgtttctgtcgtcgatccagaaggggaatgtgtttgccacccagttccacccggaaaagagcggccgtgctggcctcgaagtgcttcgcgcttggctcagccagcccggcactatggaaatcagcaaagaacggctgctgcttgacgcgcaacaagtggctgttcccgcaccccaagatggcctcacaaaacgcatcgttgcatgcctcgatgtgcgcagcaacgacgatggcgatcttgtcgttaccaaaggcgaatcatacgacgtacgcgaaacgctcgagcacacgccaaccgacgagtcagaagctggttcgtccacagccaccaggcgcaaggtgcgcaacctcggcaaacctgtcgacctcgcactgcgatactacctggaaggtgcagatgaaatcacgtttctcaacatcacctcgttccgttcgtgcgcattgcaggatcaaccgatgctcagcctgctcgaagctgcagctgccaagatctttgttccactcaccatcggcggaggcatcaaggacagtgtcgatccggatggaacgccgagaccggccaaagaggtggctgatgcctacttccgtgctggtgctgacaaagtctcgattggttccgaagcggtgtacgctgtacaagagctgtacgcacgtgcggcgcagaacggatacgagaacgagagcaatccgctccgatttagcgaggcgtgtttgacaggaaacacgggcatcgagaccatcagtaaggcgtacggtgcgcaagcagtggtggtgtcgatcgacccacgtcgtgtctacgtcactgaaggagagcacgtggatccaaaacacgttgcatgtctcgtacagggggtcgctggttccgaagatcatggcaaacgatggtggtatcgatgcaccgttaagggtggacgagaagatcgtgatcttgacgtcatccaactggcacgtggtgtacagcgtctaggtgccggcgaaatcctgctcaactcgatcgaccgcgatggatccaacaagggcttcgatcgccagctcgtcgagctcgtacgtggcagtgtcagcatcccggtgatcgcgtcgtctggcgccggcaccgcccagcactttgtcgacatctttaccgctcaagccgacaaccaaagtaccgtagaagctgccttggccgccggcatcttccaccgcaaacaatgctcgatcgacgacgtcaagtcatcgctgttgcaaaacggtttcaaggtgagaagagaacacgtagccgccggagctggcgccatctcgaaacagtaa

SEQ ID NO: 99392 - protein, 615 aa, Ustilago maydis 521
MLYLLDYGAGNVRSLANSISQLGFEFKWVESPQDLAKADKLLFPGVGAFGPAMESIREKGYAEPLKAYIASGKPYMGICIGLQTLFEGSDEAPGVAGLGIVPGIVSSFSAYEEERKLNKSVPQMGWNSAQVVKTRNDNGDQDALKYGFPDRASGETSHYYFVHSYRAAYQPDKHADWVLTTTQYGSEVFLSSIQKGNVFATQFHPEKSGRAGLEVLRAWLSQPGTMEISKERLLLDAQQVAVPAPQDGLTKRIVACLDVRSNDDGDLVVTKGESYDVRETLEHTPTDESEAGSSTATRRKVRNLGKPVDLALRYYLEGADEITFLNITSFRSCALQDQPMLSLLEAAAAKIFVPLTIGGGIKDSVDPDGTPRPAKEVADAYFRAGADKVSIGSEAVYAVQELYARAAQNGYENESNPLRFSEACLTGNTGIETISKAYGAQAVVVSIDPRRVYVTEGEHVDPKHVACLVQGVAGSEDHGKRWWYRCTVKGGREDRDLDVIQLARGVQRLGAGEILLNSIDRDGSNKGFDRQLVELVRGSVSIPVIASSGAGTAQHFVDIFTAQADNQSTVEAALAAGIFHRKQCSIDDVKSSLLQNGFKVRREHVAAGAGAISKQ

SEQ ID NO: 99393 - DNA, 1860 bp, Cryptococcus neoformans var. neoformans B-3501A
  CDS (1)..(1860)
atggccgccactcaactccccatcctagaggtaggccagccaaaaggtcactctccgcagacaaaacccaagctctatatcctcgactacggagcaggcaacgttcgaagtttggcgaactctataaacaagcttggatacgagtttgaatggatcaaggatgagagcgactttgacaaggctgagaaactcatctttccaggtgttggttcttttgcccaagccaccagctctctccgaacttctggtctccactcccgccttctcaaatacattgcctctgggaaaccctactttggcatctgcatcggtatgcaagtcctcttctcctcttcctccgaatcacccggctctgaaggattgggcgttgtgcccttcgccattactgaattcaaggtggaggacaattacgagggcggtaacggaaggaaaagtgtgcctcacatgggatggaacaaggcttggaaggcgtggaagtctgaaggagatgagaaggggacagagactttgatggtggacgatgattactactttgttcactcctacgccgctctcctccccgacccctctgcctctgctcctcccaatgaagtcgccgatttcgcttacacactctcaagatacggttccgagactttcatctcttctatacggcgtgataatgtctttgccgtgcagttccaccccgaaaagagtggtcctgcaggtctcgacatgttgaaaaggtggctcgatgcccctgtcgacagtctttcgtcttcccccgccaaccctgcttctacctctgtcggcaagacatggcaacccgtcaacccctctcctctccgcgccaagggcaacggtttgaccaaccgtatcgtcgcttgtcttgatgtccgttccaacgatgccggtgacctcgtcgtcaccaagggtgaccagtacgacgtacgtgaaaagtcttctgacaaggctgtcagaaatttgggaaagcctgtcgagttggcccaaagatattatctctccggtgcagatgaagtcgcgttcctcaacatcaccagcttccgatcttctgctctgctcgaccagcctatgctcgacgttgtcagggctgccgcagaaaccgtgtttgtgcctcttaccattggcggtggaatcaaggacactaccgacccggacggtaccttccaccctgctctcgaagtcgccggtgcctacttccgttcaggagctgacaaggtctccattggtagtgaggccgtcatcgcggttgaggagatgcttgaacgtgaagctcgaggtgaacctgccttgactggcaagactggtatcgagaccatctccaaaggttacggacgacaagccgtcgttgtctccattgaccccaaacgagtttacgtcgacacgtctgcccccggctggcttgaatccttccccgccaagcacagagccagcttgatcattggcgacaacgctacctcccgcaccgctcctcaagaaaagggcaaggcttggtggtaccagtgcaccatctctggcggccgtgccgtgcgagatatcgatgtcgtccagcttgctcaaggtgtcgagcgtctcggtgcgggtgagattttgctcaactctgtggacagggacggttccggtcaaggtttcgatcttgatctcgtcaagctcgtgaagaacgcggttggcatccccgtggtttcttcctctggagccggaagtcctgcagactttgaggaggtgttcagggagactggtacggaagcggcattggcggctggtatcttccaccgaggtgaagttggaattgacgaggttaagggatggttggaaggcaaggagatggctgtcaggaagacggctttaccgaccgtatag

SEQ ID NO: 99394 - protein, 619 aa, Cryptococcus neoformans var. neoformans B-3501A
MAATQLPILEVGQPKGHSPQTKPKLYILDYGAGNVRSLANSINKLGYEFEWIKDESDFDKAEKLIFPGVGSFAQATSSLRTSGLHSRLLKYIASGKPYFGICIGMQVLFSSSSESPGSEGLGVVPFAITEFKVEDNYEGGNGRKSVPHMGWNKAWKAWKSEGDEKGTETLMVDDDYYFVHSYAALLPDPSASAPPNEVADFAYTLSRYGSETFISSIRRDNVFAVQFHPEKSGPAGLDMLKRWLDAPVDSLSSSPANPASTSVGKTWQPVNPSPLRAKGNGLTNRIVACLDVRSNDAGDLVVTKGDQYDVREKSSDKAVRNLGKPVELAQRYYLSGADEVAFLNITSFRSSALLDQPMLDVVRAAAETVFVPLTIGGGIKDTTDPDGTFHPALEVAGAYFRSGADKVSIGSEAVIAVEEMLEREARGEPALTGKTGIETISKGYGRQAVVVSIDPKRVYVDTSAPGWLESFPAKHRASLIIGDNATSRTAPQEKGKAWWYQCTISGGRAVRDIDVVQLAQGVERLGAGEILLNSVDRDGSGQGFDLDLVKLVKNAVGIPVVSSSGAGSPADFEEVFRETGTEAALAAGIFHRGEVGIDEVKGWLEGKEMAVRKTALPTV

SEQ ID NO: 99395 - DNA, 1884 bp, Candida albicans SC5314
  CDS (1)..(1884): transl_table=12
atgacgaaaacaatccatatcatcgatgtagaaagtggtaatttacaatcactttcaaatgcaatcaaacgtatcgattctaattatatcattaaattcattcataatgaacaagatttcattgataatgattctcaaattgaaaaattgattttccctggtgttggtaattttggacattttgttaaacaattaaatgaacggaaattaattaatcatttaaaatcatatattaaacaagatcgtccattaatggggatttgtgttggtttacaatcgatttttcatgaatcggaagaaagtccaaatattaaaggattaggattattattagataatgatgataatgatgatgatgatgagaagaagttaaaattatataaatttgataatgatgatgaaaaatttaaaatcaggggcattaaaaaatctgttcctcatattggttggaataatattcatgatataattattaatggcaaacaaacaacgactaaatctttatatggattgaataagattgataaatattattttgttcattcttatgctgcaattattaaaaataataatgatgaaataattgaaaataaattcattaaggatttatcttcaaaaggttgggatttggcaattagtcaatatggatcagaaaaatttatatctgctatatcaaaaaataatttatttgctactcaatttcatccagaaaaatccggaattgttggtttaaaaattattaaaaattttttaaatggtgaaaagaacccaaccccaaccccaaccccaaccccaactccaaacaacctagcccaaggggtagattcttcttctactttggatgttgaaaccaccttaacggggttaactagaagaattattgcatgtcttgatgttagaactaatgatgatggtgatttagtggtcactaaaggtgatcaatataatgttcgagaacaattatcatcatcatcaactaacgaatctgccgaggaggattcttcacaggttcgtaatttaggtaaaccagttgaattagcaacaaaatattataatcaaggagctgatgaaattacatttttaaatatcacatctttccgtaattctcctttaaaagatttacccatgttacaagtattgaaaaaagctgctgaaactatatttgttccattgactgttggtggaggtattaaagatttatatgatccagaaactgggaaaactgttcctgctgttgatgtggctcatttatatttccaatcaggtgctgataaaattagtattggatctgatgccgttaccattgccgaaaattattatgccaataatggggaaattaccggtctttcatcaattgaaaccatttcttccaaatttggtaatcaagcagttgttatatcagttgatcctaaaagaaaatatatcaaagatccaacaactgaaactactactatgcaaacaataaaaatcactgatccttcacaatatggtccaaatggtgaacaatattgttattatcaagtaacttctcaaggtggaaggaaaattcatgaattaggtgcattagaattatgtttagcttgtgaaaaattgggagctggagaaattttattaaattcaatcgatcatgatggttccaataaaggatttaatttacaattattacaacaaattaaatctcaagtttcaatccccgtgattgctagtagtggtgctggtaatcctcaacatttccaacaagtatttgaaatggattgtggaattgatgctgctttaggtgctggtttgtttcatcgtggtgaatataccgttaatcaagtaaagaaatatttacaacaagaagcaaaaatggatgttagattagatgaagatttggagttgtaa

SEQ ID NO: 99396 - protein, 627 aa, Candida albicans SC5314
MTKTIHIIDVESGNLQSLSNAIKRIDSNYIIKFIHNEQDFIDNDSQIEKLIFPGVGNFGHFVKQLNERKLINHLKSYIKQDRPLMGICVGLQSIFHESEESPNIKGLGLLLDNDDNDDDDEKKLKLYKFDNDDEKFKIRGIKKSVPHIGWNNIHDIIINGKQTTTKSLYGLNKIDKYYFVHSYAAIIKNNNDEIIENKFIKDLSSKGWDLAISQYGSEKFISAISKNNLFATQFHPEKSGIVGLKIIKNFLNGEKNPTPTPTPTPTPNNLAQGVDSSSTLDVETTLTGLTRRIIACLDVRTNDDGDLVVTKGDQYNVREQLSSSSTNESAEEDSSQVRNLGKPVELATKYYNQGADEITFLNITSFRNSPLKDLPMLQVLKKAAETIFVPLTVGGGIKDLYDPETGKTVPAVDVAHLYFQSGADKISIGSDAVTIAENYYANNGEITGLSSIETISSKFGNQAVVISVDPKRKYIKDPTTETTTMQTIKITDPSQYGPNGEQYCYYQVTSQGGRKIHELGALELCLACEKLGAGEILLNSIDHDGSNKGFNLQLLQQIKSQVSIPVIASSGAGNPQHFQQVFEMDCGIDAALGAGLFHRGEYTVNQVKKYLQQEAKMDVRLDEDLEL

SEQ ID NO: 99397 - DNA, 654 bp, Prochlorococcus marinus str. NATL1A
  CDS (1)..(654): transl_table=11
atgaaggtaggtataattgattatggagtaggtaacttaagaagtatttctaatgctcttaatgaaataggagctgaaaatatagtatcaagcaataagaaagaattggaagaatgtcagcgactaatacttccaggagttggagcatttaatcatggtgttaattctctgcgagaaagagatctaataaattttataaaaaatcaacattttaataaaatacctatcctaggaatatgcttgggcatgcaacttttaactgaagcaagctatgaatttggtgaaacaaaaggtttagaaattattgaaggcaaagttaaaaagattgaagatatgaacaatctcgaaaaaagtctaagacttcctatcgttggttggtttcacatcaaagaaacaaatattaaggctaagaaaaattattttttagataaagtgctcacaaaaagactaaaaggggcgaaatactattttattcattcttatagtgttaacagtgagtcaaatgatgtaattgctgttactgaacatttacaaactaaaacaacggcggtaattgcaaaaggaaatactattggcactcaattccatccagaaaaaagcgggatctatggtttagaattcttaaaaagctttatatttgcagccctcagctaa

SEQ ID NO: 99398 - protein, 217 aa, Prochlorococcus marinus str. NATL1A
MKVGIIDYGVGNLRSISNALNEIGAENIVSSNKKELEECQRLILPGVGAFNHGVNSLRERDLINFIKNQHFNKIPILGICLGMQLLTEASYEFGETKGLEIIEGKVKKIEDMNNLEKSLRLPIVGWFHIKETNIKAKKNYFLDKVLTKRLKGAKYYFIHSYSVNSESNDVIAVTEHLQTKTTAVIAKGNTIGTQFHPEKSGIYGLEFLKSFIFAALS

SEQ ID NO: 99399 - DNA, 615 bp, Clostridium thermocellum ATCC 27405
  CDS (1)..(615): transl_table=11
ttgatagcggtaatagattatggagtaggtaatttaaaaagcgtggaaaaagcatttcaatttattggttatgatgcaaggacaacttctgataaagaacttattttaaatgcggattctgtggttcttccgggagtgggagcctttgcggatgccatggacagtctttcaaaaagcggaatgattgaagtaatacaaaaggttattgacagcggaaaaccgtttttgggcatttgccttggcatgcagcttttgtttgagtacagtgaagaaggtggacagaataagaagggacttgggatcttaaaaggtgcaatcaaacagcttccctttggcatgaatcttaaggtgcctcatatgggatggaatagtctggagcttaaaaacaagtctttgttgtttgacgggcttccccaaaaaccgtatgtttattttgttcactcttattacctcgacactgatgatgaagacattgtcattgcaaaaaccaactatggtatcaacttctctgttgcggtgcaaaagcaaaatgtttttgctacccagttccatcctgagaaaagcggtgaagttggacttaaaatattaaaaaattttgcgggaatcatattctaa

SEQ ID NO: 99400 - protein, 204 aa, Clostridium thermocellum ATCC 27405
MIAVIDYGVGNLKSVEKAFQFIGYDARTTSDKELILNADSVVLPGVGAFADAMDSLSKSGMIEVIQKVIDSGKPFLGICLGMQLLFEYSEEGGQNKKGLGILKGAIKQLPFGMNLKVPHMGWNSLELKNKSLLFDGLPQKPYVYFVHSYYLDTDDEDIVIAKTNYGINFSVAVQKQNVFATQFHPEKSGEVGLKILKNFAGIIF

SEQ ID NO: 99401 - DNA, 618 bp, Mycobacterium sp. JLS
  CDS (1)..(618): transl_table=11
gtgagcaggaaagtcgtcatcctcgactacggctcgggcaatctgcgctcggcgcagcgcgcggtcgagcgcaccggtgccgaggtcgaggtcaccgccgacgccgacaccgcgctgaacgccgacggtctggtggtgccgggcgtcggggcgttcgaggcatgtatggccggtctgcgcgagatcggcggggagaaggtcatcgccgagcgggtcgccgcggggcgaccggtcctcggcgtgtgcgtgggcatgcagatcctcttcgcgcgcggcgtcgaattcggtgtcgagaccgccggatgcgggcaatggcccggatcggtggtgcggctcgacgcgccggtgatcccgcacatgggctggaacgtcgtcgacgccccggccgggagcgcactgttccgcggaatcgaccccgacacccgcttctacttcgtgcactcctacgccgcgcagcagtgggagggcgacccgtccgcgcgcctcacctgggcgacgcaccacgtcccgttcctcgccgccgtcgaggacggtccgctctcggccacccagttccacccggagaagagcggtgacgcgggcgcggcactgctccgcaactgggtcgaggagctctga

SEQ ID NO: 99402 - protein, 205 aa, Mycobacterium sp. JLS
MSRKVVILDYGSGNLRSAQRAVERTGAEVEVTADADTALNADGLVVPGVGAFEACMAGLREIGGEKVIAERVAAGRPVLGVCVGMQILFARGVEFGVETAGCGQWPGSVVRLDAPVIPHMGWNVVDAPAGSALFRGIDPDTRFYFVHSYAAQQWEGDPSARLTWATHHVPFLAAVEDGPLSATQFHPEKSGDAGAALLRNWVEEL

SEQ ID NO: 99403 - DNA, 639 bp, Herminiimonas arsenicoxydans
  CDS (1)..(639): transl_table=11
atgaacaaaatagtagtagtggattacggcatgggtaatttgcgctcggttgcgcaggccttgcgcaaggtcgcgccggaagcggatgtacgcatttccggcgaattggctgatattcgcgccgccgacaggctggtactgccgggtcagggcgcgattcccgattgcatgcgctcactgcaggagtccggtttgcaggatgcgctgcttgacgctgcgcgcaacaagcccttgttcggcgtgtgtgtcggcgagcaattgatgtttgactggagcgaggaaggcgataccgccggcctcggcttgtttcctggcaaggtggtgaagttccgcctcgacaatcaattgcaggaagatggttcccgcttcaaggtgccgcaaatgggctggaaccgcgtgcatcaatccttgtctcatccgctgtggaacggaattgccgacgacagctacttttatttcgtgcatagttactatgcagtaccggcgcaacgcgcgcatatcgcaggtgaaacatcatatggcgcgttgttttgcagcgcgattgcgcgtgataatatttttgcgacgcagtttcatccggaaaaaagcgccgcagccggtttgcagctgtataaaaatttcgttcactggaatccgtaa

SEQ ID NO: 99404 - protein, 212 aa, Herminiimonas arsenicoxydans
MNKIVVVDYGMGNLRSVAQALRKVAPEADVRISGELADIRAADRLVLPGQGAIPDCMRSLQESGLQDALLDAARNKPLFGVCVGEQLMFDWSEEGDTAGLGLFPGKVVKFRLDNQLQEDGSRFKVPQMGWNRVHQSLSHPLWNGIADDSYFYFVHSYYAVPAQRAHIAGETSYGALFCSAIARDNIFATQFHPEKSAAAGLQLYKNFVHWNP

SEQ ID NO: 99405 - DNA, 642 bp, Burkholderia vietnamiensis G4
  CDS (1)..(642): transl_table=11
atgaaaacttcgattgcgattgtggattatgggatgggcaacctgcgctcggtggcgcaggcgctcaagaaggccgaaccggccgccgacgtggcgatcgtcgacacgccggccgcgattcgcgcggccgaccgcgtcgtgctgcccggccagggcgcgatgcccgactgcatgcgctgcctcggcgaatcgggactgcaggaggcggtgctcgaggcgtcgcgcacgaagccgctgctcggcgtgtgcgtgggcgagcagatgctgttcgactggagcgcggaaggcgacacgaagggcctcggcctgttgccgggcaaggttctgcgcttcgagctcgaaggccggctgcaggacgacggctcgcgcttcaaggtgccgcagatgggctggaaccgcgtgcatcagtcgcgctcgcacccgctgtgggaaggcgtgcccgacgacgcgtatttctacttcgtgcacagctactacgtgagcccggagaacccgcagcacacggtgggcgagacggcctacggcgcgccgtttacgtccgcagtcgcgcgcgacaacatcttcgcgacccaattccatccggagaagagcgcggaggtcggcttgcgtctgtatcgcaacttcgtgcactggcagccgtga

SEQ ID NO: 99406 - protein, 213 aa, Burkholderia vietnamiensis G4
MKTSIAIVDYGMGNLRSVAQALKKAEPAADVAIVDTPAAIRAADRVVLPGQGAMPDCMRCLGESGLQEAVLEASRTKPLLGVCVGEQMLFDWSAEGDTKGLGLLPGKVLRFELEGRLQDDGSRFKVPQMGWNRVHQSRSHPLWEGVPDDAYFYFVHSYYVSPENPQHTVGETAYGAPFTSAVARDNIFATQFHPEKSAEVGLRLYRNFVHWQP

SEQ ID NO: 99407 - DNA, 636 bp, Syntrophus aciditrophicus SB
  CDS (1)..(636): transl_table=11
atgattgcgattattgattatcaggcaggtaatttgaccagtgtgttccgtgcgcttagctttctgaagcaggattgtcagattacccgtgattacaaagtattgtgctctgcttcccatattatttttccgggtgtcggcgccgcgggtgaggccatgtccaatctgaggcaaaccggactggacaaaatcatttttcagcttgttcaggaggggaagcctgttctggggatttgtctcgggacacagatcatctttgactacagtgaagaaaacgacaccccctgtttagggattattcccgggaaagtgatacatttcccggaaaacatgatctgtgatgaacgaaagcttaaaattcctcatatgggatggaattcagtttcgttacgcagaagccatcccgtattcagaggcattccggggcaggcagagttttatttcgtccattcttttttcccaatgccggaacgagaggaaaacattctgggacagacccgctatggcatagagttcccctccgcggttgtggcagacaatgtcatcgccgtacaatttcatccggaaaaaagtggaaagcccggtctggctatattagaaaatttctgcaggtggaagggaacagatgctgagtaa

SEQ ID NO: 99408 - protein, 211 aa, Syntrophus aciditrophicus SB
MIAIIDYQAGNLTSVFRALSFLKQDCQITRDYKVLCSASHIIFPGVGAAGEAMSNLRQTGLDKIIFQLVQEGKPVLGICLGTQIIFDYSEENDTPCLGIIPGKVIHFPENMICDERKLKIPHMGWNSVSLRRSHPVFRGIPGQAEFYFVHSFFPMPEREENILGQTRYGIEFPSAVVADNVIAVQFHPEKSGKPGLAILENFCRWKGTDAE

SEQ ID NO: 99409 - DNA, 633 bp, Frankia sp. CcI3
  CDS (1)..(633): transl_table=11
gtgagcggagacggacccggccggcgtccccgggtggttgtcctggactacggctcgggaaacctgcggtcggccgagcgcgcgctcgcccgagtcggcgccgacgtgacggtgaccgcggatcttgacgtggcccgcggcgcggcgggcctggtcgtaccgggcgtgggcgcctatgcggcctgtatggcaggcatcgacgccgtgggcgccgcgcccgtggtgcgggagcgggtagcggcgggacggcccgtgctcgggatctgcgtcgggatgcaggtgctgtacgagctcggtgacgagcacggggtgcggacggtcgggctcggcgtgatccctggcgaggtccgccggctcgccgccgacatcctgccgcacatgggctggaacactgtggcgccgcccgccggatcgatcctgttcgccggactgcccgcggacacgcggttctactttgtccactcgtacgcggcgaaggccgatccggccgccggggacaccgtgggggagcacggcgagccgttcgccgccgccgtcgaacggggtgcgctcgccgcgacccagttccacccggagaagtccggggatgccggagcgcacctgctggcgaactggctcggcagcctggtctga

SEQ ID NO: 99410 - protein, 210 aa, Frankia sp. CcI3
MSGDGPGRRPRVVVLDYGSGNLRSAERALARVGADVTVTADLDVARGAAGLVVPGVGAYAACMAGIDAVGAAPVVRERVAAGRPVLGICVGMQVLYELGDEHGVRTVGLGVIPGEVRRLAADILPHMGWNTVAPPAGSILFAGLPADTRFYFVHSYAAKADPAAGDTVGEHGEPFAAAVERGALAATQFHPEKSGDAGAHLLANWLGSLV

SEQ ID NO: 99411 - DNA, 630 bp, Novosphingobium aromaticivorans DSM 12444
  CDS (1)..(630): transl_table=11
gtggctgagacgctcgcgctcgtcgactatggcgcgggcaacctgcgctcggttgcaaatgcgctcaaggcggcgggggccgagggcgtcgtggtgaccgccgatcctgcggtcgttcgggccgcagatcgcgtcgttctgcccggcgtaggtgccttcaaggcctgcataggtgctctcaggggcgtttcgggtcttgtcgaggcgatggaggagcgggtgctcgtgggcggtgctccgttcctcggcatttgcgtgggaatgcagctccttgccgaccgcggcgtggaacacggcgtcaccgagggcctcggctggatcggcggagaagtccgcgtgatcgagccggccgatccgtcgatcaaggtgccccacatgggctggaacgacgtcgcgccgatgccccacgaaggcggcgcggaactgatcgagcccggcgaggcctatttcctgcactcgtaccacttcgtcaccgacgccggcgcgcacatcgcggcgatgagcgaccacggtggcgggatcgtcgcggcggtcgcgcgcgacaatatcctgggcgtgcagttccacccggaaaagagccagtcctacggcctttctttgctcgcccgcttcctcgaatggaagccctga

SEQ ID NO: 99412 - protein, 209 aa, Novosphingobium aromaticivorans DSM 12444
MAETLALVDYGAGNLRSVANALKAAGAEGVVVTADPAVVRAADRVVLPGVGAFKACIGALRGVSGLVEAMEERVLVGGAPFLGICVGMQLLADRGVEHGVTEGLGWIGGEVRVIEPADPSIKVPHMGWNDVAPMPHEGGAELIEPGEAYFLHSYHFVTDAGAHIAAMSDHGGGIVAAVARDNILGVQFHPEKSQSYGLSLLARFLEWKP

SEQ ID NO: 99413 - DNA, 678 bp, Saccharophagus degradans 2-40
  CDS (1)..(678): transl_table=11
atgacccaacagcgcattgcagtcatcgattacggtatgggcaacttgcattcggttgccagtgctcttagccacgttgcgcccaccgaagacgtagtggttaccgccgaccccgacattattgccagtgcagatcgcgttatattcccaggtgttggcgccatccgcgattgcatggcggaaatactgcggttagacatcaacaccgttgtggataccgccatacaagccggtaaacccgtattggcaatatgtgtaggtatgcaggcgttaatgaatcgcagcgaagaaaacggcggcgtagattgcttaggtcgtattcccgggcaggttaaatttttctctgctagcccagaatttaaactggccagtgatgaaagcagcccttctggcgagcgcctaaaagtgccgcatatgggttggaaccaagtgcagcaaaccgtcgatcaccccatgtgggacaaaatcgacaacaacagccgcttctactttgtacacagctattatgtagaggtagaaaactccgatgtaattgccggtcgcgcccattacggcttggaatttaccgcatcgctgtttaaagataatttgttcgctgtgcagttccacccagaaaaaagtcaccacagcggcttgcagttgttatctaattttgtgcgttggaacggcgcctcgtag

SEQ ID NO: 99414 - protein, 225 aa, Saccharophagus degradans 2-40
MTQQRIAVIDYGMGNLHSVASALSHVAPTEDVVVTADPDIIASADRVIFPGVGAIRDCMAEILRLDINTVVDTAIQAGKPVLAICVGMQALMNRSEENGGVDCLGRIPGQVKFFSASPEFKLASDESSPSGERLKVPHMGWNQVQQTVDHPMWDKIDNNSRFYFVHSYYVEVENSDVIAGRAHYGLEFTASLFKDNLFAVQFHPEKSHHSGLQLLSNFVRWNGAS

SEQ ID NO: 99415 - DNA, 618 bp, Rubrobacter xylanophilus DSM 9941
  CDS (1)..(618): transl_table=11
ttgagggtcgcggtggtggactacggcgcgggcaacaccctctcggtcacccgcgccctgcagagggccggggcggaggtggagctcaccccggacccggcgcgggtgctcgccgccggggccgtggtgctgccgggggtgggggccttcggggactgcgtgcggaagctcgccgagcgggggctggacgaggcctgccgggagcacgtggggcgcggcggccccctcttgggggtgtgcgtggggctgcaggtgctcttcgagggttcggaggagtcgccgggggcggaggggctcggcctcctgcccgggagggtggtgcggttctccggggaggggttgcgggtgccgcacatgggctggaacaccctccgggtgctcagggggcacccggtcctggaggggctcgacggcgaggccttctacttcgtccactcctaccaccccgagcccgccgagcccgcggacctcttggcgacctcctcctacggcggggagttctgcgccgcggccgggcgggggaacctggtggccgtgcagttccacccggagaagagcagccgggcggggctccgcctctacgagaacttcctgaggtgggcgcgtggggcctcgtga

SEQ ID NO: 99416 - protein, 205 aa, Rubrobacter xylanophilus DSM 9941
MRVAVVDYGAGNTLSVTRALQRAGAEVELTPDPARVLAAGAVVLPGVGAFGDCVRKLAERGLDEACREHVGRGGPLLGVCVGLQVLFEGSEESPGAEGLGLLPGRVVRFSGEGLRVPHMGWNTLRVLRGHPVLEGLDGEAFYFVHSYHPEPAEPADLLATSSYGGEFCAAAGRGNLVAVQFHPEKSSRAGLRLYENFLRWARGAS

SEQ ID NO: 99417 - DNA, 582 bp, Cytophaga hutchinsonii ATCC 33406
  CDS (1)..(582): transl_table=11
atgaaactagcaatagtaaaatacaatgcgggtaatattcaatccgtcatatatgcgttaaatcgtttaggcattgagcctgtattgacagatgatgtagatgaattgagatctgcagataaagtattgtttccgggtcagggtgaagcatctaatgcgatgaattacctgcgcagcaaaggactggatcaggtgattaaagatctgaaacaaccggtgtttggtatttgcatcggtcagcagctattgtgcgaacattcagaagaaaacaatacagattgtttgggaattattcctgctaaagtaaagaagtttcctcctttggataaagtaccccagatcggctggaacacggttacagaattgaaaagccctttgtttaaagggatagcagaagagagctacgtgtattttgtacatagctattatgtagagtcaaatgcgtatcagatagcaacaacaaattacattctcccgtatgcgtgtgccctgcagaaagataatttctacgcggtacagtttcacccggaaaaaagcagcgacgtgggagaacaaatattgaaaaatttcatagagttgtaa

SEQ ID NO: 99418 - protein, 193 aa, Cytophaga hutchinsonii ATCC 33406
MKLAIVKYNAGNIQSVIYALNRLGIEPVLTDDVDELRSADKVLFPGQGEASNAMNYLRSKGLDQVIKDLKQPVFGICIGQQLLCEHSEENNTDCLGIIPAKVKKFPPLDKVPQIGWNTVTELKSPLFKGIAEESYVYFVHSYYVESNAYQIATTNYILPYACALQKDNFYAVQFHPEKSSDVGEQILKNFIEL

SEQ ID NO: 99419 - DNA, 636 bp, Rhodococcus sp. RHA1
  CDS (1)..(636): transl_table=11
atgaccgtctccacgattgccgtcctcgactacggctccggcaacctgcattcggccacccgcgctctggcccggaccggcgcgcgcgtcgaggtcacatccgatcacaaggttgcactcgcggccgacggtctggtcgttcccggcgtcggcgccttcgccgcgtgcatggagggactacgcgcggtccgcggggagcggatcatcggtcagcgtctggccggcggacggccggtcctcgggatctgcgtcggcatgcagatcctcttcgaacgcggagtcgagttcggcgtcgaggcggaaggctgcggcgaatggcccggcaccgtcgaacggctccaggccgacgtgctgccgcacatgggatggaacacggtcgaggcccccgacaacagcacgctgttcgccgggatcgatcccgacacccggttctacttcgtccactcgtatgcggcccagtcctgggacatgccgacaccggagcggctcgcgccccctgccctgacgtgggccgaccacggcggcaagttcctcgccgccgtcgagaacggcgcgctgtccgccacccagttccaccccgagaagtccggtgacgcgggcgcggagctgctccggaactgggttcgcagtctgtga

SEQ ID NO: 99420 - protein, 211 aa, Rhodococcus sp. RHA1
MTVSTIAVLDYGSGNLHSATRALARTGARVEVTSDHKVALAADGLVVPGVGAFAACMEGLRAVRGERIIGQRLAGGRPVLGICVGMQILFERGVEFGVEAEGCGEWPGTVERLQADVLPHMGWNTVEAPDNSTLFAGIDPDTRFYFVHSYAAQSWDMPTPERLAPPALTWADHGGKFLAAVENGALSATQFHPEKSGDAGAELLRNWVRSL

SEQ ID NO: 99421 - DNA, 645 bp, Alkalilimnicola ehrlichei MLHE-1
  CDS (1)..(645): transl_table=11
atgggcctggtggcagtggtggactacggcatgggcaacctgcgttcggtctcgcgcgccctggagtctgccggcggcagcggccgggtgcgcatcacctccgacgctgacgaggtgcgccgggcggaacgggtggtcttcccgggggtgggggccatccgtgactgtatgagcgagctgcagcgcctcgagttggtggaggtgctgcgcgagtcggcccggagcaaacccttcctgggggtctgcctgggcatgcaggcgctgctgagccgcagcgaggagaacgcaggcaccgaggcgctggatatcctgcccggtgaggtgcgccgtttccccgccgatcggcaggacccggagggccgccggctgaaggtgccgcacatggggtggaatcaggtgcaccaggtgcaggaccatccactgtgggcggacatccccgaccgcagctggttttacttcgtgcacagctattacgtggcgccggagcgggataagtgggtggccgggcaaaccgagtacgggttgacatttgccagcgccctcgcccgcggcaatgtcttcgccacccagttccacccggagaagagccagcgcccgggcctgatactgctgggcaacttcctgcgctgggacggcagtgagtaa

SEQ ID NO: 99422 - protein, 214 aa, Alkalilimnicola ehrlichei MLHE-1
MGLVAVVDYGMGNLRSVSRALESAGGSGRVRITSDADEVRRAERVVFPGVGAIRDCMSELQRLELVEVLRESARSKPFLGVCLGMQALLSRSEENAGTEALDILPGEVRRFPADRQDPEGRRLKVPHMGWNQVHQVQDHPLWADIPDRSWFYFVHSYYVAPERDKWVAGQTEYGLTFASALARGNVFATQFHPEKSQRPGLILLGNFLRWDGSE

SEQ ID NO: 99423 - DNA, 651 bp, Rhizobium leguminosarum bv. viciae 3841
  CDS (1)..(651): transl_table=11
atgcgcgtcgcgattatcgactatggctccggtaacctgcgctcggcgaccaaggctttcgagcgtgccgcccacgaagctggcatcgatgcgcatatcgatctcaccgacagggcggaggatgttgccgcagccgatcgtatcgtgcttcccggtgtcggcgcctatgccgattgccggcgcggcctcgatgccgtgcctgatatggccgaggtgctgatcgaggccgtcgagaagaaggcgcggccgttcctcggcatctgcgtcggcatgcagctcatgtcctcgcgcggcctcgagaagaccgtgacgcacggtttcgggtggattcccggtaacgtcgtcgagatgacgccggatgatccggcactcaagatcccgcagatcggctggaacacgctcgacctgaagcgccaacatccgctcttcgaaggaattccgacggggtcgcagggactgcacgcctattttgtgcattcctaccatcttgccgccgaaaacaccgaggatgttattgcgacggccgactatggcggtccgatgaccgctttcgtcgggcgcgacaacatggtcggagcgcagtttcacccggaaaagagccagaagctcggcctggccctgatcgccaattttctgcgctggaacccgtag

SEQ ID NO: 99424 - protein, 216 aa, Rhizobium leguminosarum bv. viciae 3841
MRVAIIDYGSGNLRSATKAFERAAHEAGIDAHIDLTDRAEDVAAADRIVLPGVGAYADCRRGLDAVPDMAEVLIEAVEKKARPFLGICVGMQLMSSRGLEKTVTHGFGWIPGNVVEMTPDDPALKIPQIGWNTLDLKRQHPLFEGIPTGSQGLHAYFVHSYHLAAENTEDVIATADYGGPMTAFVGRDNMVGAQFHPEKSQKLGLALIANFLRWNP

SEQ ID NO: 99425 - DNA, 618 bp, Leuconostoc mesenteroides subsp. mesenteroides ATCC 8293
  CDS (1)..(618): transl_table=11
atggcgattattatcgtagactatggcgcgggtaatattagaaatgtcatgaaagcaattgaatatacaggattaaatgccaaagtttctcaagatcctgccgagattgctgccgctgatggtctggtagtgccaggagttggcgcttttgcctcagcaatggataaacttcgagaacgtaatttggttgaaccaataaaacagttttcaaatagcggtaaaccattgttgggtgtttgcttagggatgcagttactttttgactcatcaactgaatttggtgaaacgagaggtcttgggctaattcccgggcaagtggttgaattacctaaacaagagaattataaagtaccgcaaatgggctggaatcagaacaaagtgagccaaatcaaccaaatcactcgaacaatgaatgataaatatacttactttgtacatagctattatgcggtaacggattcaaaatatattgcggcaactgttaattatggaaaagttgatgtaccaagtgttgtggttaacaaaaatgtgattggtgcccaatttcatccagaaaaatctggacaagatggattagagatttggcaaaactttaaggaaatggtagaaaacgtatga

SEQ ID NO: 99426 - protein, 205 aa, Leuconostoc mesenteroides subsp. mesenteroides ATCC 8293
MAIIIVDYGAGNIRNVMKAIEYTGLNAKVSQDPAEIAAADGLVVPGVGAFASAMDKLRERNLVEPIKQFSNSGKPLLGVCLGMQLLFDSSTEFGETRGLGLIPGQVVELPKQENYKVPQMGWNQNKVSQINQITRTMNDKYTYFVHSYYAVTDSKYIAATVNYGKVDVPSVVVNKNVIGAQFHPEKSGQDGLEIWQNFKEMVENV

SEQ ID NO: 99427 - DNA, 561 bp, Solibacter usitatus Ellin6076
  CDS (1)..(561): transl_table=11
atgatcaccatcctcgattacggcgccggtaacctgcgcagcgtgcaaaacacgttggccgaattgaactgcgagtaccgcctggtcaacgacgctgccggcctgcaatctgcaaccaaaattctcctccccggtgtcggccacttcggccagatgatgcacgcgctcgataccctgagcgtgcgcgaagcgctggtcgatcgtattcgcgccagcgtcccgttcttcggcatctgtctcggcatgcaggcgctcttcgaatccagcgaagaggcccccgaggtccgcggcctcggcctttaccccggcatagtccgccgcttcccgatggatgcgcgtgttccccacatgggttggaatcagctggaacccggcggccgctacgtctacttcgcgcacagttactatgtccccgaaaatcagtacacctccgccgcctgcacttacggcgttcgcttcaccgccatgctgcaagcgggcagcgtacagggcgtccagttccaccccgaaaaatccagcacggtcggcctccagatcgtgaaaggcttcctcgaatgttaa

SEQ ID NO: 99428 - protein, 186 aa, Solibacter usitatus Ellin6076
MITILDYGAGNLRSVQNTLAELNCEYRLVNDAAGLQSATKILLPGVGHFGQMMHALDTLSVREALVDRIRASVPFFGICLGMQALFESSEEAPEVRGLGLYPGIVRRFPMDARVPHMGWNQLEPGGRYVYFAHSYYVPENQYTSAACTYGVRFTAMLQAGSVQGVQFHPEKSSTVGLQIVKGFLEC

SEQ ID NO: 99429 - DNA, 636 bp, Magnetococcus sp. MC-1
  CDS (1)..(636): transl_table=11
atgattaccgttgttgattatggatcgggcaacctgcgttcggtctccaaagcgctggaaaaagtggggggcaatgtggtggtaagcgcccatcccgaagatgtcacccaagcggatcgcttggtgctgcctggggtaggtgcctttgccgactgccgccgcaacctggatcgcgcccaactgaccgaaccggtattggcccacattcgtgcgggcaagccctttttgggcatctgtgttgggatgcagatgttgtttgatgaaagccatgagtttggcgtgcatgagggttttggtttaattcccggcaaggtcgaggcgttttctaaaaaaatgcaggaccctgccgatcttaaacgccatctcaaggtaccccacatgggctggaccccggtgcatcaaacggtcgaacaccccatgtggcagggcattgaggatatggcccatttttattttgtacactcgtttcacggcgtggtggaccaccaagcacaccaactggggcaaaccacctacggcattcctttcacctcggcggtggggcatgacaacatttttgccacccagtttcaccctgaaaagagccaaaacaatggcctcaggttgctggaaaattttgttaactggcagctataa

SEQ ID NO: 99430 - protein, 211 aa, Magnetococcus sp. MC-1
MITVVDYGSGNLRSVSKALEKVGGNVVVSAHPEDVTQADRLVLPGVGAFADCRRNLDRAQLTEPVLAHIRAGKPFLGICVGMQMLFDESHEFGVHEGFGLIPGKVEAFSKKMQDPADLKRHLKVPHMGWTPVHQTVEHPMWQGIEDMAHFYFVHSFHGVVDHQAHQLGQTTYGIPFTSAVGHDNIFATQFHPEKSQNNGLRLLENFVNWQL

SEQ ID NO: 99431 - DNA, 639 bp, Nocardioides sp. JS614
  CDS (1)..(639): transl_table=11
gtgacccgtccgaacgtggtggtcctcgactacggctcggggaacctccgctccgccgtgcgcgcggtcgaacgcgccggcgccgaggtcacgctgaccgccgaccgcgcgctggcccaggaggccgacggcctgctggttccgggcgtgggcgccttcgccgcctgcatggccggcctgcgcgcggtgcgcggccacgaggtgatcggccggcgactcgccggcggccgccccgtcctcggcatctgcgtgggcatgcagatcctcttcgagcgcggggtcgagcacggggtcgagaccgagggctgcggcgagtggcccggcgtggtggagcggctgcaggcgcccgtcgtaccccacatgggttggaacaccgtggacgtggccgctgcatcgaccctgttcgagggtgtcgaggacgagcggttctacttcgtgcactcctacggggtgcgggactggacgctggagaccaacgaccgcacccgggcgccgctggtgcactggacctcgcacggcggggaccggttcgtggccgcggtcgagaacgggccgctcagcgccacccagttccaccccgagaagtccggcgacgccggcgcggcgctgctgcgcaactgggtcgggtccctgtcatga

SEQ ID NO: 99432 - protein, 212 aa, Nocardioides sp. JS614
MTRPNVVVLDYGSGNLRSAVRAVERAGAEVTLTADRALAQEADGLLVPGVGAFAACMAGLRAVRGHEVIGRRLAGGRPVLGICVGMQILFERGVEHGVETEGCGEWPGVVERLQAPVVPHMGWNTVDVAAASTLFEGVEDERFYFVHSYGVRDWTLETNDRTRAPLVHWTSHGGDRFVAAVENGPLSATQFHPEKSGDAGAALLRNWVGSLS

SEQ ID NO: 99433 - DNA, 639 bp, Neisseria meningitidis FAM18
  CDS (1)..(639): transl_table=11
atgcaaaccgccattatcgattacggtatgggcaacctgcattccgtattgaaatccgtccggacggcggggcagcttgccggaaaaaataccgaaatctttttaagcggcgaccccgaccgcgtgtcccgcgccgacaaagtcatttttcccggtcagggcgcgatgcccgactgtattgcggcactgacgcgcggcggcttggacgaggcagtcaaagatgccttaaaaaacaaaccctttttcggaatctgcgtcggcgcgcaacttttattcgaccacagcgaagaaggaaacaccgacggcttgggctggttcggcggcaaagtcagacgctttgagcgcgacctccgcgacccgcagggatgccgtctgaaagtcccgcatatgggctggaacaccgtgcgccaaacccaaaaccacccgctttttcaaggcatcccccaagacacgcgtttttacttcgtccacagctactatttcgcccccgaaaatcccgaaaccatattgggcgaaagcgactacccgtccccgtttgcctgcatcgtcggcaaagacaacgtattcgccacgcaatttcacaccgaaaaaagccacgatgccgggctgacgatgttgaaaaactttttaaactggtaa

SEQ ID NO: 99434 - protein, 212 aa, Neisseria meningitidis FAM18
MQTAIIDYGMGNLHSVLKSVRTAGQLAGKNTEIFLSGDPDRVSRADKVIFPGQGAMPDCIAALTRGGLDEAVKDALKNKPFFGICVGAQLLFDHSEEGNTDGLGWFGGKVRRFERDLRDPQGCRLKVPHMGWNTVRQTQNHPLFQGIPQDTRFYFVHSYYFAPENPETILGESDYPSPFACIVGKDNVFATQFHTEKSHDAGLTMLKNFLNW

SEQ ID NO: 99435 - DNA, 669 bp, Acidovorax sp. JS42
  CDS (1)..(669): transl_table=11
atgaatagtgaagcaaaaaccgtcgcggtcgtggactacggcatgggcaacctgcgctccgtctcgcaggccgtgcaggtcgcggcgcagggcagcggtttccgggtaatggtcaccgcgcaccccgatgaggtacgcgcggccgaccgtgtggtgttgcccggccagggcgccatgccggactgcatgcgcgagttgcgggagtcgggcctgctcgaatccgtgctggaggctgccgcgtccaagccgctgtttggcgtatgtgtgggcatgcagatgctgctggaccacagcgccgagggcgacacccccgggctgggcctgatcccgggcgaggtgctcaagttcgacctggccgggcgcacccagcccgacggcagccgctacaaggtcccccagatgggctggaaccgcgtgcgccaggcgcgccacggcggcgtggcgcacccggtatgggcgggcgtgcccgacgacagctacttctactttgtgcacagcttctacgcgcgcccggccaacccgctgcactgcgccggcgaggctgactacggcggcccctttgctgcggccatcgcacgcgataatatttttgctacccagttccacccggagaaaagcgccgagcacggcctggcgctgtaccgcaacttcttgcactggaagccctga

SEQ ID NO: 99436 - protein, 222 aa, Acidovorax sp. JS42
MNSEAKTVAVVDYGMGNLRSVSQAVQVAAQGSGFRVMVTAHPDEVRAADRVVLPGQGAMPDCMRELRESGLLESVLEAAASKPLFGVCVGMQMLLDHSAEGDTPGLGLIPGEVLKFDLAGRTQPDGSRYKVPQMGWNRVRQARHGGVAHPVWAGVPDDSYFYFVHSFYARPANPLHCAGEADYGGPFAAAIARDNIFATQFHPEKSAEHGLALYRNFLHWKP

SEQ ID NO: 99437 - DNA, 636 bp, Nostoc punctiforme PCC 73102
  CDS (1)..(636): transl_table=11
atgccagtaattgcggtcgtagactacgagatgggaaatttgcactcagtctgtaaagggttggaaaaagctggggcaactcctaatgttacttattctccaaaggaattagagcaggcagatgcaatagttctgccaggagtgggagcatttgatccagcagtacaacacctgcgagcgcgtggtttggaacaacctattaaagatgcgatcgcatctggtaaaccttttttgggaatttgtttaggattgcaaattctctttgaatcaagtgcagaaggtacccaaccaggactaggaattatcaaaggaaaagtgcgccgatttcgtccagaacctgacatcactattcctcacatgggttggaatcagctggaaatgactcaggcaaaaagtattttgtgggagcatttgccgtccgatccttgggtatattttgtccattcttactatgttgacccaatagacccgctaatccgtgcagcaaccatcacccacggtactcaaaccgtcacagctgcgatcgctcacgaaaatctgatggcagttcaatttcaccccgaaaaatcatctaatattggattgcaaatcttgtctaattttgttgctcaagtccgtgaaaaaattcctgcctaa

SEQ ID NO: 99438 - protein, 211 aa, Nostoc punctiforme PCC 73102
MPVIAVVDYEMGNLHSVCKGLEKAGATPNVTYSPKELEQADAIVLPGVGAFDPAVQHLRARGLEQPIKDAIASGKPFLGICLGLQILFESSAEGTQPGLGIIKGKVRRFRPEPDITIPHMGWNQLEMTQAKSILWEHLPSDPWVYFVHSYYVDPIDPLIRAATITHGTQTVTAAIAHENLMAVQFHPEKSSNIGLQILSNFVAQVREKIPA

SEQ ID NO: 99439 - DNA, 636 bp, Crocosphaera watsonii WH 8501
  CDS (1)..(636): transl_table=11
atgggctttctggctgttattgactatgacatgggtaatctgcactccgcttgtaaggggctagaaaaagcaggaattcagccaaaaataaccaattctccccaagatattgcagaagctgaggccattgttctgcccggagtgggttcgttcgatccggcggtgcaaaatttacgatcgcgtaatttagaggaacctatcaaaaaggcgatcgctgaaggtaagccattcttaggtatttgtttgggtttacagattctttttgatggttcagaagaagggaaagaaccagggttaggcattatcaaagggatggtacgtcgtttcaaatccgagcctaatttaaccataccccacatgggttggaatcagttacaattggctcaagcaaatttatctttatggcaagggttaacccccgatccctatgtctattttgtgcattcctattatgtcgatcccgttgatgctgagattaatgctgctgttgtgactcatgggagccaaacagttacagcagcgatcgcccgtgataatctgatggcggtacaatttcacccggaaaaatcatcggataatggattacagattctttccaattttgcagcaacgctccagaaaaacttgatcaattga

SEQ ID NO: 99440 - protein, 211 aa, Crocosphaera watsonii WH 8501
MGFLAVIDYDMGNLHSACKGLEKAGIQPKITNSPQDIAEAEAIVLPGVGSFDPAVQNLRSRNLEEPIKKAIAEGKPFLGICLGLQILFDGSEEGKEPGLGIIKGMVRRFKSEPNLTIPHMGWNQLQLAQANLSLWQGLTPDPYVYFVHSYYVDPVDAEINAAVVTHGSQTVTAAIARDNLMAVQFHPEKSSDNGLQILSNFAATLQKNLIN

SEQ ID NO: 99441 - DNA, 642 bp, Kineococcus radiotolerans SRS30216
  CDS (1)..(642): transl_table=11
gtgagcaggaaggtcgtcgtcctcgactacggcttcggcaacgtccgttccgcggtccgcgcgctggaacgggtcggcgccgacgtggagctcaccgccgaccggaagctcgccctggaggccgacggcctgctcgtgccgggcgtgggcgccttcgcggccgtgaaccaggggctgcagtccatcggcggggactccatcgtggaccggcgcctggccggcggtcgtccggtgctggggatctgcgtcgggctgcaggtcatgttcgagacctccaccgaacccggcgagggggttcccgacggcctcggccagtggccggggaccgtcgagcgcctgcccgcggacgtggtgccgcacatgggctggacccccgtcgagccgcccgccgggtcgcggttgttcgccggcgtcgaggacgagcggttctacttcgtgcactcctacgccgtgcagcgcttcgagatgctcgacaccaccgccgggcgggtgccgctgccgcagatcacctgggccgagcacggagcccgcttcgtcgcggcggtggagaacggttcgctgtcggccacccagttccacccggagaagtccggcgacgcgggggcgcagctgctgcgcaactgggtggactccctgggctga

SEQ ID NO: 99442 - protein, 213 aa, Kineococcus radiotolerans SRS30216
MSRKVVVLDYGFGNVRSAVRALERVGADVELTADRKLALEADGLLVPGVGAFAAVNQGLQSIGGDSIVDRRLAGGRPVLGICVGLQVMFETSTEPGEGVPDGLGQWPGTVERLPADVVPHMGWTPVEPPAGSRLFAGVEDERFYFVHSYAVQRFEMLDTTAGRVPLPQITWAEHGARFVAAVENGSLSATQFHPEKSGDAGAQLLRNWVDSLG

SEQ ID NO: 99443 - DNA, 603 bp, Xylella fastidiosa Ann-1
  CDS (1)..(603): transl_table=11
atgaccgaggttgctttgattgatgccggtggtgccaatcttggttcggtgcgctacgccttgcagcgtttgggggtagaaccgcgcttagtgtgcgatgcccgcggactggagggggctgcgcgggtaattctccccggggtcgggagcgcacctgaagccatggcacggctcaaccatcaaggcttgattgagccattgctccggctacaggtgccgctgattgggatctgcctgggcatgcaattgttgtttgagcactctgaggaaggcgatgtgccctgcttgggattgctgcctggccgcgtccgccgcttgacgccggctcctagcatccgcgtgccgcacatgggctggaatcgcttgttgccgctgcgcgcttcgccattgctggcggaggtgcccgagggggcgagcgcttattttgtgcatagctatgcagtgcccttgaccacggcagcggtggccgcctgcgatcacggcggcatgtttatcgcgattgtgcagcagggagtgcgttgtggcgcgcaattccatccagagcgttcggccgaaacaggcgcacgtatcctgcgtaattttcttgaaatggatgccgcatga

SEQ ID NO: 99444 - protein, 200 aa, Xylella fastidiosa Ann-1
MTEVALIDAGGANLGSVRYALQRLGVEPRLVCDARGLEGAARVILPGVGSAPEAMARLNHQGLIEPLLRLQVPLIGICLGMQLLFEHSEEGDVPCLGLLPGRVRRLTPAPSIRVPHMGWNRLLPLRASPLLAEVPEGASAYFVHSYAVPLTTAAVAACDHGGMFIAIVQQGVRCGAQFHPERSAETGARILRNFLEMDAA

SEQ ID NO: 99445 - DNA, 585 bp, Croceibacter atlanticus HTCC2559
  CDS (1)..(585): transl_table=11
atgaaactagtaataattaattatggtgcaggcaatataaaaagccttcagtttgcatttaaacgtctaggtgttgaggcgattttgtctaatgataccgaaacgattaaaaaagccgacaaggttatatttcctggtgttggtgaagcaagttctgcaatgaagaagctgaaagaaactggtttgcacaaactaatacctacattaaaacaacctgtcttgggaatctgtctaggtatgcagttaatgtgtaattatactgaagaaggacaaacagaaggtcttggtatttttgatgttgatgttttaaaattcgattcaaccttagtaaaagtgccccaaattgggtggaatacaattaccaatttaaaatctgagttatttcaacaagtttcagagcatagttttatgtatttagtacatagctactacgctcctatttctactgaaactatttcaacaagcgaatatcaaatacaatatagttctgctttacaaaaagacaatttttatggtgtgcaatttcaccctgaaaaaagtagtaatgacggagaacaacttttaaaaaatttcttaaacctatag

SEQ ID NO: 99446 - protein, 194 aa, Croceibacter atlanticus HTCC2559
MKLVIINYGAGNIKSLQFAFKRLGVEAILSNDTETIKKADKVIFPGVGEASSAMKKLKETGLHKLIPTLKQPVLGICLGMQLMCNYTEEGQTEGLGIFDVDVLKFDSTLVKVPQIGWNTITNLKSELFQQVSEHSFMYLVHSYYAPISTETISTSEYQIQYSSALQKDNFYGVQFHPEKSSNDGEQLLKNFLNL

SEQ ID NO: 99447 - DNA, 639 bp, Sulfitobacter sp. EE-36
  CDS (1)..(639): transl_table=11
atgttaactgcgattatcgattacgaatcgggaaaccttcattcggcgcataaggcgttcgaacggatggcgcgtgagtgtaatgctggcgatgtggtggtcactgctgacgccgatgtcgtggcgcgcgccgaccgccttgtcctgcccggcgatggtgcattcccctcctgcatggccgcgctgaaaggtcaaagcggcatctatgccgcaatggttgaatccgccgtcgacaagggccgcccctttctcgggatctgtgtgggcatgcagttgatggcatccatggggcgcgagtatgaagacacagcaggcctgggctggatcagtggcgaagtgaccaagatcacgccacgcgacccatccctaaaagtaccgcatatgggatggaacgaccttgtcatagaccaccctcaccccgttttcgacggaatcgaaaccggggatcacacgtattttgtccatagtttccatatggatgtacaggacgagtccgagcggttggcgcatgtcgattatgctggtgacgtcactgctgttatcggccgtgacaccatgatcggcatgcaattccacccggaaaaaagccagacaaccggccttcgtatgattgcgaactttctgaactggcgcccctga

SEQ ID NO: 99448 - protein, 212 aa, Sulfitobacter sp. EE-36
MLTAIIDYESGNLHSAHKAFERMARECNAGDVVVTADADVVARADRLVLPGDGAFPSCMAALKGQSGIYAAMVESAVDKGRPFLGICVGMQLMASMGREYEDTAGLGWISGEVTKITPRDPSLKVPHMGWNDLVIDHPHPVFDGIETGDHTYFVHSFHMDVQDESERLAHVDYAGDVTAVIGRDTMIGMQFHPEKSQTTGLRMIANFLNWRP

SEQ ID NO: 99449 - DNA, 639 bp, Roseovarius nubinhibens ISM
  CDS (1)..(639): transl_table=11
atgagcactgcgatcattgattacgagtcgggcaatctgcactcggcggaaaaggcgtttcagcgcgtcgccgccgagaccggcagcggcgaggttttcgtcaccaccgatcccgacgcggtgcgccgcgccgaccggatcgtgctgcccggcgacggcgccttcccggcctgccgcgcggcgctgttcgaacgctcggggctctttgacgccatcgaggaggcggtgatcacccaaggccgccccttcatgggcatttgcatcggcatgcagatgctcgcctcgcgcgggttggagcatggcgaaaccccgggctttggctggatcgagggcacggtgacgccgatcgaccccggcgatccgacgctcaaagtgccgcatatgggctggaacgatctgatcctcggcgatccgcacccggtgctcgacgggatcaacaccggcgatcacgcctatttcgtgcattcctaccattttcaggtggcgaacgggccggaccggctggcgcatgtggattacgcgggcgacatcaccgccgtcgtcggccgcgacacgatcgtcggcacccagttccacccggaaaaatcccaggccaccgggctgcgcatcatcgccaacttcctgcgctggaaaccttaa

SEQ ID NO: 99450 - protein, 212 aa, Roseovarius nubinhibens ISM
MSTAIIDYESGNLHSAEKAFQRVAAETGSGEVFVTTDPDAVRRADRIVLPGDGAFPACRAALFERSGLFDAIEEAVITQGRPFMGICIGMQMLASRGLEHGETPGFGWIEGTVTPIDPGDPTLKVPHMGWNDLILGDPHPVLDGINTGDHAYFVHSYHFQVANGPDRLAHVDYAGDITAVVGRDTIVGTQFHPEKSQATGLRIIANFLRWKP

SEQ ID NO: 99451 - DNA, 633 bp, Oceanicola batsensis HTCC2597
  CDS (1)..(633): transl_table=11
atgctcaccgtcctgatcgactatgaaagcgggaacctgcattccgccgagaaggcctttcagcgcatggcgcgcgaggtcggcggcggcgaggttatcgtgtcggaccgcgccgaggacgtgcgccgcgccgaccggatcgtcctgcccggcgacggcgcctttcccgcctgcgcgcgggcgctgaaggggcgcgagaacctctacgacgcgctgcgcgagatggtcgaggacaaggcgcggcccttcatggggatctgcgtcggcatgcagctcatggcacggatcgggcatgagtacgaagagacggccgggctgggctggatcgatggcgaggttgcccggatcggggccgaggggctgaaagtgccgcacatggggtggaacgacctggtgatcgaccgcccgcacccggttctggccgggatcgagaccgggcagcacgcctatttcgtccacagctatcacatggcggtcgccgcgcccgagcagctgctggcgcatgtggattacggccacccggtcaccgcgatcatcggccgcgacacgatggtgggcacgcagttccatcccgaaaagagccagcagaccgggctccggatgatcgcgaatttccttacgtggtcgccctga

SEQ ID NO: 99452 - protein, 210 aa, Oceanicola batsensis HTCC2597
MLTVLIDYESGNLHSAEKAFQRMAREVGGGEVIVSDRAEDVRRADRIVLPGDGAFPACARALKGRENLYDALREMVEDKARPFMGICVGMQLMARIGHEYEETAGLGWIDGEVARIGAEGLKVPHMGWNDLVIDRPHPVLAGIETGQHAYFVHSYHMAVAAPEQLLAHVDYGHPVTAIIGRDTMVGTQFHPEKSQQTGLRMIANFLTWSP

SEQ ID NO: 99453 - DNA, 627 bp, Erythrobacter sp. NAP1
  CDS (1)..(627): transl_table=11
gtggctgaggttgtcgctctcgtcgattacggcgcgggcaatctgcattcggtttacaatgcgctcaaggcggtgggggcgaatgtcaaagttaccgccgatgccagcgtcgtgcgcgcagccgaccgcatcgtgcttcccggagtgggcgcgttcaaggcgtgtgccgatgggttgaaggccgtgccgggcatggtcgatgcgctgcatgagcgggtcgagatcggcggtgcgccgttcctcggcatctgcgtcggcatgcaattgcttgcagatcgcgggctcgaatatggcacgcatgaaggccttggctggattccgggcgaagtgcgcctgatcgagccgcacgacccggcgatcaaggtgcctcacatgggctggaacgacgttgcgatcatgcctcatgcgcgcggccatcaggtgattgaggagggggaggcctattttctccactcctaccacttcgtttccgaggacccgtatcacgtcgcggctttgaccgaccacggcgaaggccttgtggcagcggtcagccgcgcgaatatcgccggggtgcaattccaccccgaaaagagccaggcctatggtctggcgaccctcgaacgtttcctggagtggcggccttga

SEQ ID NO: 99454 - protein, 208 aa, Erythrobacter sp. NAP1
MAEVVALVDYGAGNLHSVYNALKAVGANVKVTADASVVRAADRIVLPGVGAFKACADGLKAVPGMVDALHERVEIGGAPFLGICVGMQLLADRGLEYGTHEGLGWIPGEVRLIEPHDPAIKVPHMGWNDVAIMPHARGHQVIEEGEAYFLHSYHFVSEDPYHVAALTDHGEGLVAAVSRANIAGVQFHPEKSQAYGLATLERFLEWRP

SEQ ID NO: 99455 - DNA, 591 bp, Pseudoalteromonas tunicata D2
  CDS (1)..(591): transl_table=11
atgattgctatcatcaataccggttgtgccaatataaattctgtacgatttgcctttgagcgattaaattgcccaacacaagtgattagccaaccagagcaactggctcattttgaccgcgcggtactgcctggtgttggccatgcaagtgttgcgatgaaacgcttaattgatggtggctggcaatccgccattactgagtatcaaaagccattgatgggcatttgtttaggaatgcaattgctgtgcgaatcgactgaagaaggtcatatcgataccttaggcttgatccctggcaaagtatcgttacttgagaccgggcaactgacatcaccccacatgggctggaataatttgcacgttgagtcagctcatgctcttactcagggcttattagcatctgaccaagtgtactttgtacacagttttgcccatagcgttaatagtgcaaccttagtaagtggtgaatatggcgagcgattttctgccattgtggccaaagataattttgcaggtatgcaatttcatcctgaacgttcagccaaagttggcgctcgattattaacaaactttattgaatggcgcatttag

SEQ ID NO: 99456 - protein, 196 aa, Pseudoalteromonas tunicata D2
MIAIINTGCANINSVRFAFERLNCPTQVISQPEQLAHFDRAVLPGVGHASVAMKRLIDGGWQSAITEYQKPLMGICLGMQLLCESTEEGHIDTLGLIPGKVSLLETGQLTSPHMGWNNLHVESAHALTQGLLASDQVYFVHSFAHSVNSATLVSGEYGERFSAIVAKDNFAGMQFHPERSAKVGARLLTNFIEWRI

SEQ ID NO: 99457 - DNA, 645 bp, Oceanospirillum sp. MED92
  CDS (1)..(645): transl_table=11
atgtcgacggtagcagtaatcgactatggcatgggcaacttacattcggttgctaaagcgctggagtttgttgaaccgggtgtagaagtgttagttacttcggatccagcgctggttgccagcgctgaccgcgttattttgccgggtgtcggcgctatgcgtgattgtatggctgagatgctcaaagcgggtgtggataaagaagttacggatgcgatcaattcaggtaaaccgtttttaggtatctgtgttggtatgcaggcgttgctgaatagctcagaagagaacaacggtgttgaatgcctgtctcacttcaaaggcgaggttaaatatttcggtgatgatctcgctgaagagggagagcgcctgaaagttccgcatatgggctggaacgaagtggctcagatgaccgaccatccgctgtggaaagatattgaagacggcagtcgtttctattttgttcacagctactacgtgcagtccgaagaacgtgaattggtatccggcgtttgtcgatacggcctgcagttcgatgtggcgctggcgcgtgacaatgtctttgcggtgcagttccacccggagaaaagctctaaagcgggtctgcagcttttgaaaaacttcctcaactgggacggtaaaatctaa

SEQ ID NO: 99458 - protein, 214 aa, Oceanospirillum sp. MED92
MSTVAVIDYGMGNLHSVAKALEFVEPGVEVLVTSDPALVASADRVILPGVGAMRDCMAEMLKAGVDKEVTDAINSGKPFLGICVGMQALLNSSEENNGVECLSHFKGEVKYFGDDLAEEGERLKVPHMGWNEVAQMTDHPLWKDIEDGSRFYFVHSYYVQSEERELVSGVCRYGLQFDVALARDNVFAVQFHPEKSSKAGLQLLKNFLNWDGKI

SEQ ID NO: 99459 - DNA, 654 bp, Flavobacteria bacterium BBFL7
  CDS (1)..(654): transl_table=11
atgattgccattgtaaaatataacgcaggaaatataggtagtgtaactaatgcgctcaacagactaggaatagagaataaagtaactgacgatcctgaagaattaaaggcggcagacaaagttattttccctggcgtaggagaagctggtaccgcgatgaactatttgcgtgaacgtggactagatcaagtcataaaagaattgaaacagcctgtgctaggaatatgcttaggaatgcaattgatgtgcagccacagtgaagaaggtgatacagaatgtctagggatttttgacactacagtaaagaaatttccagccactgcaggcatgaaagtgccgcacatgggatggaatgaaataggtcgtgtcaaaacagcaatttcacctgataaagacgtgattttcaagaatatttgcacactagatgatattaataaaagtagttttgatgatataagattagaaaatgatgtttactatgtccatagtttttacgcagttcctaatcaagatgcgtcagcgatttgtgattatattgtgccgtttgctagcatattgaataaagataatttttatgccatgcaatttcatccagaaaaaagtgctagagttggagagcagctattgaagaattttatcgcaattactgcataa

SEQ ID NO: 99460 - protein, 217 aa, Flavobacteria bacterium BBFL7
MIAIVKYNAGNIGSVTNALNRLGIENKVTDDPEELKAADKVIFPGVGEAGTAMNYLRERGLDQVIKELKQPVLGICLGMQLMCSHSEEGDTECLGIFDTTVKKFPATAGMKVPHMGWNEIGRVKTAISPDKDVIFKNICTLDDINKSSFDDIRLENDVYYVHSFYAVPNQDASAICDYIVPFASILNKDNFYAMQFHPEKSARVGEQLLKNFIAITA

SEQ ID NO: 99461 - DNA, 651 bp, marine gamma proteobacterium HTCC2207
  CDS (1)..(651): transl_table=11
atgagtgattttcgcagccatattgccgttatcgactacggaatgggtaacctccattccgtcgccaaagcccttgagcacgtctgccctggagccaaagtctcgattaccgcagatcccaatgtggtcgaagacgccgatcgggtagtcttccccggtgtcggtgctatccgcgactgcatgggtgaaattaatcgactcaatgtgggtgatgtggtcaaccaggccatgaaaaccaaaccggtattggccatctgtgttggcatgcaagcgctgcttcagcgaagcgaagaaaacggcggtgtagattgccttggcctattgcctggcgaagtgaaatactttggtgacaatctgatcgaccatcagggtgctagactcaaagtgcctcatatgggctggaacaatgtcgagcagagcattgatcatccattgtggcagggtattgaacagaacagccgattctattttgtccacagctactatgtggcaccaactgacccgagctacgtggccgggcgctgcaactacggaaccaactttgccgccgccctaagtcataaaaatttgtttgccgtgcaattccatccagaaaaaagtgctgatgccggcctgcaactgctgcgcaacttttgcaactggatgggttga

SEQ ID NO: 99462 - protein, 216 aa, marine gamma proteobacterium HTCC2207
MSDFRSHIAVIDYGMGNLHSVAKALEHVCPGAKVSITADPNVVEDADRVVFPGVGAIRDCMGEINRLNVGDVVNQAMKTKPVLAICVGMQALLQRSEENGGVDCLGLLPGEVKYFGDNLIDHQGARLKVPHMGWNNVEQSIDHPLWQGIEQNSRFYFVHSYYVAPTDPSYVAGRCNYGTNFAAALSHKNLFAVQFHPEKSADAGLQLLRNFCNWMG

SEQ ID NO: 99463 - DNA, 636 bp, Desulfitobacterium hafniense DCB-2
  CDS (1)..(636): transl_table=11
atgataggaatcatcgattatggtcgcggaaatttgcgcagtgtggaaaaagccctctggaaattaggatatccggctaaggttctggaatctcccgctgaactgatggctgtgaagggcatcattttgccgggagtgggagcattcgccgatgctatggcagctcttgaagaaaagggatggattcagcccttaatccactacgcccattcaggaaagcctttcttagggatttgcctcggcatgcaggtgctctttgaagtcggggaggagcatggtgagcataagggattgggactgctccccgggagagtggtcaggttcccggccggccgcaagattcctcatatgggctggaatacccttcatcaggaaaagccttgccggcttcttgaggggattcccgatgaagcttatttttattttgttcactcctattatgtggccagtgaggagcaggagattcttgctggaatgagcgactatggagtgccttttccggctttggtgggaagggataatgtttggggagcacaattccaccctgagaagtccagtccttggggtcttaagctattggagaactttggaaagtgggtgaatgaggatgcgactgtttccagccatcgatcttaa

SEQ ID NO: 99464 - protein, 211 aa, Desulfitobacterium hafniense DCB-2
MIGIIDYGRGNLRSVEKALWKLGYPAKVLESPAELMAVKGIILPGVGAFADAMAALEEKGWIQPLIHYAHSGKPFLGICLGMQVLFEVGEEHGEHKGLGLLPGRVVRFPAGRKIPHMGWNTLHQEKPCRLLEGIPDEAYFYFVHSYYVASEEQEILAGMSDYGVPFPALVGRDNVWGAQFHPEKSSPWGLKLLENFGKWVNEDATVSSHRS

SEQ ID NO: 99465 - DNA, 591 bp, Alteromonadales bacterium TW-7
  CDS (1)..(591): transl_table=11
atgattgctataattaataccgggtgtgccaatataaattcagttcgttttgcgtttgaacgcttaggtcaaacgccaacggtcattacctcgccagagcaattagccggctttgagcgtgctatattaccaggcgttggacatgcatctgttgccatgaagcgtttagtagataacggctggcaacaagctataaatgaataccagcgccctcttatgggtatttgcttaggtatgcagttactgtgcgaaagcaccgaagaaggtaacgttcaatgcttaggtaaaataccaggccaagtaaaagcccttgatgttggcaatttaacatcgccgcatatgggttggaataacttaagcgtaaataaagagcatgcactcacaaaaggcttaacacaagacgagcaagtgtactttgtacatagctttgcgcacaccgtaaacgatgcaacacttgtaagcggcgaatacggccaaaccttttcagccatagttgcaagagacaactacgctggcatgcagtttcacccagagcgcagtgcaaaagtaggcacacgtttattacaaaattttgttgattggcagttataa

SEQ ID NO: 99466 - protein, 196 aa, Alteromonadales bacterium TW-7
MIAIINTGCANINSVRFAFERLGQTPTVITSPEQLAGFERAILPGVGHASVAMKRLVDNGWQQAINEYQRPLMGICLGMQLLCESTEEGNVQCLGKIPGQVKALDVGNLTSPHMGWNNLSVNKEHALTKGLTQDEQVYFVHSFAHTVNDATLVSGEYGQTFSAIVARDNYAGMQFHPERSAKVGTRLLQNFVDWQL

SEQ ID NO: 99467 - DNA, 651 bp, marine gamma proteobacterium HTCC2143
  CDS (1)..(651): transl_table=11
atgagcaaacacacggttgctgtgattgattacggcatgggaaatttacactctgttgccagtgcgcttgagtatgtcggaaagaacgtggatgtgattgtgaccgctgatgctgaaaaaatactcgctgccgatagggttgttttccctggtgttggagccattcgtgattgcatggcagaaattctccggctgggtgttgatcaagttgtagcagaagtcgcggcaactaagcctatgttagcaatctgtgttggcatgcaggcgctaatgactcgtagcgaggaaaatcacggtgttgattgtctgggagtatttccgggtgaggtgaaattttttggcaatcctcttgttgataatagcggccaaaaattgaaggttccacatatgggctggaaccaattgcaccagacgaaagcgcatccgctatgggaggggatacagcaggacagtcgattttattttgtccacagctattatgtgcatgctgacgacccatcactgatcgctgcaactgccggctatggggtagatattcacgcagcattacatcgcgataatatttttgcggttcaatgccaccccgaaaaaagcagtgatatgggcctgaagttgcttagcaattttcttaaatggagcggccagggttaa

SEQ ID NO: 99468 - protein, 216 aa, marine gamma proteobacterium HTCC2143
MSKHTVAVIDYGMGNLHSVASALEYVGKNVDVIVTADAEKILAADRVVFPGVGAIRDCMAEILRLGVDQVVAEVAATKPMLAICVGMQALMTRSEENHGVDCLGVFPGEVKFFGNPLVDNSGQKLKVPHMGWNQLHQTKAHPLWEGIQQDSRFYFVHSYYVHADDPSLIAATAGYGVDIHAALHRDNIFAVQCHPEKSSDMGLKLLSNFLKWSGQG

SEQ ID NO: 99469 - DNA, 630 bp, Candidatus Desulfococcus oleovorans Hxd3
  CDS (1)..(630): transl_table=11
atgataacgattattgactacgaagccggcaacctgaccagcgtggccagggcccttgtgaaaaccggccatgaatgtgtgatcaccggggacccggaaaagatcgccgctgccgaacggctgatctttcccggcgtgggcgcggccggggccgccatggcaagcctggagcggtccggcattgacgcggctatctccgtggctgtgggacggggtattccggtgatgggcatctgcctgggcacccaggtgatcctggaagaaagcagcgaaaacaacgcccgatgcctgggcattataaaaggaaaggtcctgccctttgcgctggacatggtagatggcagcggcgaccggctcaagattccccacatggggtggaacgcggttgccatgcaaacaccccatcccgtgtttgacggtattgatccggaggaccggttctattttgtgcacagtttctacccggcccctgccgatccgtccacggtcattgccaccaccgactacggcgtgacctttgcgtcggtcatcgggtttgccaacctggtggccacccagttccacccggaaaaaagcggccgggccggacttcgtattctggaaaatttttgcaggtggaacccatgttaa

SEQ ID NO: 99470 - protein, 209 aa, Candidatus Desulfococcus oleovorans Hxd3
MITIIDYEAGNLTSVARALVKTGHECVITGDPEKIAAAERLIFPGVGAAGAAMASLERSGIDAAISVAVGRGIPVMGICLGTQVILEESSENNARCLGIIKGKVLPFALDMVDGSGDRLKIPHMGWNAVAMQTPHPVFDGIDPEDRFYFVHSFYPAPADPSTVIATTDYGVTFASVIGFANLVATQFHPEKSGRAGLRILENFCRWNPC

SEQ ID NO: 99471 - DNA, 639 bp, Pseudomonas putida GB-1
  CDS (1)..(639): transl_table=11
atgcagacggtagccgtaatcgactatggcatgggcaacctgcactcggtggccaaggcgcttgagcacgtaggtgccggtaaggtgttggtcaccagcgatgccgcagtgatccgcgaggccgaccgcgtggtgttcccaggtgtgggtgcgattcgcgactgcatggccgaaatccgccgcctgggcttcgacagcctggtacgtgaagtcagccaggaccgcccgttcctcggtatctgcgtcggtatgcaggcgctgctcgaacacagcgaagaaaacaccggtgtcgattgcatcggtctgtttcccggccaggtgcgtttcttcggcaaagacctgcaagaagacggcgagcacctgaaggtgccgcacatgggctggaacgaagttgcccagaccatcgaccacccgctgtggcacgacatccccgaccgcgcacgtttctacttcgtgcacagctactacatcaatgccggcaagccgggccaggtggtcggtcgcggccactatggcgtcgatttcgccgccgcgctggctgatggctcgcgctttgccgtgcagttccacccggagaagagccatacccatggcctgcagttgctgcagaacttcgtcgcctgggacgggcgctggtaa

SEQ ID NO: 99472 - protein, 212 aa, Pseudomonas putida GB-1
MQTVAVIDYGMGNLHSVAKALEHVGAGKVLVTSDAAVIREADRVVFPGVGAIRDCMAEIRRLGFDSLVREVSQDRPFLGICVGMQALLEHSEENTGVDCIGLFPGQVRFFGKDLQEDGEHLKVPHMGWNEVAQTIDHPLWHDIPDRARFYFVHSYYINAGKPGQVVGRGHYGVDFAAALADGSRFAVQFHPEKSHTHGLQLLQNFVAWDGRW

SEQ ID NO: 99473 - DNA, 639 bp, Marinobacter sp. ELB17
  CDS (1)..(639): transl_table=11
atgaaaaccgttgccatcattgattacggtatgggcaacctgcattccgtgagcaaagccgtagaacacgtagccccggatacccgggtgctggtgaccgacaacgccgaccttatccgcagcgccgaccgggtgatatttcccggcgttggcgcaattcgcgattgcatggcggaaattcgtcggcttggtgtggctgagctggtgaaagaagtatcccgcgatcgccctctgctgggtgtgtgcgtaggcatgcaggcactgatgtcccacagcgaagagaacggcggagttgactgcattgacgtattccccgcccacgttcgctttttcggccataagctgaccgaaaatggcaaacgactaaaagtgccgcacatgggttggaatcaggtgcagcaggtacaagatcaccccatgtggcacaaaatcgctgacgatgagcgcttttactttgtgcacagttattacgccgaagccgaagataacgccgacatagccggccgcacccgttacggtgttgaccttgcggcggcggtcgccaaaggcaatatttttgcggtgcagttccacccggaaaagagtgctgatgcaggtctgcagctgctgaagaactttgtgagctggaacggaagttag

SEQ ID NO: 99474 - protein, 212 aa, Marinobacter sp. ELB17
MKTVAIIDYGMGNLHSVSKAVEHVAPDTRVLVTDNADLIRSADRVIFPGVGAIRDCMAEIRRLGVAELVKEVSRDRPLLGVCVGMQALMSHSEENGGVDCIDVFPAHVRFFGHKLTENGKRLKVPHMGWNQVQQVQDHPMWHKIADDERFYFVHSYYAEAEDNADIAGRTRYGVDLAAAVAKGNIFAVQFHPEKSADAGLQLLKNFVSWNGS

SEQ ID NO: 99475 - DNA, 606 bp, Cenarchaeum symbiosum
  CDS (1)..(606): transl_table=11
atggtcaaggttgccatactggactatggcgccgggaacctattcagtttaaagaactcgctagagagggcgggtgcggaagtgtatatcgtggatgagccctccgggtgtgcaggatactcgggtgttctattgcccggggtcggcaactttgatcccgccgtcaaaaagatacgcgggaagaataccatattcgaggatgacatactgggaaaaatacctgtcctggggatctgccttggaatggagatgttctttgaaagcagcgaagagggcatcgagcagggcctaggggccatacccggaaaagtggtggtcctgccatcatccatgaaggtgccccacatggggtggaacagccttgagcagtccagacagggcaggctgctagaaggcgtgcaggataattcgtgggcgtactttgtccactcgtatatggtaaaaccggaggatcccggtgtagtatcggctagcgcagactatgggacaagcatacccgctgtaatagaaaaaggatgcatctacgggacgcagttccatcctgaaaaatcaggtcctgcggggcgcctcatgctggagaactttcttacagagtgttcgagatga

SEQ ID NO: 99476 - protein, 201 aa, Cenarchaeum symbiosum
MVKVAILDYGAGNLFSLKNSLERAGAEVYIVDEPSGCAGYSGVLLPGVGNFDPAVKKIRGKNTIFEDDILGKIPVLGICLGMEMFFESSEEGIEQGLGAIPGKVVVLPSSMKVPHMGWNSLEQSRQGRLLEGVQDNSWAYFVHSYMVKPEDPGVVSASADYGTSIPAVIEKGCIYGTQFHPEKSGPAGRLMLENFLTECSR

SEQ ID NO: 99477 - DNA, 1926 bp, Oryza sativa subsp
  CDS (1)..(1926)
atggccatggctgaggcggtggcgagtggttggacgattagcatcttcctcaagctgaaatctgggaggggtcgttaccggcggggtcccggatgcgacaacagtgggaagtcgaaccctgtgcgcggcggtgctccaggacaggcggcggcgtcaagaccgaagtggttttcggcggcgtcgcggataggaggtgaggcgggcagctccggagctcggcggtcaggcataaaccggtgcggcgcagcagccgtgacgctgctggactacggcgcgggcaacgtgcgcagcgtgcgcaacgccatccgccacctcggcttcggcatccgcgacgtgcgcagcccggaggacatcctcgccgccgaccgcctcgtcttcccgggggtcggcgccttcggctcagccatggacgtcctcacccgctccgggatggccgacgcgctccgcgagtacatccgcagggaccgccccttcctcggcatctgcctcggcctccagctgctcttcgactctagcgaggagaatggcccgataagcggccttggtgtgatacctggagttgtcaggcgatttgactcttcgaagggtctcattgtgcctcacattggctggaatgctttggagatcaccaaagacacgcagctgctcaagggagctgaaggccaccatgtgtactttgttcactcctatcatgctctgcctgtaaggaacagctcttttttagatgctctttcgttagtggacttatggaattcagatgaaaacaaagagtggatttcttctgtatgcaactatggcgagagtttcatatcatccatctcaatgggcaacattcaggcagttcagtttcacccagaaaagagcggagacaggattgaaacatgtagattcttgagttctgataacttgactggtcttgatcaccaagctactgggctttcaattttgaaaaattttctcagtccaaactcttcaggatcaaaggtcccatctcgtaggaaagcatcgaaccttgcaaagagagtcattgcatgtcttgatgttcggtcaaatgatagtggggatcttgtggtaacaaaaggtgaccagtatgatgtaagaaacctcgggaagccagtggatttagcaagccagtactacatagatggtgctgatgaggttagcttcttgaatataactggtttccgtgactttccgttgggagatttgccaatgctagaggtattacgttgtgcatctgagaaagtatttgtgccacttacagttggtggaggtataagagacttcacagatgcaaatgggagatactactcaagtttggaagtagcgtcagagtacttcaggtctggtgctgacaagatttcaattggtagtgatgccgtttttgctgctgaagcctatttgcagactggtgtaaagacaggaaaaagcagcttggagcaaatctctagagtatatggcaaccaggcagttgttgtaagtattgaccctcgaagagtatatgtcaagaatccggaagaggtgcaattcaaaactgtaaaggtgtccaataaaggtccattaggagaagaatatgcatggtaccagtgcacagtaagtggtgggcgtgacagccgtcctataggagcatatgaactagccaaagcagttgaagaattgggtgctggagaaatacttcttaattgcattgattgtgatggccagggctgcggatttgacatagatctggtaaaaatggtgtcagatgctgtgactatccctgtcattgcaagcagtggtgctggtactgtcgaacatttttctgaggtctttgagaaaacaaatgcttctgctgcccttgctgctggcattttccatcggaaagaggttccgatttcagcagtgaaagagcatctggtagatgctggcgtggaggtcagagtgtag

SEQ ID NO: 99478 - protein, 641 aa, Oryza sativa subsp
MAMAEAVASGWTISIFLKLKSGRGRYRRGPGCDNSGKSNPVRGGAPGQAAASRPKWFSAASRIGGEAGSSGARRSGINRCGAAAVTLLDYGAGNVRSVRNAIRHLGFGIRDVRSPEDILAADRLVFPGVGAFGSAMDVLTRSGMADALREYIRRDRPFLGICLGLQLLFDSSEENGPISGLGVIPGVVRRFDSSKGLIVPHIGWNALEITKDTQLLKGAEGHHVYFVHSYHALPVRNSSFLDALSLVDLWNSDENKEWISSVCNYGESFISSISMGNIQAVQFHPEKSGDRIETCRFLSSDNLTGLDHQATGLSILKNFLSPNSSGSKVPSRRKASNLAKRVIACLDVRSNDSGDLVVTKGDQYDVRNLGKPVDLASQYYIDGADEVSFLNITGFRDFPLGDLPMLEVLRCASEKVFVPLTVGGGIRDFTDANGRYYSSLEVASEYFRSGADKISIGSDAVFAAEAYLQTGVKTGKSSLEQISRVYGNQAVVVSIDPRRVYVKNPEEVQFKTVKVSNKGPLGEEYAWYQCTVSGGRDSRPIGAYELAKAVEELGAGEILLNCIDCDGQGCGFDIDLVKMVSDAVTIPVIASSGAGTVEHFSEVFEKTNASAALAAGIFHRKEVPISAVKEHLVDAGVEVRV

SEQ ID NO: 99479 - DNA, 2373 bp, Oryza sativa subsp
  CDS (1)..(2373)
atggcctcaccgccgcgttcgctttgcttttgcttcgcttcgcttcgccgtcggttcgacgcgacagccgtgacgctgctggactacggcgcgggcaacgtgcgcagcgtgcgcaatgccatccgccacctcggcttcggcatccgcgacgtgcgcagcccggaggacatcctcgccgccgaccgcctcgtcttcccgggggtcggcgccttcggctcagccatggacgtcctcacccgctccgggatggccgacgcgctccgcgagtacatccgcagggaccgccccttcctcggcatctgcctcggcctccagcttctcttcgactctagcgaggagaatggcccgataagcggccttggtgtgatacctggagttgtcaggcgatttgactcttcgaagggtctcattgtgcctcacattggctggaatgctttggagatcaccaaagacacgcagctgctcaagggagctgaaggccaccatgtgtactttgttcactcctatcatgctctgcctgacatcctcgccgccgaccgcctcgtcttcccgggggtcggcgccttcggctcagccatggacgtcctcacccgctccgggatggccgacgcgctccgcgagtacatccgcagggaccgccccttcctcggcatctgcctcggcctccagcttctcttcgactctagcgaggagaatggcccgataagcggccttggtgtgatacctggagttgtcaggcgatttgactcttcgaagggtctcattgtgcctcacattggctggaatgctttggagatcaccaaagacacgcagctgctcaagggagctgaaggccaccatgtgtactttgttcactcctatcatgctctgcctgtaaggaacagctcttttttagatgctctttcgttagtggacttatggaattcagatgaaaacaaagagtggatttcttctgtgtgcaactatggcgagagtttcatatcatccatctcaatgggcaacattcaggcagttcagtttcacccagaaaagagcggagacaggattgaaacatgtagattcttgagttctgataacttgactggtcttgatcaccaagctactgggctttcaattttgaaaaattttctcagtccaaacacttcaggatcaaaggtcccatctcgtaggaaagcatcgaaccttgcaaagagagtcattgcatgtcttgatgttcggtcaaatgatagtggggatcttgtggtaacaaaaggtgaccagtatgatgtaagaaacctcgggaagccagtggatttagcaagccagtactacatagatggtgctgatgaggttagcttcttgaatataactggtttccgtgactttccgttgggagatttgccaatgctagaggtattacgttgtgcatctgagaaagtatttgtgccacttacagttggtggaggtataagagacttcacagatgcaaatgggagatactactcaagtttggaagtagcgtcagagtacttcaggtctggtgctgacaagatttcaattggtagtgatgccgtttttgctgctgaagcctatttgcagactggtgtaaagacaggaaaaagcagcttggagcaaatctctagagtatatggcaaccaggcagttgttgtaagtattgaccctcgaagagtatatgtcaagaatccggaagaggtgcaattcaaaactgtaaaggtgtccaataaaggtccattaggagaagaatatgcatggtaccagtgcacagtaagtggtgggcgtgacagccgtcctataggagcatatgaactagccaaagcagttgaagaattgggtgctggagaaatacttcttaattgcattgattgtgatggccagggctgcggatttgacatagatctggtaaaaatggtgtcagatgctgtgactatccctgtcattgcaagcagtggtgctggtactgtcgaacatttttctgaggtctttgagaaaacaaatgcttctgctgcccttgctgctggcattttccatcggaaagaggttccgatttcagcagtgaaagagcatctggtagatgctggcgtggagccgtcacgcactcacgcttcctccggcggcggcaaggcgacggcatcggcggccaaggcgcgggcggcggcggcgagcaaggtgcgggcgacggcggcggcggcgagcaaggtgcaggcgacgtcatcggcaaccaaggcgcgggcggcggcggcggcggaagcgggaggcggaggagtgggagaggcggaagagggggaggaggaggaggcggcagagacgagaggaccccgtggatgtgctcggggaggaggcttatttgatgagagctggggctgtcattcatag

SEQ ID NO: 99480 - protein, 790 aa, Oryza sativa subsp
MASPPRSLCFCFASLRRRFDATAVTLLDYGAGNVRSVRNAIRHLGFGIRDVRSPEDILAADRLVFPGVGAFGSAMDVLTRSGMADALREYIRRDRPFLGICLGLQLLFDSSEENGPISGLGVIPGVVRRFDSSKGLIVPHIGWNALEITKDTQLLKGAEGHHVYFVHSYHALPDILAADRLVFPGVGAFGSAMDVLTRSGMADALREYIRRDRPFLGICLGLQLLFDSSEENGPISGLGVIPGVVRRFDSSKGLIVPHIGWNALEITKDTQLLKGAEGHHVYFVHSYHALPVRNSSFLDALSLVDLWNSDENKEWISSVCNYGESFISSISMGNIQAVQFHPEKSGDRIETCRFLSSDNLTGLDHQATGLSILKNFLSPNTSGSKVPSRRKASNLAKRVIACLDVRSNDSGDLVVTKGDQYDVRNLGKPVDLASQYYIDGADEVSFLNITGFRDFPLGDLPMLEVLRCASEKVFVPLTVGGGIRDFTDANGRYYSSLEVASEYFRSGADKISIGSDAVFAAEAYLQTGVKTGKSSLEQISRVYGNQAVVVSIDPRRVYVKNPEEVQFKTVKVSNKGPLGEEYAWYQCTVSGGRDSRPIGAYELAKAVEELGAGEILLNCIDCDGQGCGFDIDLVKMVSDAVTIPVIASSGAGTVEHFSEVFEKTNASAALAAGIFHRKEVPISAVKEHLVDAGVEPSRTHASSGGGKATASAAKARAAAASKVRATAAAASKVQATSSATKARAAAAAEAGGGGVGEAEEGEEEEAAETRGPRGCARGGGLFDESWGCHS

SEQ ID NO: 99481 - DNA, 1617 bp, Ostreococcus tauri
  CDS (1)..(1617)
atgacgcgagcgtccaagggcgcggtgcacctgctggattacggcgccgggaacgtgcgatcggtgcgaaacgcggtgcaggcgctggggttcgaggtcttggacgcgcgaacgccgaaggatttggagggggcgactcggttgattttcccgggcgtcggcgcgtacgggagtgcgatggatattctccgcgagcgcggtctcatcgaaccgctgagagagtacgtgaggagcgacaaacccttcctgggcgtgtgcctcggcttgcagctcttgttcgacggcagcgaggagagcggcggcgtcgagggcttggggctcattccgggaagcgtcgatcgattcacgggcgaggggttgatcgttcctcacatcggatggaacttggtgaacaccaagaagagcagtggactcatggacggcatggagggtgagcgcgtgtacttcgtgcactcgtatcgggcgacgccgacagaggagaacaaggattgggttctctcgacgtgcgactacggtggtgaattcatcgccagcgtgcaaaaggggaacgtgatggcgtgtcagttccacccggagaagtccggtgcgactggtttgggggtgtttcaacgcttcttggaggacgcaaagccgacgggacagtttggacagtccgccaaggtcaccgacgggttggcccggcgcgtcatcgcgtgtctcgacgtgcgctcgaatgactcgggcgacttggtcgtcacaaagggcgactcgtatgacgtgcgcgagaagagcgagggcggagacgtgcgtaacttgggcaaaccggtggagttggcgggcaagtacttcaaacaaggcgccgacgaagtggcgtttctcaacatcaccggttacagagatcttccgctaacggacgcaccgatgttggaagtacttcgtcgctcgagtgagaccgtattcgtcccgctcaccgtgggcggaggtattcgagatttcaccgatagcaatgggaagtcgtacacgtcgctcgaggtggcgggcgcgtacttcgcaagcggcgccgataaagtttccatcgggagcgacgctgtgtacgtcgccgaagagtattacgcgagtgggaagaagaagacaggtaagacgagcatagagcaaatatccaaccgctacggagtgcaggcggtggtaatctccatcgacccgcgtcgccagtacgtcgccgaaccgtccatgacgaagaacaagtgcatcgaaaccgctcgacccggacccaacggggagaagtacgtctggttccagtgcacggtgaagggcgggcgtgaagggcgtgatattggcgcttacgagctcgcgatcgccatggaggcgctcggcgctggggaaattctgctcaactgcatcgacgaagacgggcaaggtaacggttttgaccacgagctcgtgagtctcgtttcggatgccgtgggtatccccgtcatcgcatcctccggtgccggatgcccagcgcactttaccgacgttttcaacgccacgaagtgctctgccgcgctcgccgccggtattttccaccgtgaagaagtactcgtgagtgaggtgaagaaccacatggtttcgcacggtttgcccacgcgcacgtga

SEQ ID NO: 99482 - protein, 538 aa, Ostreococcus tauri
MTRASKGAVHLLDYGAGNVRSVRNAVQALGFEVLDARTPKDLEGATRLIFPGVGAYGSAMDILRERGLIEPLREYVRSDKPFLGVCLGLQLLFDGSEESGGVEGLGLIPGSVDRFTGEGLIVPHIGWNLVNTKKSSGLMDGMEGERVYFVHSYRATPTEENKDWVLSTCDYGGEFIASVQKGNVMACQFHPEKSGATGLGVFQRFLEDAKPTGQFGQSAKVTDGLARRVIACLDVRSNDSGDLVVTKGDSYDVREKSEGGDVRNLGKPVELAGKYFKQGADEVAFLNITGYRDLPLTDAPMLEVLRRSSETVFVPLTVGGGIRDFTDSNGKSYTSLEVAGAYFASGADKVSIGSDAVYVAEEYYASGKKKTGKTSIEQISNRYGVQAVVISIDPRRQYVAEPSMTKNKCIETARPGPNGEKYVWFQCTVKGGREGRDIGAYELAIAMEALGAGEILLNCIDEDGQGNGFDHELVSLVSDAVGIPVIASSGAGCPAHFTDVFNATKCSAALAAGIFHREEVLVSEVKNHMVSHGLPTRT

SEQ ID NO: 99483 - DNA, 1653 bp, Phaeosphaeria nodorum
  CDS (1)..(1653)
atgccgaccgttcacctcctagattacgtcgcgggcaatgtccgctcgctcgtcaatgccatcgagaaggtcggctacactgtcgagtgggtgaagtcgccggccgatctcccttccgcagagaaactcatcattcccggcgtcggtcactttggacattgcctgtcacaattggaaaaggcgggctacgtcgaaccgatccgccaacacatcaaggccggcaagtcgttcatgggaatttgcgtcggtatacaagctctattcgaggggtcggaagaggacccgaatgtaaagggcctggggataataccttcgcaattgaaaaagttcgacgacaaggacaagagcgtgccgcacattggttggaacagcgcaaacacatcaaggaccggccaagccaccgacgactcgttctacggactacgaccgacctcgaaatattactatgtccactcgtacgccgcaccatatgaggagggcaggttggagaagttgggctggacagtcgcaaccgcacggtacggggacgaagaattcattggtgcggtagccagggacaatgtgttcgcgacacaattccatcccgagaagagtggtgcaccgggcctgcgcgtgctaaaggccttcctcgaggggaccaggtctcagaagttgccgaaacagctttccgcgggagacacgaaagagggccttacgaggcgtgtcatcgcgtgtcttgatgtgcgaacaaatgatcagggcgatctggtggtgacaaaaggcgacatgtacgatgtccgggaaaaaaagggcgccggaaatgcggtacgcaacctgggtaaaccggtggagatggcaaagaagtactacgaacaaggcgccgacgaggtcaccttcctcaacatcacatctttccgcaactgccctgtagcggacataccgatgctagagattctacgtcagacgagcgaaacggtctttgtaccactcacgattggcggtggcatacaggacacagtggatgtagatggcactaaaatctcagccctcgatattgcgactatgtatttcaagtctggcgcggacaaggtcagcataggctcgaatgccgtcatagcagcagaggagtactatgcgcgaggaagcaagttggcgggtaacactgcgattgagactatctcctcagcgtacggcaaccaggctgttgtcgtcagtgtcgacccaaaacgtgtctacgtgcagtcaccggaatcgacaccgcaccacgccatcaagacaagtcggcctgggcctaacggcgaagagtactgctggtaccaatgcaccatcaaaggtggtcgcgaaggtcgagactttgacgtgcggcaattagtcactgcagtcgaagccatgggcgcaggcgagatccttctgaattgcatagaccaggacggaagtaacagcgggtttgaccttgaactcatcaacgatgtcaaggatgcgatcaagatacccgtaattgctagtagcggtgccggcaatccaggacattttgaagaggtgtttgcgcgaacgcggacagacgctgcgttaggcgcgggtatgttccacagaggcgaatacactgtaaagcaggtcaaagatcacctgcaagagaaggggctagtcgtgaggccgttcgaggcggacatatag

SEQ ID NO: 99484 - protein, 550 aa, Phaeosphaeria nodorum
MPTVHLLDYVAGNVRSLVNAIEKVGYTVEWVKSPADLPSAEKLIIPGVGHFGHCLSQLEKAGYVEPIRQHIKAGKSFMGICVGIQALFEGSEEDPNVKGLGIIPSQLKKFDDKDKSVPHIGWNSANTSRTGQATDDSFYGLRPTSKYYYVHSYAAPYEEGRLEKLGWTVATARYGDEEFIGAVARDNVFATQFHPEKSGAPGLRVLKAFLEGTRSQKLPKQLSAGDTKEGLTRRVIACLDVRTNDQGDLVVTKGDMYDVREKKGAGNAVRNLGKPVEMAKKYYEQGADEVTFLNITSFRNCPVADIPMLEILRQTSETVFVPLTIGGGIQDTVDVDGTKISALDIATMYFKSGADKVSIGSNAVIAAEEYYARGSKLAGNTAIETISSAYGNQAVVVSVDPKRVYVQSPESTPHHAIKTSRPGPNGEEYCWYQCTIKGGREGRDFDVRQLVTAVEAMGAGEILLNCIDQDGSNSGFDLELINDVKDAIKIPVIASSGAGNPGHFEEVFARTRTDAALGAGMFHRGEYTVKQVKDHLQEKGLVVRPFEADI

SEQ ID NO: 99485 - DNA, 1662 bp, Aspergillus oryzae
  CDS (1)..(1662)
atgcccaccgtccatctgctcgactatgttgccgggaatgttcgttcgttggtgaatgcaattaacaaagttgggtatgatgttgaatgggttaaaaatcccgaagatctgaagaatgcggataaacttatactgcccggagttggccatttcggccattgtctctctcagctttcagagggcgggtatctagaaccgataaagaagcacatagattctgggaaacctttcatggggatctgtgtcggtctacaagcactgtttgaagggtccgaggaggaccctgatgtccccgggttggggctgatacaaaagcgaatgagcaaattcgatgacagtgcgaagagtgtaccccacataggttggaattctgccatgaacaccagtgttggtcctttaggagctcaaagtttctgtggattgagcccagacagcaaatattactatgttcactcttatgcagcattttacacacctggtgtactggagaaagatggttggtctgttgctacagccacatatggcgaggaggaattcataggtgcgatagcaaagggaaatattttcgccacgcagttccatccagagaagagcgggcaggctggcttgcggactatccgtgccttcttggatggtgaccagatgcaatcacctacgccagacacatcggtctcgcgtgagaagaagtatggtttgactcgcagagttattgcttgtctcgatgtccgcacgaacgactccggtgacctcgtcgtcacgaaaggcgatcaatatgatgtacgcgagaaggatggcgtgaattctggaggccaggtaaggaatctgggaaagccagtcgacatggctaaaaaatattacgagcaaggggcagacgaagtgacatttctgaacataacctcattcagaaactgtccagtggcagacacacctatgctggaaatattgagaagggcatccgaaactgtgttcgtacctctcacgattgggggtggaatcaaggacaccattgatccagatggcacctgcatctcggcccttgacgtcgccaccatgtatttcaaatctggggcggataaagtcagcattggctccgatgctgttattgcagctgagcaatattacgaagccggcgaaaaattgtctgggaaaaccgccatagagacaatatcaagggcatatggaaaccaagctgtggttgtgagcgtcgatcctaaacgcgtatacgtcaacggtcctgaagacactaagcatcataccatcaggacacagtatccgaatagctcagggcaaagcttttgttggtaccagtgcaccatcaaaggtggtagagaggcccgggacctggatgtttggcagttagcaaaagctgttgaggccatgggtgctggggaactacttttgaattgcattgataaagatggaagcaatagcggtttcgatctagaattaatcaacgacgtcaaaacggctatcaaaataccagtcattgcttccagtggggccggaaatcctgggcattttgcggaagttttcgagcgtactactacagatgcagcactgggcgccggcatgttccaccgtggtgaatatactgttagcgatgtcaaagactatttaagtggccaagggtttctggttcgcaaacctgaaactgacatctaa

SEQ ID NO: 99486 - protein, 553 aa, Aspergillus oryzae
MPTVHLLDYVAGNVRSLVNAINKVGYDVEWVKNPEDLKNADKLILPGVGHFGHCLSQLSEGGYLEPIKKHIDSGKPFMGICVGLQALFEGSEEDPDVPGLGLIQKRMSKFDDSAKSVPHIGWNSAMNTSVGPLGAQSFCGLSPDSKYYYVHSYAAFYTPGVLEKDGWSVATATYGEEEFIGAIAKGNIFATQFHPEKSGQAGLRTIRAFLDGDQMQSPTPDTSVSREKKYGLTRRVIACLDVRTNDSGDLVVTKGDQYDVREKDGVNSGGQVRNLGKPVDMAKKYYEQGADEVTFLNITSFRNCPVADTPMLEILRRASETVFVPLTIGGGIKDTIDPDGTCISALDVATMYFKSGADKVSIGSDAVIAAEQYYEAGEKLSGKTAIETISRAYGNQAVVVSVDPKRVYVNGPEDTKHHTIRTQYPNSSGQSFCWYQCTIKGGREARDLDVWQLAKAVEAMGAGELLLNCIDKDGSNSGFDLELINDVKTAIKIPVIASSGAGNPGHFAEVFERTTTDAALGAGMFHRGEYTVSDVKDYLSGQGFLVRKPETDI

SEQ ID NO: 99487 - DNA, 678 bp, Escherichia coli
  CDS (1)..(678): transl_table=11
ttggttgattggtttaggtgcgaatgtcttacgtgcacttggattagaaaaaaggtatttcagatgattacaatcattgattatggtattggaaatatacaagcatttttgaatgtatataagcgactaggcattaatgcgggtgttgctcgttctgttgatgatatttttagtgctacacatttaatactgcctggagttggggcttttgatcaagctatgactctttttaataattcaggtttacgagatagtattgaaaaacgtgtatatgaagaaaagattccaattattggtatctgtgtgggtatgcaaatgcttgcgacctctagtgaggaggggagcatgccaggtttaggatggattccaggtacggttcgagcatttagtagcaatatctcttcacaaaacctcccgatgccccacatgggatggaataatttaattaaaagaacaagtacaccattgctgaaagatttcgcagtagaaccttcattttattttttacactcatactattacgaatgtgatgacacaggtgatgtattggcaactgctaattatggtcataattttcattgtataattagcaggaataacatatatggtattcaatgtcatccagagaaaagccattcatcgggatcccaactactaaaaaattttgcagagatctaa

SEQ ID NO: 99488 - protein, 225 aa, Escherichia coli
MVDWFRCECLTCTWIRKKVFQMITIIDYGIGNIQAFLNVYKRLGINAGVARSVDDIFSATHLILPGVGAFDQAMTLFNNSGLRDSIEKRVYEEKIPIIGICVGMQMLATSSEEGSMPGLGWIPGTVRAFSSNISSQNLPMPHMGWNNLIKRTSTPLLKDFAVEPSFYFLHSYYYECDDTGDVLATANYGHNFHCIISRNNIYGIQCHPEKSHSSGSQLLKNFAEI

SEQ ID NO: 99489 - DNA, 1779 bp, Arabidopsis thaliana
  CDS (1)..(1779)
atggaggctacggcggcgccattctcttcaattgtctcttccagacaaaacttctcttcatcttcttcgattcgcgcttcttctccggcttctttattcctctcccagaagagtattggcaatgttaatcgcaaattcaaatctcccagaagcctctccgtccgcgcatcttctacctcagattctgttgtgactttgcttgactacggagctggaaatgttcggagcatccgcaatgctcttcgtcatctcggcttcagcatcaaagacgttcaaacgccgggagacattctgaatgctgatcgactcatatttccaggcgttggtgcttttgcacccgccatggatgtacttaacagaactgggatggctgaagctttgtgcaaatatattgagaatgaccgtccatttctaggcatatgtcttggtctacaactacttttcgattctagtgaagagaatggaccagtcaaaggtcttggtgtgataccgggaatagttggacgctttgatgcttcagctggtataagagtaccccacattggctggaatgctttgcaagttgggaaggattctgaaattttggatgatgttggaaaccgtcatgtctattttgttcattcgtacagggccattccatcagatgaaaataaggactggatttcgtctacctgtaattatggtgaatcatttatatcttccataagaaggggaaatgtgcatgcagttcaattccatcctgaaaagagcggggaggtggggctttctgttttaagaaggttcttgcatccaaaattacctgcaacacagaagccaatggaaggaaaggcctcaaaacttgcaaagagggtgattgcttgtcttgatgtgaggacgaatgataaaggagatctcgtagttactaaaggggatcagtatgatgtgagagagcaatctaatgaaaacgaggttcgaaaccttggcaaacctgttgatttggctgggcagtattacaaagatggtgcagatgagattagctttttaaacataactggattccgcgattttcctctaggggatttgccgatgattcaggtgttgaggcagacatcaaagaatgtctttgtaccactaactgttggaggtggtattagagactttacagatgctagtggcaggtactattctagcttggaagttgctgctgagtatttcagatccggtgctgataagatctccataggaagtgacgctgtttctgctgcagaggagttcataaaatcaggggtgaagacaggaaagagtagtttagaacagatatccagagtttatggaaatcaggcagtggttgtaagtattgatcctcgtagagtttatgtgaaccatccggatgatgtgccatacaaagtcatcagagtaactaatccaggcccaaatggagaagaatatgcccggtatcagtgcacggtcagtggaggacgagaaggtcgacctattggagcatttgagcttgcgaaagcggttgaagaattaggtgccggtgaaatactattgaactgcatagactgtgatggtcaagggaaaggattcgacatagacttagtaaagctcatctcagattcagtaggcataccggtgatcgcaagcagtggagcaggtactcccgaccacttttccgaggtgtttgagaagacaaacgcatctgccgcgcttgctgccggcattttccaccggaaagaggtaccaatccaatctgtgaaagagcacttacaagaggagcgcatagaagtcaggatctga

SEQ ID NO: 99490 - protein, 592 aa, Arabidopsis thaliana
MEATAAPFSSIVSSRQNFSSSSSIRASSPASLFLSQKSIGNVNRKFKSPRSLSVRASSTSDSVVTLLDYGAGNVRSIRNALRHLGFSIKDVQTPGDILNADRLIFPGVGAFAPAMDVLNRTGMAEALCKYIENDRPFLGICLGLQLLFDSSEENGPVKGLGVIPGIVGRFDASAGIRVPHIGWNALQVGKDSEILDDVGNRHVYFVHSYRAIPSDENKDWISSTCNYGESFISSIRRGNVHAVQFHPEKSGEVGLSVLRRFLHPKLPATQKPMEGKASKLAKRVIACLDVRTNDKGDLVVTKGDQYDVREQSNENEVRNLGKPVDLAGQYYKDGADEISFLNITGFRDFPLGDLPMIQVLRQTSKNVFVPLTVGGGIRDFTDASGRYYSSLEVAAEYFRSGADKISIGSDAVSAAEEFIKSGVKTGKSSLEQISRVYGNQAVVVSIDPRRVYVNHPDDVPYKVIRVTNPGPNGEEYARYQCTVSGGREGRPIGAFELAKAVEELGAGEILLNCIDCDGQGKGFDIDLVKLISDSVGIPVIASSGAGTPDHFSEVFEKTNASAALAAGIFHRKEVPIQSVKEHLQEERIEVRI

SEQ ID NO: 99491 - DNA, 606 bp, Campylobacter jejuni
  CDS (1)..(606): transl_table=11
atgatagcgctcattgattacaaggcgggaaatttaaactctgttgctaaggcttttgaaaaaataggagctataaatttcatagctaaaaatccaaaagatttgcaaaaagcagataaattgcttttacctggagtgggatcttttaaagaagcgatgaaaaatttaaaagaacttggttttatagaagctttaaaagagcaagttttagtacaaaaaaaacctattttaggcatttgtttaggaatgcagctttttttagaaaggggctatgaaggtggagtttgcgaaggacttggttttatagaaggtgaagtagtcaaatttgaagaggatttaaatttaaaaatcccacatatgggttggaatgagcttgaaattttaaaacaagttcctttgtatcaaggcatagataataagagtgatttttattttgtgcattctttttatgtgaaatgcaaagatgagtttgtaagtgctaaagcacaatacggacataaatttgttgcatctttacaaaaagatcatatttttgctacacaatttcaccccgaaaaaagtcaaaatttaggcttaaaacttttagaaaattttataaggctttaa

SEQ ID NO: 99492 - protein, 201 aa, Campylobacter jejuni
MIALIDYKAGNLNSVAKAFEKIGAINFIAKNPKDLQKADKLLLPGVGSFKEAMKNLKELGFIEALKEQVLVQKKPILGICLGMQLFLERGYEGGVCEGLGFIEGEVVKFEEDLNLKIPHMGWNELEILKQVPLYQGIDNKSDFYFVHSFYVKCKDEFVSAKAQYGHKFVASLQKDHIFATQFHPEKSQNLGLKLLENFIRL

SEQ ID NO: 99493 - DNA, 588 bp, Campylobacter jejuni
  CDS (1)..(588): transl_table=11
atgaaaatcatcatcatcgatacagcctgtgcgaatttagcatctttgaaattttgtctagatagattaggttttaatgcaactatcagtagggatttaaaagagcttgaaagtgcggataagctttttttacctggagtgggtaccgcaaaagaagcaatgaaaaatttagaacaatttaatcttattgattttattcaaaataccaaaaaacctttgcttggtatttgtttaggtatgcaaattttaggaaatttttctgaagaattaaatcaagaaaccttaaaactcatagattttacaactcaaaaatttaaagctaaagaaggctttacttttccacatatgggatggaatgaagtttatagctctcatgctttgtttaaaggcttagaaggggcttatttttattttgtgcatagttattgtgtaggacttgggaaatacactatagcagattgtgagtattcgcaaaaatttagcgcaagcgtaatgaaagataatttttacggagtgcaatttcaccctgaaagaagtagcgaggctggggaaattttaatttcaaattttattaaggatataggatga

SEQ ID NO: 99494 - protein, 195 aa, Campylobacter jejuni
MKIIIIDTACANLASLKFCLDRLGFNATISRDLKELESADKLFLPGVGTAKEAMKNLEQFNLIDFIQNTKKPLLGICLGMQILGNFSEELNQETLKLIDFTTQKFKAKEGFTFPHMGWNEVYSSHALFKGLEGAYFYFVHSYCVGLGKYTIADCEYSQKFSASVMKDNFYGVQFHPERSSEAGEILISNFIKDIG

SEQ ID NO: 99495 - DNA, 651 bp, Agrobacterium tumefaciens
  CDS (1)..(651): transl_table=11
atgcgtgtcgcgattatcgactacggttcgggcaatttgcgttcggccaccaaagctttcgagcgtgccgcccgcgaggctggcatcgacgcaaccatcgatctgaccgacaagccggatcacgtcgcttcggcggaccgcatcgtcctgccgggcgtcggtgcctatgcggattgcagtgcgggtctgaatgccatgcccggtatgcacgaggcgctcatcgaagccgtcgagaaaaaagcccatcctttcctcggcatctgcgtcggcatgcagctgatgtcctcgcgcggactggaaaagaccgtcagcaccgggctcggctggatcgaaggtgacgtcgtggaaatgacgccgtccgatcccactcttaaaatcccgcagatcggctggaatacgctggaaatccgccacgcgcacccgctgttcgacggcataaagaccggtgcggatgggctgcacgcctatttcgtgcattcctatcatctggcggccaagcactcgactgacgtcatcgccaccaccaattatggtggcgcgatgacggctttcgtcggccgcgacaacatggcgggcgcgcagttccacccggaaaaaagccagacgctcggccttgccctgatttccaatttcctgcgctggaagccctga

SEQ ID NO: 99496 - protein, 216 aa, Agrobacterium tumefaciens
MRVAIIDYGSGNLRSATKAFERAAREAGIDATIDLTDKPDHVASADRIVLPGVGAYADCSAGLNAMPGMHEALIEAVEKKAHPFLGICVGMQLMSSRGLEKTVSTGLGWIEGDVVEMTPSDPTLKIPQIGWNTLEIRHAHPLFDGIKTGADGLHAYFVHSYHLAAKHSTDVIATTNYGGAMTAFVGRDNMAGAQFHPEKSQTLGLALISNFLRWKP

SEQ ID NO: 99497 - DNA, 636 bp, Anabaena variabilis
  CDS (1)..(636): transl_table=11
atgccagttgttgctgttatagattatgagatgggaaatttgcattcggtttgcaaaggattagaaaaagcgggggcgactcctataattactcattctcatcaggaattaactaaggccgatgcagtcatattgccgggagtgggagcatttgacccagcagtgcagagtttgcgatcgcgtgatttagaacaaccaattaaagatacaatcgcttcaggcaaacccttcttaggtatctgtttagggctgcaaattctgtttgaatcgagtgcggaaggtactcaaccaggactaggaattatcaaaggaaaagtgcggcggtttatttctgaaccaggaattaccattccccacatgggttggaatcagttggaattaacccaaccaaaaagcattttgtgggagcatttgccaccccaaccttgggtatattttgtacattcctactatgttgacccagttgagcctcaagttcgtgctgcaactgttactcacggtacgcaaaccgttacggcagctattgcccatgaaaacctgatggcagtacaatttcatcccgaaaaatcgtcaaatattgggctgcaaatcctgtctaattttgtctcccaagtacgggaaaaaattgctgcataa

SEQ ID NO: 99498 - protein, 211 aa, Anabaena variabilis
MPVVAVIDYEMGNLHSVCKGLEKAGATPIITHSHQELTKADAVILPGVGAFDPAVQSLRSRDLEQPIKDTIASGKPFLGICLGLQILFESSAEGTQPGLGIIKGKVRRFISEPGITIPHMGWNQLELTQPKSILWEHLPPQPWVYFVHSYYVDPVEPQVRAATVTHGTQTVTAAIAHENLMAVQFHPEKSSNIGLQILSNFVSQVREKIAA

SEQ ID NO: 99499 - DNA, 2062 bp, Arabidopsis thaliana
  CDS (37)..(1815)
aattaacaatcgaagcagtgactgagtttgatatcaatggaggctacggcggcgccattctcttcaattgtctcttccagacaaaacttctcttcatcttcttcgattcgcgcttcttctccggcttctttattcctctcccagaagagtattggcaatgttaatcgcaaattcaaatctcccagaagcctctccgtccgcgcatcttctacctcagattctgttgtgactttgcttgactacggagctggaaatgttcggagcatccgcaatgctcttcgtcatctcggcttcagcatcaaagacgttcaaacgccgggagacattctgaatgctgatcgactcatatttccaggcgttggtgcttttgcacccgccatggatgtacttaacagaactgggatggctgaagctttgtgcaaatatattgagaatgaccgtccatttctaggcatatgtcttggtctacaactacttttcgattctagtgaagagaatggaccagtcaaaggtcttggtgtgataccgggaatagttggacgctttgatgcttcagctggtataagagtaccccacattggctggaatgctttgcaagttgggaaggattctgaaattttggatgatgttggaaaccgtcatgtctattttgttcattcgtacagggccattccatcagatgaaaataaggactggatttcgtctacctgtaattatggtgaatcatttatatcttccataagaaggggaaatgtgcatgcagttcaattccatcctgaaaagagcggggaggtggggctttctgttttaagaaggttcttgcatccaaaattacctgcaacacagaagccaatggaaggaaaggcctcaaaacttgcaaagagggtgattgcttgtcttgatgtgaggacgaatgataaaggagatctcgtagttactaaaggggatcagtatgatgtgagagagcaatctaatgaaaacgaggttcgaaaccttggcaaacctgttgatttggctgggcagtattacaaagatggtgcagatgagattagctttttaaacataactggattccgcgattttcctctaggggatttgccgatgattcaggtgttgaggcagacatcaaagaatgtctttgtaccactaactgttggaggtggtattagagactttacagatgctagtggcaggtactattctagcttggaagttgctgctgagtatttcagatccggtgctgataagatctccataggaagtgacgctgtttctgctgcagaggagttcataaaatcaggggtgaagacaggaaagagtagtttagaacagatatccagagtttatggaaatcaggcagtggttgtaagtattgatcctcgtagagtttatgtgaaccatccggatgatgtgccatacaaagtcatcagagtaactaatccaggcccaaatggagaagaatatgcctggtatcagtgcacggtcagtggaggacgagaaggtcgacctattggagcatttgagcttgcgaaagcggttgaagaattaggtgccggtgaaatactattgaactgcatagactgtgatggtcaagggaaaggattcgacatagacttagtaaagctcatctcagattcagtaggcataccggtgatcgcaagcagtggagcaggtactcccgaccacttttccgaggtgtttgagaagacaaacgcatctgccgcgcttgctgccggcattttccaccggaaagaggtaccaatccaatctgtgaaagagcacttacaagaggagcgcatagaagtcaggatctgagaattttctggtctgcgtgttaccataattcatgacacattcaacaagatagaatctttaccttcaataaattaaattaagtcggaaccatcggagctccaataggtctgagtgaatcctcttatagttgatttccttttgttgacagtaagactgatacaatttatggatttcccttgaaagtaagaaagcaacgtatgttcactttctcagcttttctatttaatacaaagaaagcatgtaactt

SEQ ID NO: 99500 - protein, 592 aa, Arabidopsis thaliana
MEATAAPFSSIVSSRQNFSSSSSIRASSPASLFLSQKSIGNVNRKFKSPRSLSVRASSTSDSVVTLLDYGAGNVRSIRNALRHLGFSIKDVQTPGDILNADRLIFPGVGAFAPAMDVLNRTGMAEALCKYIENDRPFLGICLGLQLLFDSSEENGPVKGLGVIPGIVGRFDASAGIRVPHIGWNALQVGKDSEILDDVGNRHVYFVHSYRAIPSDENKDWISSTCNYGESFISSIRRGNVHAVQFHPEKSGEVGLSVLRRFLHPKLPATQKPMEGKASKLAKRVIACLDVRTNDKGDLVVTKGDQYDVREQSNENEVRNLGKPVDLAGQYYKDGADEISFLNITGFRDFPLGDLPMIQVLRQTSKNVFVPLTVGGGIRDFTDASGRYYSSLEVAAEYFRSGADKISIGSDAVSAAEEFIKSGVKTGKSSLEQISRVYGNQAVVVSIDPRRVYVNHPDDVPYKVIRVTNPGPNGEEYAWYQCTVSGGREGRPIGAFELAKAVEELGAGEILLNCIDCDGQGKGFDIDLVKLISDSVGIPVIASSGAGTPDHFSEVFEKTNASAALAAGIFHRKEVPIQSVKEHLQEERIEVRI

SEQ ID NO: 99501 - DNA, 630 bp, Bacillus anthracis
  CDS (1)..(630): transl_table=11
ttgattgccattatagattatggaatgggaaatattcgtagtgtagaacaagcattaaaatacattggagcagcgtacatcgtaacgagtgataaagaagagatttttagaagtgatggagtgattttaccaggagtaggtgcatttccaaaagctatggatatattggaagaaaaagatttagttcgtgtgttacaagaaattgggcgttcaagaaaaccacttctaggcatttgcttaggaatgcagcttttatttgaaaaaagtgaggaactccaagattgtaacggattaagtttattgccaggtgttattcgaaagttaaaagttccttataaaattcctcatatgggatggaatgagttaaagaaagaaggagaaatagcgctttggaatggagtagaggacggttctttcgtatattatgtccactcttattacgcagattgtccaaatgaaattgtgtatggaataagtgattatggagtgaaagtacctggttttgtagcaaaaggaaatatatatggtgcgcagtttcatcctgaaaaaagtggtgacattggcatgcaaatgttgaaaaattttaaaggggtggtagaaacatggaaatcttcccagctatcgatttaa

SEQ ID NO: 99502 - protein, 209 aa, Bacillus anthracis
MIAIIDYGMGNIRSVEQALKYIGAAYIVTSDKEEIFRSDGVILPGVGAFPKAMDILEEKDLVRVLQEIGRSRKPLLGICLGMQLLFEKSEELQDCNGLSLLPGVIRKLKVPYKIPHMGWNELKKEGEIALWNGVEDGSFVYYVHSYYADCPNEIVYGISDYGVKVPGFVAKGNIYGAQFHPEKSGDIGMQMLKNFKGVVETWKSSQLSI

SEQ ID NO: 99503 - DNA, 591 bp, Bacteroides fragilis
  CDS (1)..(591): transl_table=11
atgaaagtagcagttatcaaatataatgcaggcaacatccgttctgtggactatgccttgaagcgcttaggggtggaagcagtggttacatctgataaagaggtgctgaaagctgccgataaagtgatctttcccggggtgggagaggccgagactaccatgcttcatctcaaggagagtggcatggatcatttcattaaagaactccgtcagccggtgctgggcatttgcctgggcatgcaactgatgtgccgcttctccgaagaggggaatgtcgattgtctgggtattttcgataccgatgtgaaacgttttgctcctcggaagcacgaggaaaaagttccccacatgggatggaataccatcagctgcctgaagagtgacctgttcaaaggattcacccgtgatgaatttgtctatttcgtacatagttattatgtgcccgtcagtgaatttaccgctgccgaaaccgattacatccggcctttcagtgccgctttgcataaagataatttctatgccacccagtttcatcccgaaaaaagcggtgaggcgggcgaaagaattataaagaatttcctggagctttag

SEQ ID NO: 99504 - protein, 196 aa, Bacteroides fragilis
MKVAVIKYNAGNIRSVDYALKRLGVEAVVTSDKEVLKAADKVIFPGVGEAETTMLHLKESGMDHFIKELRQPVLGICLGMQLMCRFSEEGNVDCLGIFDTDVKRFAPRKHEEKVPHMGWNTISCLKSDLFKGFTRDEFVYFVHSYYVPVSEFTAAETDYIRPFSAALHKDNFYATQFHPEKSGEAGERIIKNFLEL

SEQ ID NO: 99505 - DNA, 630 bp, Bacillus thuringiensis subsp
  CDS (1)..(630): transl_table=11
ttgattgccattatagattatggaatgggaaatattcgtagtgtagaacaagcattaaaatacattggagcagcgtacatcgtaacgagtgataaagaggagatttttagaagtgatggagtgattttaccaggagtaggtgcatttccaaaagctatggatatattggaagaaaaagatttagttcgtgtgttacaagaaattgggtgttcaaggaaaccacttctaggcatttgcttaggaatgcagcttttatttgaaaaaagtgaggaactccaagattgtaacggattaagtttattgccaggtgttattcgaaagttaaaagttccttataaaattcctcatatgggatggaatgagttaaagaaagaaggagaaatagcgctttggaatggagtagaggacagttctttcgtatattatgtccactcttattacgcagattgtccaaatgaaattgtgtatggaataagtgattatggagtgaaagtacctggttttgtagcaaaaggaaatatatatggtgcgcagtttcatcctgaaaaaagtggtgacattggcatgcaaatgttgaaaaattttaaaggagtggtagaaacatggaaatcttcccagctatcgatttaa

SEQ ID NO: 99506 - protein, 209 aa, Bacillus thuringiensis subsp
MIAIIDYGMGNIRSVEQALKYIGAAYIVTSDKEEIFRSDGVILPGVGAFPKAMDILEEKDLVRVLQEIGCSRKPLLGICLGMQLLFEKSEELQDCNGLSLLPGVIRKLKVPYKIPHMGWNELKKEGEIALWNGVEDSSFVYYVHSYYADCPNEIVYGISDYGVKVPGFVAKGNIYGAQFHPEKSGDIGMQMLKNFKGVVETWKSSQLSI

SEQ ID NO: 99507 - DNA, 639 bp, Bacillus subtilis
  CDS (1)..(639): transl_table=11
atgatcggcgtgatagattacggaatggggaatttatacagtgtctcaaaggcgcttgaacgtgtcggcgtgccgtattttgtttctgaaaagccggaggagctgaaagaagctgatgctttcattttgccgggagtcggttcatttggagacgcgatggacaatttgggctacacgaagcttgatcaattgattcacgatatggtctcagagggaaggctgcttctcgggatctgcctcggcatgcagcttttatttgaagaaagcgaagaaaacggcaccgcttcaggactcgggctgttaaaaggaaaagcagtcaggctgaaagcagaagatgaaaaaggaaacaagctgaaggttccgcatatgggctggaatcgtctttcttttcataatgaatctccgctgctgactaaaacagaacaaggctacgcttacttcgttcattcctattacattgacgggatggaggagaacgcgcttctggcaagcgccgattatggtgtacgagtgcctgctgtagtcggaaaaagaaacgtcttcggcgcccaatttcatccggaaaaaagcagcacggtcggaatgtctattttaacccaatttacgaaaatggcagcagaacagaaggtgaaaaaatga

SEQ ID NO: 99508 - protein, 212 aa, Bacillus subtilis
MIGVIDYGMGNLYSVSKALERVGVPYFVSEKPEELKEADAFILPGVGSFGDAMDNLGYTKLDQLIHDMVSEGRLLLGICLGMQLLFEESEENGTASGLGLLKGKAVRLKAEDEKGNKLKVPHMGWNRLSFHNESPLLTKTEQGYAYFVHSYYIDGMEENALLASADYGVRVPAVVGKRNVFGAQFHPEKSSTVGMSILTQFTKMAAEQKVKK

SEQ ID NO: 99509 - DNA, 591 bp, Bacteroides thetaiotaomicron
  CDS (1)..(591): transl_table=11
atgaaagtagcagttgtaaaatacaatgccgggaatatccgttctgtggactatgctctgaagcggttgggagtagaagcagtgattactgccgataaagaaatacttcaatctgccgataaagtgattttccccggagtaggagaggcgggaactaccatgaatcacctgaaagcaacagggctcgacgagctgatcaagaatctgcgtcagcctgtgttcggaatttgcctcggtatgcagctgatgtgccgacattctgaagaaggtgaggtggactgcctgaatatctttgatgtagacgtgaaacgttttgttccgcagaagcatgaagataaagtgccgcatatgggctggaatacgattggtaagacaaacagcaaactgttcgaaggattcaccgaagaagagtttgtctactttgtacacagtttctatgtgccggtttgtgactttactgctgctgaaaccgattatatccatccgttcagcgcggcattgcataaagataacttttatgccacccagttccatccggagaaaagcgggaagacaggtgaaagggttctgaggaactttctggatctctaa

SEQ ID NO: 99510 - protein, 196 aa, Bacteroides thetaiotaomicron
MKVAVVKYNAGNIRSVDYALKRLGVEAVITADKEILQSADKVIFPGVGEAGTTMNHLKATGLDELIKNLRQPVFGICLGMQLMCRHSEEGEVDCLNIFDVDVKRFVPQKHEDKVPHMGWNTIGKTNSKLFEGFTEEEFVYFVHSFYVPVCDFTAAETDYIHPFSAALHKDNFYATQFHPEKSGKTGERVLRNFLDL

SEQ ID NO: 99511 - DNA, 648 bp, Bifidobacterium longum
  CDS (1)..(648): transl_table=11
atgaccacagcggttgttttcgattacggtttcggcaatgtacgttccatggtgcgtgcgctcgccaatcttggcgtcgacaccaccctcacctccgactaccggcagtcgttggaggccgacggcctagtcgtgccgggcgtgggtgcgttcgccgcatgtatggaaggactgaagaaggtcgacggcgaccgtgtgatctatgatcgcatccgcgctggccgcccggtgctcggcgtgtgcgtgggcgagcagatcatgttcgaacacggtctggagcacggtgcccatgccgcaggcatcggactgatcggcggttcggtgaacctgctggacgccgacgtggtgcctcacatgggatgggacacgatcgagaccgcccccgattcggtgctgctcaacggcgtggagaacgaacggttctacttcgtgcactcctacgccgcgatggaagtgaagccggcggatacgtcccgcttcgacatcgatctgagcgattcgcccgaacgcgtgagctggtgctcgtacggccgatcgcgctttgtggccgcctacgaacacggcccgctgtccgccacgcaattccacccggaaaagtccggggacgctggctcccagctcctcaagaactggatcgccacgctgtaa

SEQ ID NO: 99512 - protein, 215 aa, Bifidobacterium longum
MTTAVVFDYGFGNVRSMVRALANLGVDTTLTSDYRQSLEADGLVVPGVGAFAACMEGLKKVDGDRVIYDRIRAGRPVLGVCVGEQIMFEHGLEHGAHAAGIGLIGGSVNLLDADVVPHMGWDTIETAPDSVLLNGVENERFYFVHSYAAMEVKPADTSRFDIDLSDSPERVSWCSYGRSRFVAAYEHGPLSATQFHPEKSGDAGSQLLKNWIATL

SEQ ID NO: 99513 - DNA, 591 bp, Blochmannia floridanus
  CDS (1)..(591): transl_table=11
atgaaaataattattattaataccaattgttctaatttatcatctgtaaaaattatgttaaataaattaggatgtaacacaataattactgatgatcctgatctcatcattcaatcagataaaatacttttacctggagtaggaactgctaatactgctatgaaacaattgaaaaaaaaaaatctcattcaattaataaaaaaatgtacccaacccaccctaggtatttgcttaggtatgcaattatttggatcatttagcaatgaaaacactcatacaaatactttaaatattattaatgttccagtaaaacatatgtattctcctaccctccctattcctcatatgggatggaataatattactattttaaaaaaacatgatttattaaatggcataaacaacaaccattatttctattttgcacatagctactgcatggaattaaactataccaccattgcttatactaattatggacaaccatttagctcagtaatagtatataaaaatttttttggagtacaattccacccagaaaaatcaagtttttctggagaacaattaattaaaaatttcctggagatataa

SEQ ID NO: 99514 - protein, 196 aa, Blochmannia floridanus
MKIIIINTNCSNLSSVKIMLNKLGCNTIITDDPDLIIQSDKILLPGVGTANTAMKQLKKKNLIQLIKKCTQPTLGICLGMQLFGSFSNENTHTNTLNIINVPVKHMYSPTLPIPHMGWNNITILKKHDLLNGINNNHYFYFAHSYCMELNYTTIAYTNYGQPFSSVIVYKNFFGVQFHPEKSSFSGEQLIKNFLEI

SEQ ID NO: 99515 - DNA, 651 bp, Bradyrhizobium japonicum
  CDS (1)..(651): transl_table=11
atgagcatcgccatcatcgattacggttccggtaatctgcattccgccgcgaaagccttcgagcgcgccgcgcgcagcctggaggacccgcaaaaggtcttcgtcaccagcgatccggatcaggcttacggcgccgatcgcctggtgctgccgggcgtcggcgccttcgccgattgccggcgcggcctcgacgccgtcaacggcatggtcgaggcgatcaccgaagcggtgcgggtcaaggcgcggccgatgttcggcatctgcgtcggcatgcagctgttcgccacccgcggcaaggagcatgtcatcacgcagggcctgaactggatcggcggcgacgtcgagaagatcacgccgcgcgacgaaagcctgaagatcccgcacatgggctggaacacgctcgacgtgctgcgcgagcacccggtgctgaacaagctgccgctcggccccaagggccagcacgcctatttcgtgcactcctaccacctcaacgccgccaatgaggcggacgtgctcgcgcgcgccgactatggcgggcctgtcaccgcgatcgtcgcgaaggacaccgccatcggcacgcaattccaccccgagaagagccagcgttttggcctcgctctgatctcgaactttttgcgatggaagccgtga

SEQ ID NO: 99516 - protein, 216 aa, Bradyrhizobium japonicum
MSIAIIDYGSGNLHSAAKAFERAARSLEDPQKVFVTSDPDQAYGADRLVLPGVGAFADCRRGLDAVNGMVEAITEAVRVKARPMFGICVGMQLFATRGKEHVITQGLNWIGGDVEKITPRDESLKIPHMGWNTLDVLREHPVLNKLPLGPKGQHAYFVHSYHLNAANEADVLARADYGGPVTAIVAKDTAIGTQFHPEKSQRFGLALISNFLRWKP

SEQ ID NO: 99517 - DNA, 651 bp, Brucella suis
  CDS (1)..(651): transl_table=11
atgcgtgttgctattattgactatggttccggcaatcttcgctcggccaccaaggctttcgagcgcgccgcccatgaaagcggcatatcggcggaaatcgacctgacttgcgatgcgcagcgggttgccagcgcagaccgcatcgtcctgcccggtgttggcgcctatgcggattgccgccgtgggctcgatgccgtacccggcatggtcgaggcgctgaacgataccgtattgaagaaagcgcgtccattccttggcatctgcgtgggtatgcagcttatgtcggaacgcggactggaaaaaaccgtcacgaacggccttggctggattgcgggcgatgtgcgtgaaatggtgccgtccgatgcatcgctgaaaattccgcagatcggctggaatcggattcacgtgaaacattcgcatccgatcttcgacggaatccccgccggcgacgacggcctgcatgcctattttgtccactcctatatgctggatgcgaaaaatgcatccgatgttctggctgtgaccgattatggcggcgacgttaccgccgccgtcgggcgcgacaacatggtgggcacccagttccatcccgaaaagagccagttgctcggcctttcgctcattgccaatttcctgaaatggaagccttga

SEQ ID NO: 99518 - protein, 216 aa, Brucella suis
MRVAIIDYGSGNLRSATKAFERAAHESGISAEIDLTCDAQRVASADRIVLPGVGAYADCRRGLDAVPGMVEALNDTVLKKARPFLGICVGMQLMSERGLEKTVTNGLGWIAGDVREMVPSDASLKIPQIGWNRIHVKHSHPIFDGIPAGDDGLHAYFVHSYMLDAKNASDVLAVTDYGGDVTAAVGRDNMVGTQFHPEKSQLLGLSLIANFLKWKP

SEQ ID NO: 99519 - DNA, 642 bp, Burkholderia cepacia
  CDS (1)..(642): transl_table=11
atgaaaacttcgattgcgattgtggattatgggatgggcaacctgcgctcggtcgcgcaggcgctcaagaaggccgagccggccgccgacgtggcgatcgtcgatacgccggccgcgattcgcgcagccgaccgcgtcgtgctgccgggccagggcgcgatgccggactgcatgcgctgcctcggcgaatcgggcctgcaggaggccgtcgtcgaagcgtcgcgcacgaagccgctgctcggcgtgtgcgtcggcgagcagatgctgttcgactggagcgcggaaggcgacacgaaggggctggggctgctgcccggcaaggtcgtgcgcttcgaactcgacggccggctgcaggacgacggctcgcgcttcaaggtgccgcagatgggctggaaccgcgtgcgccagtcgcgcgcgcacgcgctgtgggacggcgtgcccgacgatgcgtatttctatttcgtgcacagctattacgtgatgccggacgatccggcgcatacggtcggcgaaacggcgtacggcgcgccgtttacgtccgcggtcgcgcgcgacaacatcttcgcgacccaattccacccggaaaaaagcgcggaggtcgggttgcgtctgtatcgcaacttcgtacactggaaaccgtaa

SEQ ID NO: 99520 - protein, 213 aa, Burkholderia cepacia
MKTSIAIVDYGMGNLRSVAQALKKAEPAADVAIVDTPAAIRAADRVVLPGQGAMPDCMRCLGESGLQEAVVEASRTKPLLGVCVGEQMLFDWSAEGDTKGLGLLPGKVVRFELDGRLQDDGSRFKVPQMGWNRVRQSRAHALWDGVPDDAYFYFVHSYYVMPDDPAHTVGETAYGAPFTSAVARDNIFATQFHPEKSAEVGLRLYRNFVHWKP

SEQ ID NO: 99521 - DNA, 642 bp, Caulobacter crescentus
  CDS (1)..(642): transl_table=11
atgcagaccgtcgccctgatcgattacgggtcgggcaacctgcgttcggccgagaaggccctgcgtgaggcggcccgacgccgcgcgctggacgccgacatcgttgtcaccgccgaccctgaccttgtcgccaaggccgatcgcgtcttcctgcccggcgtcggggccttcgcctcgtgccgcgccgggcttgacgccaccggcgtctatgaggcgatgaaccaggccgtacacggacgcggcgtgccgttcatgggcatctgcgtcggccaccagctcctggccaccgaagggctggagttcggcgtcacccccggcctgaactggattcagggccaggtgaagaagctcgagcccaacgatccgacgctgaccatcccgcacatgggctggaacgcgatcagcctcgtgcgtcctcatgccctgttcgcgggcatcgacgacggcgcccacatgtatttcgccaactcgttcgccctgaccccttcccatgtggaagatgtcgtcgcgaccgccgaccacggcggaccgttcacggccgctgtggccaaggacaatgtcgcgggcgtacagttccaccctgaaaaatcacaagcatcagggctcgccctgctcgccaacttcctggaatggcgcccatga

SEQ ID NO: 99522 - protein, 213 aa, Caulobacter crescentus
MQTVALIDYGSGNLRSAEKALREAARRRALDADIVVTADPDLVAKADRVFLPGVGAFASCRAGLDATGVYEAMNQAVHGRGVPFMGICVGHQLLATEGLEFGVTPGLNWIQGQVKKLEPNDPTLTIPHMGWNAISLVRPHALFAGIDDGAHMYFANSFALTPSHVEDVVATADHGGPFTAAVAKDNVAGVQFHPEKSQASGLALLANFLEWRP

SEQ ID NO: 99523 - DNA, 639 bp, Chromobacterium violaceum
  CDS (1)..(639): transl_table=11
atgaaagtcgcagtcatcgactacggcatgggcaatctgcactcggtgctgaagtccctgcaggccgtcaacgaaaacggcgccgatattttcctcacccgcgacccggaagcggtggtgaaggccgacaaggtggtctttcccggccagggcgcgatgcccgactgcatgcgcgaattgaaccgccacggcttggccgaggcggtccgtgaaaccacgcaaagcaagccgttttttggaatctgcgtcggcgcgcagctattgttcgaacatagcgaagaaggagacaccgccggcctgggcctgttcccgggcaaggtggtccgcttcgccgacgaccaggtcgccggcggcgagcgtctgaaagtgccgcatatgggttggaaccaggtttaccagactcggtcccaccccttgttcgccggcatcgccgacggcgagcgcttctatttcgttcacagctaccattttgcgccggccgacgcggcgctgacgctggcggaaagcgattatccgcagcggtttgcctgtatcgtcgggcgtggcaatatattcgccacgcagtttcacaccgaaaagagccaccgggccggacttcagatgatgaagaacttcctggcctgggacggcaatgtttaa

SEQ ID NO: 99524 - protein, 212 aa, Chromobacterium violaceum
MKVAVIDYGMGNLHSVLKSLQAVNENGADIFLTRDPEAVVKADKVVFPGQGAMPDCMRELNRHGLAEAVRETTQSKPFFGICVGAQLLFEHSEEGDTAGLGLFPGKVVRFADDQVAGGERLKVPHMGWNQVYQTRSHPLFAGIADGERFYFVHSYHFAPADAALTLAESDYPQRFACIVGRGNIFATQFHTEKSHRAGLQMMKNFLAWDGNV

SEQ ID NO: 99525 - DNA, 678 bp, Colwellia psychrerythraea
  CDS (1)..(678): transl_table=11
atgacttcagcaaaaaatgtcattgtagataccggctgtgctaatttatcatctgttaagtttgccgttgagagacttggctttgaggttactatcactgatgatataacgataatccaacaagctgaaaaagttatattcccaggtgttggtagcgctaagcatgccatgaaaaacattaaagctaaaaatttagaggctgctttgcaagggttaactcagcctgtacttggcttttgtttaggcatgcagttaatgactgagtcttcaaccgaaggtaaaaaatcctcaactgaaggtaataatgatgacaatactagtcacatagtcccttgcttaaatttgatcccaacaaacgttgaaccattaaaagcacaaggaaatagattgccacatatgggctggaatacgctcactcaagtaagcaatcatcctatttttaagggaatatctgaaggcgattacttttattttgtgcatagcttcgcagcgccaatcagtgaatacaccattgccagttgtgagtacggcagtactttttctgctgctattgcgaaagataactttatcggttgtcaatttcaccctgaacgctctagtgcattaggcagtaaaataattcaaaactttctcgagttagactctacagaacttaatcaggagcttgtaaacttatga

SEQ ID NO: 99526 - protein, 225 aa, Colwellia psychrerythraea
MTSAKNVIVDTGCANLSSVKFAVERLGFEVTITDDITIIQQAEKVIFPGVGSAKHAMKNIKAKNLEAALQGLTQPVLGFCLGMQLMTESSTEGKKSSTEGNNDDNTSHIVPCLNLIPTNVEPLKAQGNRLPHMGWNTLTQVSNHPIFKGISEGDYFYFVHSFAAPISEYTIASCEYGSTFSAAIAKDNFIGCQFHPERSSALGSKIIQNFLELDSTELNQELVNL

SEQ ID NO: 99527 - DNA, 633 bp, Corynebacterium diphtheriae
  CDS (1)..(633): transl_table=11
atgaagaaagtggcacttctcgattacggttctgggaatctacgttcagcgcaacgagcgttggaacgagttggcgcagaagtagaggtaacaaacgatccggatgtagtactggctgcggacggtctcctcgtaccaggagtgggtgcttttgatgcatgcatgaaggggctaaaagcggtccaaggtgaccgaatgattggtcagcgcttggcagggggacgccctgtgatgggcatttgtgtaggtatgcagatcatgtttgattctggcaacgaacacggcatctctgcagctggatgtgggcagtggccaggaaacgtcgaaaagcttgaggctcgtgttctaccgcatatgggttggaacacggtggaagcagcgcaagactcacaactttttgctggactcgacgctgatacgcgtttttattttgtgcactcttacggtgtgcgttggtgggagttcgaaggcgacggtttaacacgtgcaccattagtaacgtgggctcagcatgaatctgaccgatttgttgccgctgtggaaaacggtgcgttgatggctacccagttccacccagagaaatctggggatgcaggtgcacaactcctgcggaattggattgatctgctgtaa

SEQ ID NO: 99528 - protein, 210 aa, Corynebacterium diphtheriae
MKKVALLDYGSGNLRSAQRALERVGAEVEVTNDPDVVLAADGLLVPGVGAFDACMKGLKAVQGDRMIGQRLAGGRPVMGICVGMQIMFDSGNEHGISAAGCGQWPGNVEKLEARVLPHMGWNTVEAAQDSQLFAGLDADTRFYFVHSYGVRWWEFEGDGLTRAPLVTWAQHESDRFVAAVENGALMATQFHPEKSGDAGAQLLRNWIDLL

SEQ ID NO: 99529 - DNA, 618 bp, Dehalococcoides ethenogenes
  CDS (1)..(618): transl_table=11
atgattgcgcttgtagattacggtgggggtaacctgaagagtgtggccaatgccatacatgctttgggttatgagtttaagctgacttcctcccctgaagagattctttcagccgaagcagttattctgcccggggtaggtgcagccgccgataccatggccggtttgcagtccaaagggctggataaagctataaaagagctggttgcgcgggatattcccctgctggctatctgcgtgggtatgcaggtgctttttgattatactgccgagggtgataataccaagtgtcttggcattttaaagggtgatgtgaaacgcctgcccgaagggttaaaaataccccagatgggctggaatcagcttaaacagagggtttcgcaccccatatttgagggtatacctgacggaatagatttttattttgttcatagttattatgccagccctgctgaccccggcattatcggggcgaccacagactacggggtggatttttgcagtctggttatcagtaaacgccttatcgctacccagttccaccctgaaaagagcggtagctacggcttaaagttatatcaaaacttttttaagatggctctgggagataaaaaatga

SEQ ID NO: 99530 - protein, 205 aa, Dehalococcoides ethenogenes
MIALVDYGGGNLKSVANAIHALGYEFKLTSSPEEILSAEAVILPGVGAAADTMAGLQSKGLDKAIKELVARDIPLLAICVGMQVLFDYTAEGDNTKCLGILKGDVKRLPEGLKIPQMGWNQLKQRVSHPIFEGIPDGIDFYFVHSYYASPADPGIIGATTDYGVDFCSLVISKRLIATQFHPEKSGSYGLKLYQNFFKMALGDKK

SEQ ID NO: 99531 - DNA, 648 bp, Deinococcus radiodurans
  CDS (1)..(648): transl_table=11
atgagcaccacccccgtccgtgcagctcccgaagtccttctcctcgattacggcgcgggcaatgtccgcagcgccgcccgcgctctggaacgcgccggaatgacggtgcgcgtgaccgacaatgccgccgacgtgccgcacgcccccgcgctggtggtgcccggtcagggccacttccggcaggtgatggaagccttcgagcacggcggctttcacggcccggtactggacgccgcccgcgccggggtgcctttgctgggcatctgtgtggggatgcagttgctctttgacggctcggaggaagcgcccggcgtgcccggcctgggcctgattgccgggcaagttcgcaagtttgcccccgcccccgagcgcaaggtgccgcagatgggctggaacgcgcttgaggcgcggggcgactcgccgctgctgcgcgggctggggccggatgcctacgcctacttcgtccactcgtactacgtgccggtggacgtgccggtcaccgacggcgccgtgaccgactacggcgtgccgttctggtcggcgctgagccggggcaacctgcacgccgcgcagtttcaccccgaaaaaagcggggcggtggggctggcgctgctggcgaatttccgccgcgaactcgccccggcctga

SEQ ID NO: 99532 - protein, 215 aa, Deinococcus radiodurans
MSTTPVRAAPEVLLLDYGAGNVRSAARALERAGMTVRVTDNAADVPHAPALVVPGQGHFRQVMEAFEHGGFHGPVLDAARAGVPLLGICVGMQLLFDGSEEAPGVPGLGLIAGQVRKFAPAPERKVPQMGWNALEARGDSPLLRGLGPDAYAYFVHSYYVPVDVPVTDGAVTDYGVPFWSALSRGNLHAAQFHPEKSGAVGLALLANFRRELAPA

SEQ ID NO: 99533 - DNA, 642 bp, Desulfovibrio desulfuricans
  CDS (1)..(642): transl_table=11
atgcttgcgatcctgaaatacaaggccggcaaccagacaagcgtgcgccgtgccctgaaccacatcgggatccccaacgtgatcacggcggaccccgccgagatcgccgcctcggaaggcatcatctttcccggcgtgggggccgccggacaggccatggacgaactgacggccgccggacttgacgctgtgctcaaagagcaggtggaagcaggcaaaccgctgctgggcatctgtgtaggctgccagataatgctggactacagtcaggaaaacgatacccgtacgctgggcatcattcccggagaatgccatctgttcaatcccgcgctggaagacgaaaccggcgcgcccatccgcgtaccgcacatgggctggaacagagtgatacccagaaagccgtgcgcacttttcaaaggcatttccgatgatgccgaattttattttgtgcacagctactttcccaacccgcagccggactatgtcattgccaccacgacgtacggcaaggaattctgttctgttcacggcgggccggggctgtgggccgtccagttccatccggaaaaaagcggcagacccggactgaagctgctcagcaacttccacgcatactgcaaggaggccgccaatgctcagtaa

SEQ ID NO: 99534 - protein, 213 aa, Desulfovibrio desulfuricans
MLAILKYKAGNQTSVRRALNHIGIPNVITADPAEIAASEGIIFPGVGAAGQAMDELTAAGLDAVLKEQVEAGKPLLGICVGCQIMLDYSQENDTRTLGIIPGECHLFNPALEDETGAPIRVPHMGWNRVIPRKPCALFKGISDDAEFYFVHSYFPNPQPDYVIATTTYGKEFCSVHGGPGLWAVQFHPEKSGRPGLKLLSNFHAYCKEAANAQ

SEQ ID NO: 99535 - DNA, 1662 bp, Emericella nidulans
  CDS (1)..(1662)
atgcccactgttcatctgcttgattatgtcgctggaaatgtgcgttccttggtgaatgccatcaacaaggttggatatgaagttgagtgggtgagatcgcccagcgatttgaaagatgtcgagaagctcatacttccaggagtcggccacttcggccattgcctttctcagctttcaagcggtggctatttgcagccgataagagagcatattgcttccgggaaaccgtttatgggaatatgtgttggtttacaatcccttttcgagagttccgaggaggatcccaacattcctggtttgggtacaatcccagcgcggttgcgcaaatttgacgcaaaaacgaagagcgtacctcatatcggttggaactcggcaacagatacccgcattgactcgactggaggccagaccttctatggattgagcccaagcagcaagtactactacgtacactcatacgccgcgccatatgagccgggaattcttgagaaagatggttggttggtcgccacggcgagttatggggaggagaaattcatcggcgcgatagcacgagataacatctttgcgacacaattccatcccgagaagagcggccaagcaggcctacgcacccttcgcgctttcttggacggagctcagctccattctgtcacattagaagactcgattttgacaggagagaaaaacggtcttacccgtaggatcatcgcctgtcttgatgttcgtacgaatgatgtcggcgatctcgttgtgactaagggcgatcaatatgatgttcgcgagaaggatggtgcggatgctggagggcaagtgaggaacctgggaaagccggttgatatggctaagaaatattacgaacagggggcagatgaggtgacgtttttaaacatcacctctttcagaaactgtccgttagccgacctccctatgctcgagattctccgaagaacgtcggagaccgtcttcgtacctttgactattggtggcggcattagggacactgtggatacagacggtactcacatcccagctctagacgtggcatcgatgtacttcaaatctggggctgacaaagtcagcattggttcggatgccgttgttgctgcggaagattattacgcagctggcaaagttctgtctggcaaaactgccattgaaactatttctaaggcgtatggaaaccaggctgtcgttgtaagcgttgacccgaagcgcgtttatgtcagccaaccagaagacacgaaacaccgtacgatagaaacgaaatttcctaacgccgccgggcaaaatttctgttggtaccagtgtactataaagggtggcagagagaccagagacttagatgtctgccagctggtgcaagccgtcgaggcaatgggtgctggggagattctgctgaattgcattgataaagacgggagcaacagtggtttcgatcttgaactgatcaaccacgtcaaagctgcagtaaaaatacccgtgattgcctctagcggagctggtatgccgaagcattttgaggaagtttttgatcaaacgacgacagatgctgctctgggtgctgggatgttccatcgtggtgagtatactgttggtgaagtcaagcaataccttgaggatagaggtttccttgttcgacgattcgagcctgatgtctga

SEQ ID NO: 99536 - protein, 553 aa, Emericella nidulans
MPTVHLLDYVAGNVRSLVNAINKVGYEVEWVRSPSDLKDVEKLILPGVGHFGHCLSQLSSGGYLQPIREHIASGKPFMGICVGLQSLFESSEEDPNIPGLGTIPARLRKFDAKTKSVPHIGWNSATDTRIDSTGGQTFYGLSPSSKYYYVHSYAAPYEPGILEKDGWLVATASYGEEKFIGAIARDNIFATQFHPEKSGQAGLRTLRAFLDGAQLHSVTLEDSILTGEKNGLTRRIIACLDVRTNDVGDLVVTKGDQYDVREKDGADAGGQVRNLGKPVDMAKKYYEQGADEVTFLNITSFRNCPLADLPMLEILRRTSETVFVPLTIGGGIRDTVDTDGTHIPALDVASMYFKSGADKVSIGSDAVVAAEDYYAAGKVLSGKTAIETISKAYGNQAVVVSVDPKRVYVSQPEDTKHRTIETKFPNAAGQNFCWYQCTIKGGRETRDLDVCQLVQAVEAMGAGEILLNCIDKDGSNSGFDLELINHVKAAVKIPVIASSGAGMPKHFEEVFDQTTTDAALGAGMFHRGEYTVGEVKQYLEDRGFLVRRFEPDV

SEQ ID NO: 99537 - DNA, 636 bp, Geobacillus kaustophilus
  CDS (1)..(636): transl_table=11
atgatcgggatcatcgactatggcatgggcaacttatacagcgtcagcaaagcgctcgagcggctcggctgtccgtatgtcctaagcggcgacaaagaggagctcgagcaggcgcgcgggctgattttgcccggtgtcggctcgtttcgcgatgcgatgcacattttaaatgagacaggcctagctgctttcatccgttcggcggttgaaaacggcacgccgctgctcggcatttgtttagggatgcagctgttgtttgacgaaagcgaagaaaacgggccgacaaaagggcttggcttgcttcgcggccgcgtcgtccgctttccgggcgtcacgaaaaccggcgagccatacaaagtgccgcacatgggctggaaccggctccgctttcatcgtccgtcgccgctccttcgtggcgtcgaggaagggcatgtctattttgtccattcgtattatgtcattccaggggatgaggacgtcgtgctcgcgagcagtgaatatgacgttgatgttccggcggtcgtcgggcgcggctgtgtgtttggcacacagtttcatccggaaaaaagcggtgcggtcggcatgagcatcttgaacaattatgtcggcatcgccacgggaagggggaacggctga

SEQ ID NO: 99538 - protein, 211 aa, Geobacillus kaustophilus
MIGIIDYGMGNLYSVSKALERLGCPYVLSGDKEELEQARGLILPGVGSFRDAMHILNETGLAAFIRSAVENGTPLLGICLGMQLLFDESEENGPTKGLGLLRGRVVRFPGVTKTGEPYKVPHMGWNRLRFHRPSPLLRGVEEGHVYFVHSYYVIPGDEDVVLASSEYDVDVPAVVGRGCVFGTQFHPEKSGAVGMSILNNYVGIATGRGNG

SEQ ID NO: 99539 - DNA, 630 bp, Geobacter sulfurreducens
  CDS (1)..(630): transl_table=11
atgaccaagattgcaattatcgactacggcatggggaatctccggtcggtccagaaggggttcgagaaggtgggcttcgaggcggttgtgactgccgaccccaaggtggtgctggaggcggaaaagatcgtccttcccggcgtgggagcctttcgcgactgcatgcgcaacctggagcagggggggttcgtggagccgatcctcagggtgatccgggaggggcgcccctttctcggcatctgcgtcgggatgcagctcctcttgaccgacagcgtggagttcggcctctaccaggggctgaacgtcattcctggccacgtcctccgttttcccgaggggatgcgcgaaggaggcgaggaactcaaagtcccccacatggggtggaaccagctctccatcaaacgccgcccaccggcctttgccgaggtggaggacggggccaacgtctatttcgtccattcatactatgaaatgcccgacgacgagagtgtcatcgccgccacctgcacctacggcgtcgagttctgcgccgccatctggaaggacaacatcgtcgccacccagttccatcccgagaagtcacaggcggtggggctgtccatactcaagaacttcggagagatgaagtga

SEQ ID NO: 99540 - protein, 209 aa, Geobacter sulfurreducens
MTKIAIIDYGMGNLRSVQKGFEKVGFEAVVTADPKVVLEAEKIVLPGVGAFRDCMRNLEQGGFVEPILRVIREGRPFLGICVGMQLLLTDSVEFGLYQGLNVIPGHVLRFPEGMREGGEELKVPHMGWNQLSIKRRPPAFAEVEDGANVYFVHSYYEMPDDESVIAATCTYGVEFCAAIWKDNIVATQFHPEKSQAVGLSILKNFGEMK

SEQ ID NO: 99541 - DNA, 681 bp, Gloeobacter violaceus
  CDS (1)..(681): transl_table=11
atggcgcgcaccccaaacattgccctggtggattacggcgtcggcaacctgcactcggcccgcaagggcctggaggcgatgggagcgcgggtgacactcagcggccagcccctgacgctgagcgccgccgacggcgtcgtgctgccgggggtgggctccttcgacacggcgattacccggctcaacgaccgggggctgggagatgcgattatccaactggtgcgcgcaggacagccgatgctgggcatctgtctggggctgcaggtgctctttgactcctctgaagaaggacgactgccgggcctggggctgctgcccggtcgggtgcgccgcttccggagcgaacccggcctcaccattccccatgtgggctggaaccaactgcactttgacaatgtcgattgcccgctgtggcgggatctggcggcgggcggttgggtttactttgtgcattcttattacgtcgatcctgcccgcgccgaggaccgcgccgcttccgccgtgcatggcagccagcacttcaccgccgccgtgtgccgggacaacctgatggcggtgcaatttcacccggaaaagtcagcggacacgggactgcgcatcctcaaaaactttgttgagcgggccgcttcgcgcagcgccgccgaagtagcggcccgctgcgctactcgccctccagcttga

SEQ ID NO: 99542 - protein, 226 aa, Gloeobacter violaceus
MARTPNIALVDYGVGNLHSARKGLEAMGARVTLSGQPLTLSAADGVVLPGVGSFDTAITRLNDRGLGDAIIQLVRAGQPMLGICLGLQVLFDSSEEGRLPGLGLLPGRVRRFRSEPGLTIPHVGWNQLHFDNVDCPLWRDLAAGGWVYFVHSYYVDPARAEDRAASAVHGSQHFTAAVCRDNLMAVQFHPEKSADTGLRILKNFVERAASRSAAEVAARCATRPPA

SEQ ID NO: 99543 - DNA, 699 bp, Haloarcula marismortui
  CDS (1)..(699): transl_table=11
atgagtgtcagacagacgactgcggacgtggtcgtcgtcgattacggactggggaacctccggagcgtcacgcgcgggctcgaacgcgccggcgcgaacgtttcgctctcggaggaccccgcagagttcgacgcggctgacggcatcgtcctgcccggcgtcggagccttctccgaagggatggacaacgctgggccgttccgcgaggcgctggtcgaacaggccgaggccgggaagcccctgttcggaatctgtctcgggatgcagatgctcctgacgacgagtgaggaggccgaccacgaaggacagggcgacgccgaggggctggacctcattccggggaagaacgtccggttcagccgcgaccagaccgtgccacacatgggctggaacgaacttgacgtgacgcgggaccatcccctcgtcgagggcgtcgacagcgtggggtcgaagaccccacgggcagacggaaccggtggttccgtcgacggcgaacacgcctacttcgtccactcctactacgccgttcctgacgacgagagcgcgacggtggcgacgacggactacgggacagacttcgcatcgattgttgccaacgacgccggcaacgtcttcgggacgcagttccacccggagaagtcgggcgaaaccgggcttcgcatcctccggaactacgtcgactactgtctcgaccactga

SEQ ID NO: 99544 - protein, 232 aa, Haloarcula marismortui
MSVRQTTADVVVVDYGLGNLRSVTRGLERAGANVSLSEDPAEFDAADGIVLPGVGAFSEGMDNAGPFREALVEQAEAGKPLFGICLGMQMLLTTSEEADHEGQGDAEGLDLIPGKNVRFSRDQTVPHMGWNELDVTRDHPLVEGVDSVGSKTPRADGTGGSVDGEHAYFVHSYYAVPDDESATVATTDYGTDFASIVANDAGNVFGTQFHPEKSGETGLRILRNYVDYCLDH

SEQ ID NO: 99545 - DNA, 657 bp, Halobacterium salinarium
  CDS (1)..(657): transl_table=11
atggatacgacgggcaccgggcagcgtggggcgtcgatcgtggtcgtggactacggcctggggaacctgcggagtgtcacgcgggggttggagcgcgcgagcgccgacgtttcgatcgtcggggacccgggcgcgttggacgacgccgatggcatcgtgttgccgggggtcggcgcgttcggcgacggcatggagaacgccgggccgttccgggacgcactcaccgacgcggccgacgaggggcggcccctgttcggcatctgtctggggatgcagatgctgttgtcttcgagcgaggaggccgaccacgagggccaaggcgacgccagggggctggacctcattccggggaggaacgtccggttcaccggcacggtgaaagtcccgcatatgggctggaacgagctcgctgtcactcgcgaccacccgctcgtggggggcgtcgacggcgagtacgcctacttcgtgcactcctactacgccgcaccggacgaccccggtcacgtcgtcgcggagaccgactacggcgagcggttccccgcggtcgtcgccaacgacgccggcaacgtcttcgggacgcagttccaccccgagaagtccggggcaaccgggctgcgcatcctccggaacttcgtcgactactgcgccgaccagtag

SEQ ID NO: 99546 - protein, 218 aa, Halobacterium salinarium
MDTTGTGQRGASIVVVDYGLGNLRSVTRGLERASADVSIVGDPGALDDADGIVLPGVGAFGDGMENAGPFRDALTDAADEGRPLFGICLGMQMLLSSSEEADHEGQGDARGLDLIPGRNVRFTGTVKVPHMGWNELAVTRDHPLVGGVDGEYAYFVHSYYAAPDDPGHVVAETDYGERFPAVVANDAGNVFGTQFHPEKSGATGLRILRNFVDYCADQ

SEQ ID NO: 99547 - DNA, 654 bp, Helicobacter hepaticus
  CDS (1)..(654): transl_table=11
atgagtaagcttcgtgttggtattattaattatggtgtagggaatctcggcagtgtgcaaaatgcttttgcttttatacaaacacattttagcgatgtattaccacacacacttgaaataaaggtagaatctcaccctgaaaggctacaagattacgataaactcttattgccgggtgttggagcatttggcaatgcaatgacacatttaaaaaacactcatttagatgaggctatcagagaatttgtccaaagcggcaaattcttaattgggatttgtttaggtatgcaactgctttttgagcaaagtgaagaatttggcaatcacaaaggattaggacttattgagggcaaagtagtaggatttgaacatattgcaccactaaaagtgccacatattgggtggaatagctgtaattttactcctgaaggcaaacattcaaagctttttaggggtattgctgatggaagctttttttatttcgtgcatagctttcatattcaaacacaacctcaatttatccttgctcaatgcacctatggctatccttttggtgcgattgtccataaagataatctttttgccatacaagctcaccccgaaaaaagccataacgtaggtttaaggcttcttgcaaatttccttaccttatga

SEQ ID NO: 99548 - protein, 217 aa, Helicobacter hepaticus
MSKLRVGIINYGVGNLGSVQNAFAFIQTHFSDVLPHTLEIKVESHPERLQDYDKLLLPGVGAFGNAMTHLKNTHLDEAIREFVQSGKFLIGICLGMQLLFEQSEEFGNHKGLGLIEGKVVGFEHIAPLKVPHIGWNSCNFTPEGKHSKLFRGIADGSFFYFVHSFHIQTQPQFILAQCTYGYPFGAIVHKDNLFAIQAHPEKSHNVGLRLLANFLTL

SEQ ID NO: 99549 - DNA, 591 bp, Idiomarina loihiensis
  CDS (1)..(591): transl_table=11
atgaatgtggtgattgtcgataccgagtgtgccaacctgacatctgtccgctttgcggttgaacgtttgggctactcagtgcttattaccgatgatgcagaacaaatacgcgccgctgaccgtgtcattttgcctggcgtaggtaccgctgccgcagctatgcgtaacttacagcgcaagcaactcgtggagccgctacgggagttaacccagccggtgctgggtatttgcctgggcatgcagttactgacctcacactcagaagaaggtgacgttgactgcctgaatttaattccggcaaaaaccaaacgcctgcgcgattctggtctgcctttgccgcatatgggctggaataccctgcagccgaccgcagataacccgttagtcgacacgagcgacagctactgctatttcgtgcacagttttgctgtagcagttgatgagtacactatagccagcagcgagtatggtgagcgttttgcctcaatgatacgtcacaacaactattttggtgcgcagtttcaccctgagcgttcaggtaagactggcgaagctctgctgaaacgttttctggagttaacattatgctga

SEQ ID NO: 99550 - protein, 196 aa, Idiomarina loihiensis
MNVVIVDTECANLTSVRFAVERLGYSVLITDDAEQIRAADRVILPGVGTAAAAMRNLQRKQLVEPLRELTQPVLGICLGMQLLTSHSEEGDVDCLNLIPAKTKRLRDSGLPLPHMGWNTLQPTADNPLVDTSDSYCYFVHSFAVAVDEYTIASSEYGERFASMIRHNNYFGAQFHPERSGKTGEALLKRFLELTLC

SEQ ID NO: 99551 - DNA, 627 bp, Listeria monocytogenes
  CDS (1)..(627): transl_table=11
atgattgtaattattgactatgatacaggaaacacgaagagcatcagcaaagcacttgattttatcggactacaaaacaaaatttctagtgatgcaacagaaatctcacaggctgacggcgttattttaccaggagttggcgcttatcctgaagctatgaaagaactcactcggcgcgggctaaataaaacattaaaagaaatcgctgccggtggcaaaccaattcttggtgtttgtcttggtatgcaacttttactcgaatcaagtaacgaacatagctttactaatggtctcggtctcattcccggtcatgtcgaaaaattaccagaagatcccgaatttgccgttccacatatgggctggaatcaactacaaatcaaacgtgccaccccgcttacaaaacaacttgatggagaatacgtttattacgttcactcctattacgccaattgcccagaagaatacattatcgcaacaagtggctattctattgaagttcctggcatgataaataaaggcaatatttacggcgcccagttccatcctgaaaaaagcggccaaatcggtcttgaaattttaaaaggatttaaggaggtcacttattcatgcaaatcttcccagcaatag

SEQ ID NO: 99552 - protein, 208 aa, Listeria monocytogenes
MIVIIDYDTGNTKSISKALDFIGLQNKISSDATEISQADGVILPGVGAYPEAMKELTRRGLNKTLKEIAAGGKPILGVCLGMQLLLESSNEHSFTNGLGLIPGHVEKLPEDPEFAVPHMGWNQLQIKRATPLTKQLDGEYVYYVHSYYANCPEEYIIATSGYSIEVPGMINKGNIYGAQFHPEKSGQIGLEILKGFKEVTYSCKSSQQ

SEQ ID NO: 99553 - DNA, 585 bp, Mannheimia succiniciproducens
  CDS (1)..(585): transl_table=11
atgatcatcatcgacacaggctgtgcaaacctgtcatctgtaaaatttgcattcgatcgcttaaatattaaagcggaaattagccgtgatattgcaaccattaaatcggcggataaattgttgttgcccggtgtgggcacggcaatggcggcgatgaaaatcttgcaagatcgcaatttaatcgaaaccatccaaaacgccacccaacctatgctcggtatctgtttaggtatgcagctgatgacggagtattccagcgaaggcaatgtgccgaccctaagcctgatgagcgggcatacggatttaatcccgaacacgggtttaccgctgccgcatatgggctggaacaaagtgcgctacgagcaagatcacccgctgtttgccggtatcgagcaagacagccatttctattttgtacatagctatgcggtgttgccgaatgaacataccatcgccaccagcgattacggtgtgccttttagtgcggcgttaggctgtaaaaatttctacggcgtgcagttccatccggaacgttccggcaaaaacggcgcgcagttgttgaaaaactttgtggagaatctgtaa

SEQ ID NO: 99554 - protein, 194 aa, Mannheimia succiniciproducens
MIIIDTGCANLSSVKFAFDRLNIKAEISRDIATIKSADKLLLPGVGTAMAAMKILQDRNLIETIQNATQPMLGICLGMQLMTEYSSEGNVPTLSLMSGHTDLIPNTGLPLPHMGWNKVRYEQDHPLFAGIEQDSHFYFVHSYAVLPNEHTIATSDYGVPFSAALGCKNFYGVQFHPERSGKNGAQLLKNFVENL

SEQ ID NO: 99555 - DNA, 609 bp, Methanosarcina barkeri
  CDS (1)..(609): transl_table=11
atgaaaagaattgtgattctcgattacgggcttggaaacctccgcagtgttcaaaaagggcttgaacacgtcggatcaagtcccgcaatctcaggggatcctgaggaaattcttgccgcagacggtttaattctcccgggggtcggcgcttttgtggacgcgatgaagtgccttgaccccatcaaagggactatagaagaatacgcaaggtcaggcaagccgatgctcgggatctgtcttggacaacaggttctcatgagttcttcggaggaaggaaagcttactgacgggcttgaccttatttccggaaaggtgctgcgctttccaaaatccgaactaaaggtgcctcatattggctggaacaatatcaaaatcaagcaggaccaccctctgtttgaagggattcctgacaactctttcgtatacttcgtccactctttctatgtggacacagcatctgaaaacacccttgcgtcctgcaattatgggctggacttttcagcttctgtcgtaaattctaaaggcaatgttatgggtacccagttccaccctgaaaaaagtggagctatcgggttgaagattctgaaaaactttgtagacatgtgctga

SEQ ID NO: 99556 - protein, 202 aa, Methanosarcina barkeri
MKRIVILDYGLGNLRSVQKGLEHVGSSPAISGDPEEILAADGLILPGVGAFVDAMKCLDPIKGTIEEYARSGKPMLGICLGQQVLMSSSEEGKLTDGLDLISGKVLRFPKSELKVPHIGWNNIKIKQDHPLFEGIPDNSFVYFVHSFYVDTASENTLASCNYGLDFSASVVNSKGNVMGTQFHPEKSGAIGLKILKNFVDMC

SEQ ID NO: 99557 - DNA, 654 bp, Methylococcus capsulatus
  CDS (1)..(654): transl_table=11
atgtcttcggtggcggtcatcgattacggcatggggaatctccattccatcgccaaggcgctccagcatgcagacgcaaacgccgctgtcacggtcacgtccgatccggacgtgatcctcgcgagtgatcgcgtggtgttccccggggtgggagccatgcgtgactgcatggcgcacctcgccgagcggcgattggagcaggttgtccgccgcgccgccgctgagaagccgttcctcggcatctgtctcggcatgcaggcgttgcttgaagagagcgaggagaacggcggcacccgctgcctcggcctcattacggggcgggtgctgcggttcccggaagggctcaccggtgctgccggcgaaccgctcaagatcccgcacatgggctggaaccgtgttcatttcagcgacccatcccatccgctttgggccggtatcccggcggagagctggttctatttcgtgcatagctattacgcggcgcccgccgatccggccgacgtcgccgcgaccagcgactatcccaccccgtttgcggcggccgtggcgcggggcaaggttttcgcggtgcagttccatcccgaaaagagccaggccgccggtttgcgtctgctggccaattttctccggtgggaaccttggtcatcccgttga

SEQ ID NO: 99558 - protein, 217 aa, Methylococcus capsulatus
MSSVAVIDYGMGNLHSIAKALQHADANAAVTVTSDPDVILASDRVVFPGVGAMRDCMAHLAERRLEQVVRRAAAEKPFLGICLGMQALLEESEENGGTRCLGLITGRVLRFPEGLTGAAGEPLKIPHMGWNRVHFSDPSHPLWAGIPAESWFYFVHSYYAAPADPADVAATSDYPTPFAAAVARGKVFAVQFHPEKSQAAGLRLLANFLRWEPWSSR

SEQ ID NO: 99559 - DNA, 639 bp, Nitrosomonas europaea
  CDS (1)..(639): transl_table=11
atgaactcgattgccgtcgttgattacggaatgggcaacctgcgatcagtatccaaagcactggaatatgtcgattcatctgctgtcgtcactgtaaccagtgatcccgaaaccatccgatctgccgcacgcgtcgttgttcccggtcagggtgcgatgcctcattgcatgcaggcgctggatgaccagggtttacgcgaatcagttatcgaggctgctaaaaacaagcctttcctcggtatctgccttgggttgcaaatgctgttcgaggaaagtgaagaaggcaatattcgtgcactgggcattctgcctggcagagtcaaaaaactggaatctacggatacagccgatagcgacattccgaaaatcaagatccctcatatgggctggaaccaggttcaccagactctggagcacccgttatggcacgggatcgataccgacacacgtttttacttcgttcacagttattacgtggcaacagatgaaccgcaaatagtggcaggcagcaccgaatatccggttccattcacctgcgcagtggccagggataatatttttgccattcagtttcaccctgagaaaagtcattctgcaggactggcgttattgagtaatttcctgaaatggacgccctga

SEQ ID NO: 99560 - protein, 212 aa, Nitrosomonas europaea
MNSIAVVDYGMGNLRSVSKALEYVDSSAVVTVTSDPETIRSAARVVVPGQGAMPHCMQALDDQGLRESVIEAAKNKPFLGICLGLQMLFEESEEGNIRALGILPGRVKKLESTDTADSDIPKIKIPHMGWNQVHQTLEHPLWHGIDTDTRFYFVHSYYVATDEPQIVAGSTEYPVPFTCAVARDNIFAIQFHPEKSHSAGLALLSNFLKWTP

SEQ ID NO: 99561 - DNA, 597 bp, Pasteurella multocida
  CDS (1)..(597): transl_table=11
atgcaaaatataactataatcaacacccgttgcgcgaacctttcttccgtcaaatttgcttttgaccgtttaggttaccacacagaaattaccgataatatcgaaaaaatccaatccgccgacaagctgattttgcctggtgtgggaacggcaaaagcagcgatgcaaaatttggcggatttaggcttaattgaggttatccaaagcctaactcaacctgttttggggatttgtttgggaatgcaattaatgaccgactattccgaagaaggcaatttggacttattaaaactgatgtcaggcaaaaccgaaaaattaccggattgtcagttgccgttaccgcatatgggctggaataaggtgcattatgccgccgatcacccgctctttgcagagattgctcaagacagctatttctattttgtgcatagctacggcgtgttgcccaatccgcacaccgttgccacttgcgactatggtgtgccattttctgcggtaatccaacataacaatttttatggtgcacaattccaccctgagcgttctggcaaggcaggcgcgttatttttgcgtaattttgtggaaaacattaaataa

SEQ ID NO: 99562 - protein, 198 aa, Pasteurella multocida
MQNITIINTRCANLSSVKFAFDRLGYHTEITDNIEKIQSADKLILPGVGTAKAAMQNLADLGLIEVIQSLTQPVLGICLGMQLMTDYSEEGNLDLLKLMSGKTEKLPDCQLPLPHMGWNKVHYAADHPLFAEIAQDSYFYFVHSYGVLPNPHTVATCDYGVPFSAVIQHNNFYGAQFHPERSGKAGALFLRNFVENIK

SEQ ID NO: 99563 - DNA, 633 bp, Photobacterium profundum
  CDS (1)..(633): transl_table=11
atggcgagtacaaatcaaaaagttgtcatcattgataccggctgcgccaatgtatcttctgttcgctttgcgattgaacgcttgggttataccgttacgataagtaaagaaacaagcgtggtactaaatgctgataagttatttcttcccggcgtaggcacggcaagtgaagccatgaaaaacctgcaagagcgagatttagttgaactcgtcaagcaagttgataagccattactcggcatctgtttagggatgcaattactgggtgcattgtcagaagaacaaggacaaaacggtaaagagcttgttccttgtttacacctttgcgatgcccccattaaaaaattaaaaacaggtaatttacccttgccacacatgggttggaatacgattacgcccattgacaatcacccattatttcagggtattccagcaggcagctacttctattttgtacatagttatgccatgccggtttcaacaggggtcaacgattacaccatcgcccagtgtgagtatggtcagccttttagtgcggcaattcaaagtggcaattattacggtgtgcagtttcatcctgaacgttcgagcaaagcaggctctcaactgattaagaattttttagagatgtag

SEQ ID NO: 99564 - protein, 210 aa, Photobacterium profundum
MASTNQKVVIIDTGCANVSSVRFAIERLGYTVTISKETSVVLNADKLFLPGVGTASEAMKNLQERDLVELVKQVDKPLLGICLGMQLLGALSEEQGQNGKELVPCLHLCDAPIKKLKTGNLPLPHMGWNTITPIDNHPLFQGIPAGSYFYFVHSYAMPVSTGVNDYTIAQCEYGQPFSAAIQSGNYYGVQFHPERSSKAGSQLIKNFLEM

SEQ ID NO: 99565 - DNA, 618 bp, Propionibacterium acnes
  CDS (1)..(618): transl_table=11
atgtctgatccggtgcgggtcggcattatcgaccatggatcaggaaaccttcactccgctagacgtgcgttgcgtcaggtaggtgccgaggtgatcgtttccaacgacccgagtgccctactcgataccgacgctctcgtcctccccggagtgggagcgttagcggtgtgtatgacagggttgcgggctatgggcggggcccgtcttgtccgtcaatgggttgacgagggacgacctctgctgggtatctgcgtgggccaccagatgcttttcgagcgaggacgtgaacgcgacgttgacgtcaagtgccttggtgttcttcctggcgtcgttgaggagctgccagcagagcgactgccccatatggggtggaacacagtgacaccggccaccgactcagccttattccagggcgtgcaagagaggttctacttcgtccattcctatggtgtggtcgttaccggacctcacgaccacttcaccactgcgacccatcagggagccacctttgtcgcagccgcagagtatggcccggtaacgtccacgcagttccatcctgaaaagtcggggatagcaggtctcgctttgctcacacgctggctgaatcagctgagttga

SEQ ID NO: 99566 - protein, 205 aa, Propionibacterium acnes
MSDPVRVGIIDHGSGNLHSARRALRQVGAEVIVSNDPSALLDTDALVLPGVGALAVCMTGLRAMGGARLVRQWVDEGRPLLGICVGHQMLFERGRERDVDVKCLGVLPGVVEELPAERLPHMGWNTVTPATDSALFQGVQERFYFVHSYGVVVTGPHDHFTTATHQGATFVAAAEYGPVTSTQFHPEKSGIAGLALLTRWLNQLS

SEQ ID NO: 99567 - DNA, 639 bp, Pseudomonas putida
  CDS (1)..(639): transl_table=11
atgcaaacggtagccgtaatcgactatggcatgggtaacctgcactcggtggccaaggcgcttgagcacgtaggtgccggtaaagtgctggttaccagcgatgcctcagtgatccgcgaggccgaccgtgtggtgttcccgggcgtgggcgcgattcgcgactgcatggccgagatccgccgcctgggcttcgacagcctggtgcgcgaagtcagccaggaccgcccgttcctcggcatctgcgtcggtatgcaggcgctgctcgagcacagtgaggaaaacgccggcgtcgactgcattggcctgttccctggccaggtgcgctttttcggcaaagacctgcaagaagagggcgagcacctgaaggtgccgcacatgggctggaacgaagtcagccagaccatcgaccacccgctgtggcacgacatccctgatcgcgcacgtttctacttcgtgcacagctactacatcaatgccggcaagccgggccaggtggtgggtcgcggtcactatggcgtcgatttcgccgcagcgctggccgacggttcgcgttttgccgtgcagttccacccggagaagagccatacccatggcctgcagctgctgcagaacttcatcgcctgggacgggcgctggtaa

SEQ ID NO: 99568 - protein, 212 aa, Pseudomonas putida
MQTVAVIDYGMGNLHSVAKALEHVGAGKVLVTSDASVIREADRVVFPGVGAIRDCMAEIRRLGFDSLVREVSQDRPFLGICVGMQALLEHSEENAGVDCIGLFPGQVRFFGKDLQEEGEHLKVPHMGWNEVSQTIDHPLWHDIPDRARFYFVHSYYINAGKPGQVVGRGHYGVDFAAALADGSRFAVQFHPEKSHTHGLQLLQNFIAWDGRW

SEQ ID NO: 99569 - DNA, 585 bp, Pyrococcus furiosus
  CDS (1)..(585): transl_table=11
atggatagaattgcaatagtcgacctaggaattggtaatctagcaaacgtaaagaaggccctaaaaggatatataactagcgatccttacgagatagagaaagcagacaaaattgttcttcccggggttggcaatttcggggccgtggtggacaaactcgccccaataaaagatataatcattgagggaataaacgagggaaagcccttcctgggaatatgtcttggaatgcaacttcttttcgaggaaagtgaagaaagcccaggaaaagagggacttggaatattcaaaggaaaagttgtgaaactaaaaaatgtaagaaccccacatattggctggaaccaggtgtggataaagaaggaatgcaagctctttgaggggctaaagaatggcagctatttttactttgttcactcctatcatgccgtcccacaagaccccgatataatagcaacaactacagactatgaaaatgcagagtttgtctcctcagtatgctttgaaaacatatttggcgtccagttccacccagaaaagagtagcaaaaatggtcttatactcctaagaaactttaggaggttataa

SEQ ID NO: 99570 - protein, 194 aa, Pyrococcus furiosus
MDRIAIVDLGIGNLANVKKALKGYITSDPYEIEKADKIVLPGVGNFGAVVDKLAPIKDIIIEGINEGKPFLGICLGMQLLFEESEESPGKEGLGIFKGKVVKLKNVRTPHIGWNQVWIKKECKLFEGLKNGSYFYFVHSYHAVPQDPDIIATTTDYENAEFVSSVCFENIFGVQFHPEKSSKNGLILLRNFRRL

SEQ ID NO: 99571 - DNA, 588 bp, Pyrococcus kodakaraensis
  CDS (1)..(588): transl_table=11
atgatagccgtagttgacctcgggatagggaacctcgccaacgtgaggaaggccctcggaggggtgatcacgagcgacccctacgcgatagagggggccgagaagatagtcctcccgggggtcgggaacttcggggcggtgatggaaaagctggaaccgctcaggggagttataatcgatgcgataaacgacggaaagcccctgctgggtatctgcctcggcctccagcttctcttcgaggggagcgaggagagccccggaaagcctggtctgggggtcttcaggggaaatgtcgtgcgcttccagggcgttagggtgccccacatcggctggaaccaggtgtggcagaggaaggagtgcccgctcttcgagggcataaaggacggtgcctacttctacttcgtccactcctactatgctctccccgaggaggacgtaacggtgggagtgacggactacgagtcgaagggggccaaggtggtcttcacctcggccgtctgcagggacaacgtttacgccgtccagttccaccccgagaagagcgggaggaacgggctgaggcttttggagaacttcaggaggctgtga

SEQ ID NO: 99572 - protein, 195 aa, Pyrococcus kodakaraensis
MIAVVDLGIGNLANVRKALGGVITSDPYAIEGAEKIVLPGVGNFGAVMEKLEPLRGVIIDAINDGKPLLGICLGLQLLFEGSEESPGKPGLGVFRGNVVRFQGVRVPHIGWNQVWQRKECPLFEGIKDGAYFYFVHSYYALPEEDVTVGVTDYESKGAKVVFTSAVCRDNVYAVQFHPEKSGRNGLRLLENFRRL

SEQ ID NO: 99573 - DNA, 654 bp, Ralstonia solanacearum
  CDS (1)..(654): transl_table=11
atgactacgattgcaattgtcgattacggcatgggcaacctgcgctcggtggcgcaggccctgagtaccgttgccccggacgccgatgtgcgcatcagtgcgcaggccgacgagatccgggccgccgaccgggtggtgctgccggggcagggcgccatgcccgactgcatggcggccttcgaccagtccggactgcgcgaagccgtgctcgaggccgcgcgcaccaagccgatgctcggcgtgtgcgtgggcgaacagatgctgctggagcgcagcgccgaggcgcgcgccggcgaggcgttcacggcgggcctggggctgatttccggcgatgtgatccgcttcgacctggacggccggttgcagccggacggttcgcggtacaaagtgcctcagatgggctggaaccgcgtgcaccagagccgaacccatgcgctgtgggccggcgtgccggaccagagctacttttacttcgtgcacagttactatgcacggccggcgcaccccgacgaatcggtcggggagaccgaatacggtgtgcggtttacctgcgccattgcccgggataatattttcgcaacacagtttcacccggaaaaaagtgcgcaggccggcttgcagatctaccggaatttcgtgcactggaagccctga

SEQ ID NO: 99574 - protein, 217 aa, Ralstonia solanacearum
MTTIAIVDYGMGNLRSVAQALSTVAPDADVRISAQADEIRAADRVVLPGQGAMPDCMAAFDQSGLREAVLEAARTKPMLGVCVGEQMLLERSAEARAGEAFTAGLGLISGDVIRFDLDGRLQPDGSRYKVPQMGWNRVHQSRTHALWAGVPDQSYFYFVHSYYARPAHPDESVGETEYGVRFTCAIARDNIFATQFHPEKSAQAGLQIYRNFVHWKP

SEQ ID NO: 99575 - DNA, 651 bp, Rhizobium loti
  CDS (1)..(651): transl_table=11
atgcgggtagcaatcatcgactacggctcgggcaatctgcgctcggccaccaaggccttcgagcgcgccgcgcgcgaaggaggcatatcggccgagatcgacctgacggccgatgccgaccgggtgcgcacggccgaccgcatcgtcctgcctggcgtcggcgcctatgccgactgcgcggccggcctgcgtgccgtcgacggcatgtgggaagcggtcgaggacgtcgccatcgctcagagccggcccttcctcggcatctgcgtcggtatgcagctgatgtctgagcgcggcctggaaaagaccgtcacccatggcttcggctggatctcgggcgacgtcaaggagatcacgcccaccgatccggcgctgaaaatcccgcagatcggctggaacacgatcgagctcaggcgccaacacccgctgtttgccggcatcccgaccggaccagaggggctgcacgcctatttcgtgcattcctaccatctcgacgcgaaaaagccggacgagattctggccgtcgccgactatggcggtccggtgacggcggccgtcgcccgcgacaatctcgtcggcacgcagttccatcccgaaaagagccaggcgctgggtctggcgctgatcaccaatttcctgcggtggaggccctga

SEQ ID NO: 99576 - protein, 216 aa, Rhizobium loti
MRVAIIDYGSGNLRSATKAFERAAREGGISAEIDLTADADRVRTADRIVLPGVGAYADCAAGLRAVDGMWEAVEDVAIAQSRPFLGICVGMQLMSERGLEKTVTHGFGWISGDVKEITPTDPALKIPQIGWNTIELRRQHPLFAGIPTGPEGLHAYFVHSYHLDAKKPDEILAVADYGGPVTAAVARDNLVGTQFHPEKSQALGLALITNFLRWRP

SEQ ID NO: 99577 - DNA, 651 bp, Rhizobium meliloti
  CDS (1)..(651): transl_table=11
atgcgggtcgccatcattgactacgggtcgggcaatctgcgctcggctacgaaggccttcgagcgcgccgcccgcgaggcgggcatcgcggccgaaatcgatctcaccgacaggccggaacgggtggccacggccgatcgcatcgtgctgccgggcgtcggcgcctatgccgattgccgccgcggcctcgccgtcgtggagggcatggaggaagcgctgacggaggcggtcgagaaaaccggccgccccttcttcggcatctgcgtcggcatgcagctcatgtcgtcccgcggactcgaaaagacggtgacgaaaggtttcggctggatcgccggcgatgtcgtcgggatgacgcccgaggacccctcgctcaagatcccccagatcggctggaacacgcttgatctcaagcgcccgcacccgctcttcgacggcattccgaccggcgagaacggtctgcacgcctatttcgtccattcctaccacctcgcggcggagcgtgccgaagacgtggtggccgaggcgggctatggcggcccggtgacggccttcgtcgcacgcgacaacaaggcgggctcgcagttccatccggaaaagagccaggcgctcggccttgccctcatttccaatttcctgcgctggaagccctga

SEQ ID NO: 99578 - protein, 216 aa, Rhizobium meliloti
MRVAIIDYGSGNLRSATKAFERAAREAGIAAEIDLTDRPERVATADRIVLPGVGAYADCRRGLAVVEGMEEALTEAVEKTGRPFFGICVGMQLMSSRGLEKTVTKGFGWIAGDVVGMTPEDPSLKIPQIGWNTLDLKRPHPLFDGIPTGENGLHAYFVHSYHLAAERAEDVVAEAGYGGPVTAFVARDNKAGSQFHPEKSQALGLALISNFLRWKP

SEQ ID NO: 99579 - DNA, 618 bp, Rhodopirellula baltica
  CDS (1)..(618): transl_table=11
atgatcaccatcgttgactatcaaatgggaaacctccgcagtgtccaaaaggcggtggaacgttcgggcgtggaggcggagatcaccagtgatgctagccagatcgcagcggccgagcgattgatcctgccgggtgtgggagcgtttggggatgcgattggcgagattcgtcgccgcgatctggagaagccgatcaaagatttcatcgcttcgggcaaaccctttttgggaatctgcctggggctgcagatgctgttcgagcaaggcttcgagggcggcacccacgaagggctcggcgtgttgggcggcgatgtggtcgcattcgaattgcccgccgagttcaaggtcccacacatgggttggaacgcggtcgatgtgaaggacgccggtgccgacctcgggattcaatccggaacgcatttctactttgtccactcctatttcgttcgcccggccgatccatcggtggtcgcattgacatgtgattacggtggcgagttttgtgccgccgtgcgtcgtggcaatttgatggcgacccagttccaccccgagaagagccagggagacggactgcgattgatgcagcgtttcgcgaccgcgccggtcgaagtcgcctga

SEQ ID NO: 99580 - protein, 205 aa, Rhodopirellula baltica
MITIVDYQMGNLRSVQKAVERSGVEAEITSDASQIAAAERLILPGVGAFGDAIGEIRRRDLEKPIKDFIASGKPFLGICLGLQMLFEQGFEGGTHEGLGVLGGDVVAFELPAEFKVPHMGWNAVDVKDAGADLGIQSGTHFYFVHSYFVRPADPSVVALTCDYGGEFCAAVRRGNLMATQFHPEKSQGDGLRLMQRFATAPVEVA

SEQ ID NO: 99581 - DNA, 645 bp, Rhodospirillum rubrum
  CDS (1)..(645): transl_table=11
atgcgtgtcgcgcttatcgattatggctcgggcaatctccgttcggcggcgaaagccctcgaacgggccgctcgcgacggtggagtcgccgccgaaatcgtcgttacccgcgatgtcgagggggtcctgggggccgatcgcgtggtgctgcccggcgtcggcgccttcgccaattgccggcgcggcttgcagggcatcgatggcatggtcgaggccctggccgaggtggcgctggtccgcgcccgccccttccttggcatctgcgtcggcatgcagctgctggccgacgagggcgtggaatatggccgtcaccccggtctgggatggatcggcggcaccgtggaagcgatcagcccggccgaccccgccctcaagatcccccacatgggatggaacagcctggattttcaggccgatagtcatgccttgctcgccggcatcgagccggggacccatgtctatttcgtccatagctaccacttccgccccgccgacccggcgacgcgcttggccagcgttgaatacggcgggccgctgaccgcgatgatcggccgggaaaatctggtcggaacccagttccatcccgagaaaagccaggccgccgggctgcgcctgatcgccaatttcctgcgctgggccccgtga

SEQ ID NO: 99582 - protein, 214 aa, Rhodospirillum rubrum
MRVALIDYGSGNLRSAAKALERAARDGGVAAEIVVTRDVEGVLGADRVVLPGVGAFANCRRGLQGIDGMVEALAEVALVRARPFLGICVGMQLLADEGVEYGRHPGLGWIGGTVEAISPADPALKIPHMGWNSLDFQADSHALLAGIEPGTHVYFVHSYHFRPADPATRLASVEYGGPLTAMIGRENLVGTQFHPEKSQAAGLRLIANFLRWAP

SEQ ID NO: 99583 - DNA, 639 bp, Rhodobacter sphaeroides
  CDS (1)..(639): transl_table=11
atgctgacggtcctcgtcgattacgacagcggcaatctccactcggccgaaaaggcgttccagcgcatggcgaccgagaccggggccgggcaggtcctcgtgtcggacaggcccgaggatgtggcgcgcgccgaccggatcgtgctgccgggcgacggcgccttcccggcctgccgccgcgcgctcggcagctacggcggcctgtccgaggcgatcgaggaggcggtgacgcggcgcgcacggcccttcctcggcatctgcatcggcatgcagatgatggccacgcgcggtctcgaacatgaggagacgccgggcttcggctggatcgcgggcgaggtggtgcggatcgcgccctccgacccgcatctgaaggtgccgcacatggggtggaacgacctgacggtcgaccatccccacccggtgctgacggggatcgagacgggcgatcacgcctatttcgtccattcctaccatttccaggtggcccacgatgccgagcggctggcccatgccgactatggcgcggacatcacggccatcgtggggcgcgacacgatggtgggcacgcagttccacccggagaagagccagaagaccggcctgcggctgatcgccaacttcctgacctggaagccctga

SEQ ID NO: 99584 - protein, 212 aa, Rhodobacter sphaeroides
MLTVLVDYDSGNLHSAEKAFQRMATETGAGQVLVSDRPEDVARADRIVLPGDGAFPACRRALGSYGGLSEAIEEAVTRRARPFLGICIGMQMMATRGLEHEETPGFGWIAGEVVRIAPSDPHLKVPHMGWNDLTVDHPHPVLTGIETGDHAYFVHSYHFQVAHDAERLAHADYGADITAIVGRDTMVGTQFHPEKSQKTGLRLIANFLTWKP

SEQ ID NO: 99585 - DNA, 1626 bp, Schizosaccharomyces pombe
  CDS (1)..(1626)
atgattgtttcaatagttgattatggtagtggaaacgttcgatccttaatcaatgccgttaggtatttagggtttgaaacacaatggatcaggaatccccatgatattgaaaaagctgaatgcttgatttttcctggtgttggaaactttggtttcgtatgcgattccttagcaaagcaaggatttttagaacccttgcgtcgctatgctttgtctggcaaaccttttatggctgtatgcgttggaatccaagcattattcgaggggtctgttgaagcaccacattctaaagggttgggcgtatttccggggttagtccaaaggtttgacaacgatgacaagaccgtccctcatattggttggaattcttgtgctgtacgatctgacacttcaaaagagttttttggtatgcgcccacatgacaaattttattttgtgcactcttatatgattccagaaaagggacttatccttcctccagagttcaaaattgctaccacgaaatatggaaatgaaacctttgtaggtgctattgtaaagaataattttttagctacccaatttcatccggaaaaaagtggatctgcaggtttgcgttgtttaaaggcatttttaaccggtaattatgagcaacctataagtggtgaagcatctaaacttatagagaactcctttggcggattaacaaagcgtattattgcttgcttagatgtccgttccaacgacgctggtgaccttgtagttacaaaaggtgatcaatatgatgtccgtgaaaaatcttctggaagcgaggttagaaatcttggaaaacctgtggagttatgtcaaagatattttcaagaaggcgctgacgaagtcgtttttttgaacatcacttcatttagaaattgtccaatggccgatgcacctatgttacaggttttagaaaaggcagctcaaacagtatttgtacctttaacagtaggtggtggaatcagagatgtatcagatcctgatgggacttttcatcctgctgtcgaagttgctggtatttactttagatcaggtgccgacaaagtatctattggaagtgacgccgtttatgccgcagaaaagtattacgaaaatgggaagaaattgagtggaaaaactgctatagaaacaatttctaaggcctatggtaatcaggcagttgttatttcggttgatcctaaacgtcagtatgtaaaagttcctgaagatactaaacaccatgttgtgaaaacatctcggcttggacctaatggagaagcatattgttggtatcagtgcaccgttaaaggaggtcgtgaatatcgtgatattgatgttgttgaacttactcgtgcttgtgaagcaatgggtgctggtgaagtactattaaattgtatggatcaagacggttcaaatgctgggtatgacatagaacttgttcgtcttgttaaaaactctgtgaatattccagtaatagcttcaagtggtgctggtattccccaacattttgaagaagtatttaaagaaacggattgtgatgcagctcttgccgccggaatttttcatcgacaaacttgtcgcatagaagacgtcaaagaatatctggcaatacacgacgttctggttcgcacttag

SEQ ID NO: 99586 - protein, 541 aa, Schizosaccharomyces pombe
MIVSIVDYGSGNVRSLINAVRYLGFETQWIRNPHDIEKAECLIFPGVGNFGFVCDSLAKQGFLEPLRRYALSGKPFMAVCVGIQALFEGSVEAPHSKGLGVFPGLVQRFDNDDKTVPHIGWNSCAVRSDTSKEFFGMRPHDKFYFVHSYMIPEKGLILPPEFKIATTKYGNETFVGAIVKNNFLATQFHPEKSGSAGLRCLKAFLTGNYEQPISGEASKLIENSFGGLTKRIIACLDVRSNDAGDLVVTKGDQYDVREKSSGSEVRNLGKPVELCQRYFQEGADEVVFLNITSFRNCPMADAPMLQVLEKAAQTVFVPLTVGGGIRDVSDPDGTFHPAVEVAGIYFRSGADKVSIGSDAVYAAEKYYENGKKLSGKTAIETISKAYGNQAVVISVDPKRQYVKVPEDTKHHVVKTSRLGPNGEAYCWYQCTVKGGREYRDIDVVELTRACEAMGAGEVLLNCMDQDGSNAGYDIELVRLVKNSVNIPVIASSGAGIPQHFEEVFKETDCDAALAAGIFHRQTCRIEDVKEYLAIHDVLVRT

SEQ ID NO: 99587 - DNA, 666 bp, Shewanella oneidensis
  CDS (1)..(666): transl_table=11
atgtcagcaaacacagatgaatttgatgtggtcatcatagacacaggttgcgccaacttaagctcggtacgtttcgcctttgagcgcctaggcgcgaacgtcttagtgaccgacgacaaggccagcattaaagccgccaaacgtgtggtattgccgggtgtcggtagcgctggcgccgccatggcctcattaaccgaaaaagccttagtcgaattaatccaagggttaacccaacccgtgctgggcgtgtgtttagggatgcaaatgctcaccctgctctctaaagaacgcggcggtcaagccttagactgccaagctcatgattgcaagtgcttaggcattattccaaccgagattgacgagctaaacagtcaaacccttaaggccgaaggtttacctctgccgcacatgggctggaaccaactgacctttagtaatccctctcaggttcacccgctgttcgccggcgtggaagccggcagttacgtgtattttgtgcacagctaccgcgcgccattaagcgactacaccctcgcccaatgccgttatggtgaggactttagcgccgccatcggtaaagacaactttatgggcgtgcaattccaccctgaaaaaagtgccgccgtgggcgcgcaaatcctaggtaactttttaaaaatgcaataa

SEQ ID NO: 99588 - protein, 221 aa, Shewanella oneidensis
MSANTDEFDVVIIDTGCANLSSVRFAFERLGANVLVTDDKASIKAAKRVVLPGVGSAGAAMASLTEKALVELIQGLTQPVLGVCLGMQMLTLLSKERGGQALDCQAHDCKCLGIIPTEIDELNSQTLKAEGLPLPHMGWNQLTFSNPSQVHPLFAGVEAGSYVYFVHSYRAPLSDYTLAQCRYGEDFSAAIGKDNFMGVQFHPEKSAAVGAQILGNFLKMQ

SEQ ID NO: 99589 - DNA, 591 bp, Shigella flexneri
  CDS (1)..(591): transl_table=11
atgaacgtggtgatccttgatactggctgcgccaacctgaactctgtgaagtctgccattgcgcgccacggttatgaacccaaagtcagccgtgacccggacattgtgttgctggccgataaactgtttttacccggcgtcggcaccgcacaagcagcgatggatcaggtgcgtgagcgcgagctgtttgatctcatcaaagcctgtacccaaccggtgctgggcatctgcttagggatgcaactcctgggacgacgcagcgaagagagcaatggcgtcgacttgctgggcatcatcgacgaagacgtgccgaaaatgaccgactttggtctgccactgccacatatgggctggaaccgcgtttatccgcaggcaggcaaccgcctgtttcaggggattgaagacggcgcgtacttttactttgttcacagctacgcaatgccagtcaatccgtggaccatcgcccagtgtaattacggcgaaccgttcaccgcggcggtacaaaaagataacttctacggcgtgcagttccacccggagcgttctggtgccgctggcgctaagttgctgaaaaacttcctggagatgtga

SEQ ID NO: 99590 - protein, 196 aa, Shigella flexneri
MNVVILDTGCANLNSVKSAIARHGYEPKVSRDPDIVLLADKLFLPGVGTAQAAMDQVRERELFDLIKACTQPVLGICLGMQLLGRRSEESNGVDLLGIIDEDVPKMTDFGLPLPHMGWNRVYPQAGNRLFQGIEDGAYFYFVHSYAMPVNPWTIAQCNYGEPFTAAVQKDNFYGVQFHPERSGAAGAKLLKNFLEM

SEQ ID NO: 99591 - DNA, 639 bp, Silicibacter pomeroyi
  CDS (1)..(639): transl_table=11
atgctcaccgccatcatcgattacgaatcgggcaacctgcactcggccgaaaaggcgtttcagcgcatggcgcgcgagaccggcgcgggcgaggtggtggtgacctcggatgccgatctggtggcccgggccgaccggctggtgctgccgggtgacggcgcctttcccgcctgcgccgccgagttgcgtgggcacaagggcctatatgacgcgatggtcgaggcggtggagcagaagggtcgcccttttctgggcatctgcgtcggcatgcaactcatggccaccaccggtcacgagtatgaagagacccccggtctgggctgggtcgcaggcgacgtggttcggatcacgcctgagaacgcggcgctgaaagtgccgcatatgggctggaacgatctggtgatcgaggcggcgcatccgatctttgacgggatcgccgggggcgatcacgtctatttcgtgcattcctatcacttccgggtgacaaaccccactgagcggctggcccatgtggactatggcgggccggtcactgcggtggtcgggcgcgacaccatggttggactgcagttccaccccgagaaaagccaggccatcggcctgcgcatgatcggcaatttcctgacctggaccccctaa

SEQ ID NO: 99592 - protein, 212 aa, Silicibacter pomeroyi
MLTAIIDYESGNLHSAEKAFQRMARETGAGEVVVTSDADLVARADRLVLPGDGAFPACAAELRGHKGLYDAMVEAVEQKGRPFLGICVGMQLMATTGHEYEETPGLGWVAGDVVRITPENAALKVPHMGWNDLVIEAAHPIFDGIAGGDHVYFVHSYHFRVTNPTERLAHVDYGGPVTAVVGRDTMVGLQFHPEKSQAIGLRMIGNFLTWTP

SEQ ID NO: 99593 - DNA, 600 bp, Sulfolobus acidocaldarius
  CDS (1)..(600): transl_table=11
atgagggcagtaataatcgattatggagttgggaatttatttagtatatactcagggcttaggagagttgggtttgaggtggaaatatctaaagaaccaaagggtagtgaggacttaattgtattccctggagtaggttcctttagtgcggtatctaaatatcttgtcgctaggaaggagaaatttgaggtgctcagaagtaatgggacagggtttttgggtatttgtctaggcatgcagataatgtttgaagaaggtactgaaggtggtctgaacaaaggtttaggttggctgaaaggcagagtcgataagataaatcatccaagagttaagattccacatattggttgggataaggttaatgtgattaagtataatgagctgagtgaggggattgatgatcaatatgtgtactatgctcatagttatgtcgcttatcctactgacaaaagtgtgattttaagtactacctcgtatggtatagactatcctgccgtagttaatatcgggaatattgttggtacacagtttcatcctgaaaaaagcagtctagttggaaggaagtttttaacgaatgtatacaggtggttaagaaagtga

SEQ ID NO: 99594 - protein, 199 aa, Sulfolobus acidocaldarius
MRAVIIDYGVGNLFSIYSGLRRVGFEVEISKEPKGSEDLIVFPGVGSFSAVSKYLVARKEKFEVLRSNGTGFLGICLGMQIMFEEGTEGGLNKGLGWLKGRVDKINHPRVKIPHIGWDKVNVIKYNELSEGIDDQYVYYAHSYVAYPTDKSVILSTTSYGIDYPAVVNIGNIVGTQFHPEKSSLVGRKFLTNVYRWLRK

SEQ ID NO: 99595 - DNA, 639 bp, Symbiobacterium thermophilum
  CDS (1)..(639): transl_table=11
atggcccggatcgtcatcgtggactacgggatgggcaacctcgccagcgtccggaacgccctgcgggcggtgggcttcgaggcggcggtgagcgacgacccggcggcggtggcgggggcggacggcctggtgctgcccggcgtgggcgcgttcggcaccggcatgcagaacctggcccgccgcggcctcgatcaggccgtgcggcaggcggccgcagccggccggccggtcctgggcatctgcctggggatgcagctcctcctcgcggagggcgacgagggcggcccgcgcccggggctgggcctcctggaggggcgggttgcgcgccttcccgacgggctgccccttccccagatcggctggaacctggtggagccgcagcgggaccacccgctcttcgccgggctgccgacccccttctgggcctatttcgaccacgcttacgcggtggagggcgaaccgccgtccacggcgctggccctgaccgactacggccgcacctacccctcggtggtgggccgcggcaacctgctgggtatccagttccatcccgagaagtcctcccgggcgggactccggatgctggccaactgggggagaatggtatgcgacttgatctctacccggccatcgacctga

SEQ ID NO: 99596 - protein, 212 aa, Symbiobacterium thermophilum
MARIVIVDYGMGNLASVRNALRAVGFEAAVSDDPAAVAGADGLVLPGVGAFGTGMQNLARRGLDQAVRQAAAAGRPVLGICLGMQLLLAEGDEGGPRPGLGLLEGRVARLPDGLPLPQIGWNLVEPQRDHPLFAGLPTPFWAYFDHAYAVEGEPPSTALALTDYGRTYPSVVGRGNLLGIQFHPEKSSRAGLRMLANWGRMVCDLISTRPST

SEQ ID NO: 99597 - DNA, 612 bp, Vibrio cholerae
  CDS (1)..(612): transl_table=11
atgactcagaatgtggtgattattgatactggctgcgccaatatctcctcggtcaaattcgctattgagcgattaggttatgcggtgacgatttcgcgcgatccgcaagtggtactcgcggcagataaactgtttctgcccggagttggcaccgcgagcgaagcgatgaaaaacctcaccgaacgtgatttgatcgagctagtgaagcgggttgaaaagccattgcttggcatctgtcttggcatgcaactgcttggcaaattgtccgaagaaaaaggccagaaagccgatgagattgtgcagtgcttagggttagtcgatggcgaagtccgtttgctgcaaaccggcgatctgccgttgccacacatgggctggaacacggtgcaagtgaaagaggggcatccactgtttaacggtatagaacctgatgcgtacttctacttcgtgcacagttttgctatgcccgttggcgattacaccattgcccagtgcgaatatggtcagccgtttagcgcagcgattcaagcagggaactattacggggtgcaatttcaccctgagcgctcttcaaaagcgggcgcacgcttgattcaaaactttcttgagctttag

SEQ ID NO: 99598 - protein, 203 aa, Vibrio cholerae
MTQNVVIIDTGCANISSVKFAIERLGYAVTISRDPQVVLAADKLFLPGVGTASEAMKNLTERDLIELVKRVEKPLLGICLGMQLLGKLSEEKGQKADEIVQCLGLVDGEVRLLQTGDLPLPHMGWNTVQVKEGHPLFNGIEPDAYFYFVHSFAMPVGDYTIAQCEYGQPFSAAIQAGNYYGVQFHPERSSKAGARLIQNFLEL

SEQ ID NO: 99599 - DNA, 618 bp, Wolinella succinogenes
  CDS (1)..(618): transl_table=11
atggtcggaattgtcaattacaacattgggaatcttgccagtgttttaaacgctcttgtgaaagtgggagccaaggcgcagatcgaaaaagaaccttcgcgcctcttggagtatgatcggctgattttgccgggtgtgggggcatttggcgatgcgatggagcatcttgttcaaagcggtatgaaagaggcagtgctggagtttgccaagagcggtaaacccctccttggaatctgccttggaatgcaactcctttttgagaagagctatgagtttggcgagcacgcgggactagggcttttagagggagagattatcccttttgataaaacgcgtatgggagaggggtataaaatccctcaaatgggatggaatcgcttctatgctaaaaagaaaagtccgcttttaaagggcttggaggaggggttttatctctactatgtgcatagttttcatgcggtggccaagagggaggaggatgtgctgggagagagcgtttatggctatccttttgtgagcgccatagagcgcgataatgtggcaggcttccagcctcaccccgaaaagagccatgatgtggggcttaggatattgaagaatttttgtgaaattgggtaa

SEQ ID NO: 99600 - protein, 205 aa, Wolinella succinogenes
MVGIVNYNIGNLASVLNALVKVGAKAQIEKEPSRLLEYDRLILPGVGAFGDAMEHLVQSGMKEAVLEFAKSGKPLLGICLGMQLLFEKSYEFGEHAGLGLLEGEIIPFDKTRMGEGYKIPQMGWNRFYAKKKSPLLKGLEEGFYLYYVHSFHAVAKREEDVLGESVYGYPFVSAIERDNVAGFQPHPEKSHDVGLRILKNFCEIG

SEQ ID NO: 99601 - DNA, 603 bp, Xylella fastidiosa
  CDS (1)..(603): transl_table=11
atgaccgaggttgctttgattgatgccggtggtgccaatcttggttcggtgcgctacgccttgcagcgtttgggggtagaaccgcgcttagtgtgcgatgcccgcggactggagggggctgcgcgggtgattctccccggggtcgggagcgcacctgaagcgatggcacggctcaacaatcaaggcttgattgagccattgctccggctacaggtgccgctgattgggatctgcctgggcatgcaattgttgtttgagcactctgaggaaggcgatgtgccctgcttgggattgctgcctggccgcgtccgccgcctgacgccggctcctagcatccgtgtgccgcacatgggctggaatcgcttgttgccgctgcgcgcttcgccattgctggcggaggtgcccgagggggcgaacgcttattttgtgcatagctatgcagtgcccttgaccacggcagcggtggccgcctgcgatcacggcggcatgtttaccgcgattgtgcagcagggagtgcgttgtggcgcgcaattccatccagagcgttcggccgaaacaggcgcacgtatcctgcgtaattttcttgaaatggatgccgcatga

SEQ ID NO: 99602 - protein, 200 aa, Xylella fastidiosa
MTEVALIDAGGANLGSVRYALQRLGVEPRLVCDARGLEGAARVILPGVGSAPEAMARLNNQGLIEPLLRLQVPLIGICLGMQLLFEHSEEGDVPCLGLLPGRVRRLTPAPSIRVPHMGWNRLLPLRASPLLAEVPEGANAYFVHSYAVPLTTAAVAACDHGGMFTAIVQQGVRCGAQFHPERSAETGARILRNFLEMDAA

SEQ ID NO: 99603 - DNA, 2429 bp, Saccharomyces cerevisiae
  CDS (420)..(2078)
tagatgtttttttaatgatatatgtaacgtacattctttcctctaccactgccaattcggtattatttaattgtgtttagcgctatttactaattaactagaaactcaatttttaaaggcaaagctcgctgacctttcactgatttcgtggatgttatactatcagttactcttctgcaaaaaaaaattgagtcatatcgtagctttgggattatttttctctctctccacggctaattaggtgatcatgaaaaaatgaaaaattcatgagaaaagagtcagacatcgaaacatacataagttgatattcctttgatatcgacgactactcaatcaggttttaaaagaaaagaggcagctattgaagtagcagtatccagtttaggttttttaattatttacaagtaaagaaaaagagaatgccggtcgttcacgtgattgacgttgaaagtggtaacctacagtcactaaccaatgcaattgagcatttaggttacgaagtacaactggtgaaatcaccaaaggattttaacatatcaggcacgtcaagattgattttgcctggtgtcggaaattatggccatttcgtcgacaatttatttaatagaggattcgaaaagccgataagagaatacattgaatctggaaaaccaataatgggaatttgcgtcgggctacaagcgctctttgccggttccgtggaaagccctaagagtacgggtctgaactacattgattttaagttgtccaggttcgatgattcagaaaagccagtaccagaaataggttggaattcttgcattccctcggaaaacctattctttggattggatccatacaagaggtactatttcgtccattcttttgctgccattctgaattcagaaaagaaaaaaaacctagaaaatgacggttggaaaattgcaaaagctaagtacggttcagaggaatttattgcggcagtcaacaagaataatatattcgctactcagttccatcctgaaaaatcaggtaaagctggtttgaacgtcattgagaattttttgaagcaacaaagtcctccgattccaaactatagtgcggaagagaaggaactcttaatgaatgactattcaaattatggtctaacacgcagaattattgcttgtcttgatgtacgtactaatgaccaaggtgatttggtggttactaaaggtgatcaatacgatgtacgtgaaaaaagtgatggtaaaggtgttagaaaccttggtaagcctgttcagttggcacagaaatattaccaacagggtgcggatgaagtaacatttttgaatataacttcttttagagattgtcctttgaaggatactccgatgctagaggttctgaaacaagccgcaaagacagtctttgttccattgacagtcggtggggggatcaaggatattgtcgatgttgatggaaccaaaatacctgctttagaagttgcaagtctatacttcagatctggtgctgataaagtatcgatcggtacggatgcagtctatgcagccgaaaaatactacgagttgggtaacagaggagatggaacgtcaccaatagagacaatctcgaaagcatacggtgctcaggcagttgttatttctgtcgaccctaagagagtatatgtaaattcacaagcagatacgaagaacaaagtcttcgagacagaatatccgggccccaatggagagaaatactgctggtaccaatgtacaatcaaaggtggaagagaatctagagaccttggtgtgtgggaattaacaagggcatgtgaagctctaggtgctggggagattttattgaactgcatagacaaggatggctctaattctggttatgatctggaattgatagaacatgttaaagatgcggtcaagattcccgtcattgcatccagtggcgccggtgtacccgaacatttcgaagaggccttcctaaagacccgcgcagatgcttgcttgggtgcaggtatgttccacagaggtgaattcactgttaacgatgtaaaggagtatttactagagcacggattaaaggttagaatggatgaagagtaatgtggttggatatgtatactttataatcttgactcagtctatatacgcaataatgatagatgttaaatcagacatttcacaacacaagaggatgtacagcttggagaaattgtaccaacttatatggttgtattattggtggtgtcagtaggggaagaaatagaacatatttttccactttttcattttttttttttagcgaggcatcggaaatgaaaatttttaaaaatcgatgagctcccacttcttcaacattgacgaaaggaaatatgcactaagttgttttaaatccaagatttgtctcgttttaagacttacagataaaacaatatattagaaagattaactata

SEQ ID NO: 99604 - protein, 552 aa, Saccharomyces cerevisiae
MPVVHVIDVESGNLQSLTNAIEHLGYEVQLVKSPKDFNISGTSRLILPGVGNYGHFVDNLFNRGFEKPIREYIESGKPIMGICVGLQALFAGSVESPKSTGLNYIDFKLSRFDDSEKPVPEIGWNSCIPSENLFFGLDPYKRYYFVHSFAAILNSEKKKNLENDGWKIAKAKYGSEEFIAAVNKNNIFATQFHPEKSGKAGLNVIENFLKQQSPPIPNYSAEEKELLMNDYSNYGLTRRIIACLDVRTNDQGDLVVTKGDQYDVREKSDGKGVRNLGKPVQLAQKYYQQGADEVTFLNITSFRDCPLKDTPMLEVLKQAAKTVFVPLTVGGGIKDIVDVDGTKIPALEVASLYFRSGADKVSIGTDAVYAAEKYYELGNRGDGTSPIETISKAYGAQAVVISVDPKRVYVNSQADTKNKVFETEYPGPNGEKYCWYQCTIKGGRESRDLGVWELTRACEALGAGEILLNCIDKDGSNSGYDLELIEHVKDAVKIPVIASSGAGVPEHFEEAFLKTRADACLGAGMFHRGEFTVNDVKEYLLEHGLKVRMDEE

SEQ ID NO: 99605 - DNA, 591 bp, Yersinia pestis
  CDS (1)..(591): transl_table=11
atggatgtggtgatcctggataccggttgtgccaatctctcctctgtcacctatgcggtacagcgtttgggttatacaccggttatcagccgcgacccggcagtcgtcttgcgagcagacaaactgtttatgccgggtgtgggcaccgcccatgccgccatggaacaattgaggcaacgcgagcttatcgaactgatcaaaagttgtactcaacccgtgctggggatctgccttggtatgcagttgctggcaaccagcagtgaggaaagtggcgggatcaccaccctcgggatgattgatgcaccagtaaaaaagatgactgattttggtctgccgctgccgcatatggggtggaatcagattaccgcacaagccggtaaccatctgttccgtggtatccctgacggaacctatttctacttcgtgcatggatatgcaatgccaatatgcccaaataccatcgcccaaaccaactacggcgagccatttaccgccgcagtagaaaaagacaacttctttggcgtgcagtttcatccggaacgttccggagcggctggggcccaattgatgaaaaactttctggagatgtaa

SEQ ID NO: 99606 - protein, 196 aa, Yersinia pestis
MDVVILDTGCANLSSVTYAVQRLGYTPVISRDPAVVLRADKLFMPGVGTAHAAMEQLRQRELIELIKSCTQPVLGICLGMQLLATSSEESGGITTLGMIDAPVKKMTDFGLPLPHMGWNQITAQAGNHLFRGIPDGTYFYFVHGYAMPICPNTIAQTNYGEPFTAAVEKDNFFGVQFHPERSGAAGAQLMKNFLEM

SEQ ID NO: 99607 - DNA, 690 bp, Zymomonas mobilis
  CDS (1)..(690): transl_table=11
atgcagggaagcaaggccgaataccttcgacaaagggtagtttgtaacgtgaaaaatcaggcatcttcaacagtcgctcttattgattacggtgcgggtaatctccgttcagttgccaatgcattattggcatcgggattagctcgcgaaaatctagttgttaccgccaatcccgatgaggttcttcaggcagaccgtgttgttttgccgggggtaggtgccttcgcttcctgtatgcaggcgttaaaggctattcctgatatggtgcccgctttggaaaaggctgttcttgaaaaaggacggccttttttgggtatctgcgtcggcatgcagcttctcgctgaccaaggtgaagaatatggtgtccatcaaggtttgggttggatcaaaggcaaggtaacaccactccgcccgaatgatccttcttgtaaggtgcctcatatgggatggaaccagattgggctgaccacagattcgcatcctcttcttcgggcgggtgaagcctattttctgcatagctacgcttttgtgccagaagacgaatcgaccttattagcgacaactgaacatggcggtcttgtgacggccgcagtcggacgggataatattatgggtgtccaattccaccctgaaaaaagccagagctatggtctagagtttctgtcccgttttctggactggaatccctaa

SEQ ID NO: 99608 - protein, 229 aa, Zymomonas mobilis
MQGSKAEYLRQRVVCNVKNQASSTVALIDYGAGNLRSVANALLASGLARENLVVTANPDEVLQADRVVLPGVGAFASCMQALKAIPDMVPALEKAVLEKGRPFLGICVGMQLLADQGEEYGVHQGLGWIKGKVTPLRPNDPSCKVPHMGWNQIGLTTDSHPLLRAGEAYFLHSYAFVPEDESTLLATTEHGGLVTAAVGRDNIMGVQFHPEKSQSYGLEFLSRFLDWNP

SEQ ID NO: 99609 - DNA, 1743 bp, Glycine max
  CDS (1)..(1743)
atggaggcgccgccatttgcttattctgcttccacttcctctctcttttctcttcgcaacaagccactctcatcccctacaatcacccatttgggcaacaccaaaccatcaaagagtttctcggttggtgcctcctcttctagggattctgttgtgactttgcttgattacggtgctggcaatgttcggagtgtcaggaatgcaatcagattcctcgggtttgacatcaaagatgtgcaaactccgcaagatattctgaatgcaagtcggttagtttttcctggtgttggagcatttgctgctgccatggaggtgttaagcaaaactggaatggatgaagcactatgttcatatattgacaaggatcgtccatttctgggcatttgtcttggacttcaactactttttgaatctagtgaggagaatggaccagtaaaaggtcttggcttaatacctggaactgttgggcgatttgactcatcaaatggttttagagtaccacatattggctggaatgctttacaaatcactgaggactcgggaattttggatgatgttggaaatcaccatgtctattttgtgcactcttatcgtgccatgccttcagatgacaacaatgagtggatatcctccacctgtgactatggtgacaaatttatagcatctattagaagaggaaatgtgaatgcggttcaattccatccagagaagagtggagatgttggcctctctattttgggaagattcttgaatccgaagtcaaacatggcaaagaagcctggggaaggcaaagcttcaaaacttgcaaaaagggtgattgcttgtcttgatgtgagaacaaatgataagggggaccttgttgtaaccaaaggagaccagtatgatgtaagagaacatacaaaagagaatgaggtaagaaatcttggcaagccagttgatcttgctggacagtactataaagatggagctgatgaggtcagctttctaaatattactggatttcgcgacttccctcttggtgatttaccgatgctgcaggtattgcgatacacatcagaaaatgtttttgtacccttaacagttgggggaggaattagagatttcacagattcaactgggaggtactattcaagtttggaagttgcttctaaatactttaggtctggggctgataagatttccattggaagtgatgcagtttatgctgcagaagaatatttaaaagccggagtaaagactgggaagaccagcttggagcagatatcaagagtttatgggaatcaggcagtggttgttagtatcgatccgcgtagagtgtatgtaaaggatcctaatgatttgcaattgaagaccataagggtttcaagtccaggtccaaatggagaagaatatgcatggtatcaatgtacagttaatgggggacgagagggccggccaattggtgcttatgaactagcaaaagcagttgaagagcttggtgctggtgaaatactacttaattgcatcgattgtgacggtcaagggaaaggatttgatgtagatttaattaagttgatatcagatgctgtaagtatccctgtcatcgcaagtagtggtgccggtgctcctgaacacttctctgaggtgttctataaaacaaatgcatcagcagcacttgctgctggcatttttcacaggaaagaggtgcctattcagtcggtaaaagagcatttgttgaaggaaggcatagaagttcgaatctga

SEQ ID NO: 99610 - protein, 580 aa, Glycine max
MEAPPFAYSASTSSLFSLRNKPLSSPTITHLGNTKPSKSFSVGASSSRDSVVTLLDYGAGNVRSVRNAIRFLGFDIKDVQTPQDILNASRLVFPGVGAFAAAMEVLSKTGMDEALCSYIDKDRPFLGICLGLQLLFESSEENGPVKGLGLIPGTVGRFDSSNGFRVPHIGWNALQITEDSGILDDVGNHHVYFVHSYRAMPSDDNNEWISSTCDYGDKFIASIRRGNVNAVQFHPEKSGDVGLSILGRFLNPKSNMAKKPGEGKASKLAKRVIACLDVRTNDKGDLVVTKGDQYDVREHTKENEVRNLGKPVDLAGQYYKDGADEVSFLNITGFRDFPLGDLPMLQVLRYTSENVFVPLTVGGGIRDFTDSTGRYYSSLEVASKYFRSGADKISIGSDAVYAAEEYLKAGVKTGKTSLEQISRVYGNQAVVVSIDPRRVYVKDPNDLQLKTIRVSSPGPNGEEYAWYQCTVNGGREGRPIGAYELAKAVEELGAGEILLNCIDCDGQGKGFDVDLIKLISDAVSIPVIASSGAGAPEHFSEVFYKTNASAALAAGIFHRKEVPIQSVKEHLLKEGIEVRI

SEQ ID NO: 99611 - DNA, 1743 bp, Glycine max
  CDS (1)..(1743)
atggaggcgccgccatttgcttattctgcttccacttcctctctcttttctcttcgcaacaagccactctcatcccctacaatcacccatttgggcaacaccaaaccatcaaagagtttctcggttcgtgcctcctcctctagggattctgttgtgactttgcttgattacggtgcgggcaatgttcggagtgtcaggaatgcaatcagattcctcgggtttgagatcaaagatgtgcaaactccgcaagatattctgaatgcaagtaggttagtttttcctggggttggagcatttgctgctgccatggaggtgttaagcaaaactggaatggatgaagcactatgttcatatattgacaaggatcgtccatttttgggcatttgtcttggacttcaactactttttgaatctagtgaggagaatggaccagtaaaaggtcttggcttaatacctggaactgttgggcgatttgactcatcaaatggttttagagtaccacatattggctggaatgctttacaaatcactgaggactcgggaattttggatgatgttggaaatcaccatgtctattttgtgcactcttatcgtgccatgccttcagatgacaacaatgagtggatatcctccaactgtgactatggtgacaaatttatagcatctattagaagaggaaatgtgaatgcagttcaattccatccagagaagagtggacatgttggcctctctattttgggaagattcttgaatccgaagtcaaacatggcaaagaagcctggggaaggcaaagcttcaaaacttgcaaaaagggtgattgcttgtctcgatgtgagaacaaatgataagggggaccttgttgtaaccaaaggagaccagtatgatgtaagagaacatacaaaagagaatgaggtaagaaatcttggcaagccagttgatcttgctggacagtactataaagatggagctgatgaggtcagctttctaaatattactggatttcgcgacttccctcttggtgatttaccgatgctgcaggtattgcgatacacatcagaaaatgtttttgtacccttaacagttgggggaggaattagagatttcacagattcaactgggaggtactattcaagtttggaagttgcttctaaatactttaggtctggggctgataagatttccattggaagtgatgcagtttatgctgcagaagaatatttaaaagccggagtaaagactgggaagaccagcttggagcagatatcaagagtttatgggaatcaggcagtggttgttagtatcgatccccgtagagtgtatgtaaaggatcctaatgatgtgcaattgaagaccataagggtttcaagtccaggtccaaatggagaagaatatgcatggtatcaatgtacagttaatgggggacgagagggccggccaattggtgcttatgaactagcaaaagcagttgaagagcttggtgctggtgaaatactacttaattgcattgattgcgacggtcaagggaaaggatttgatgtagatttaattaagttgatatcagatgctgtaagtatccctgttatcgcaagtagcggtgctggtgctcctgaacacttctctgaggtgttctataaaacaaatgcatcagcagcacttgctgctggcatttttcacaggaaagaggtgcctattcagtcggtaaaagagcatttgttgaaggaaggcatagaagttcgaatatga

SEQ ID NO: 99612 - protein, 580 aa, Glycine max
MEAPPFAYSASTSSLFSLRNKPLSSPTITHLGNTKPSKSFSVRASSSRDSVVTLLDYGAGNVRSVRNAIRFLGFEIKDVQTPQDILNASRLVFPGVGAFAAAMEVLSKTGMDEALCSYIDKDRPFLGICLGLQLLFESSEENGPVKGLGLIPGTVGRFDSSNGFRVPHIGWNALQITEDSGILDDVGNHHVYFVHSYRAMPSDDNNEWISSNCDYGDKFIASIRRGNVNAVQFHPEKSGHVGLSILGRFLNPKSNMAKKPGEGKASKLAKRVIACLDVRTNDKGDLVVTKGDQYDVREHTKENEVRNLGKPVDLAGQYYKDGADEVSFLNITGFRDFPLGDLPMLQVLRYTSENVFVPLTVGGGIRDFTDSTGRYYSSLEVASKYFRSGADKISIGSDAVYAAEEYLKAGVKTGKTSLEQISRVYGNQAVVVSIDPRRVYVKDPNDVQLKTIRVSSPGPNGEEYAWYQCTVNGGREGRPIGAYELAKAVEELGAGEILLNCIDCDGQGKGFDVDLIKLISDAVSIPVIASSGAGAPEHFSEVFYKTNASAALAAGIFHRKEVPIQSVKEHLLKEGIEVRI

SEQ ID NO: 99613 - DNA, 1743 bp, Glycine max
  CDS (1)..(1743)
atggaggcgccgccatttgcttcttctgcttcctcttcctctctcttttctcttcgcaacaagccaccctcatcccccacaatcacccatttcggcaacaccaaaccatcgaagagtttctcggttcgtgcctcctcctctagggattctgttgtgactttgcttgattacggtgcgggcaatgttcggagtgtcaggaatgcaatcagattcctcgggtttgagatcaaagatgtgcaaactccgcaagatattctgaatgcaagtaggttagtttttcctggggttggagcatttgctgctgccatggaggtgttaagcaaaactggaatggatgaagcactatgttcatatattgacaaggatcgtccatttttgggcatttgtcttggacttcaactactttttgaatctagtgaggagaatggaccagtaaaaggtcttggcttaatacctggaactgttgggcgatttgactcatcaaatggttttagagtaccacatattggctggaatgctttacaaatcactgaggactcgggaattttggatgatgttggaaatcaccatgtctattttgtgcactcttatcgtgccatgccttcagatgacaacaatgagtggatatcctccacctgtgactatggtgacaaatttatagcatctattagaagaggaaatgtgaatgcggttcaattccatccagagaagagtggagatgttggcctctctattttgggaagattcttgaatccgaagtcaaacatggcaaagaagcctggggaaggcaaagcttcaaaacttgcaaaaagggtgattgcttgtcttgatgtgagaacaaatgataagggggaccttgttgtaaccaaaggagaccagtatgatgtaagagaacatacaaaagagaatgaggtaagaaatcttggcaagccagttgatcttgctggacagtactataaagatggagctgatgaggtcagctttctaaatattactggatttcgcgacttccctcttggtgatttaccgatgctgcaggtattgcgatacacatcagaaaatgtttttgtacccttaacagttgggggaggaattagagatttcacagattcaactgggaggtactattcaagtttggaagttgcttctaaatactttaggtctggggctgataagatttccattggaagtgatgcagtttatgctgcagaagaatatttaaaagccggagtaaagactgggaagaccagcttggagcagatatcaagagtttatgggaatcaggcagtggttgttagtatcgatccgcgtagagtgtatgtaaaggatcctaatgatttgcaattgaagaccataagggtttcaagtccaggtccaaatggagaagaatatgcatggtatcaatgtacagttaatgggggacgagagggccggccaattggtgcttatgaactagcaaaagcagttgaagagcttggtgctggtgaaatactacttaattgcattgattgcgacggtcaagggaaaggatttgatgtagatttaattaagttgatatcagatgctgtaagtatccctgttatcgcaagtagcggtgctggtgctcctgaacacttctctgaggtgttctataaaacaaatgcatcagcagcacttgctgctggcatttttcacaggaaagaggtgcctattcagtcggtaaaagagcatttgttgaaggaaggcatagaagttcgaatctga

SEQ ID NO: 99614 - protein, 580 aa, Glycine max
MEAPPFASSASSSSLFSLRNKPPSSPTITHFGNTKPSKSFSVRASSSRDSVVTLLDYGAGNVRSVRNAIRFLGFEIKDVQTPQDILNASRLVFPGVGAFAAAMEVLSKTGMDEALCSYIDKDRPFLGICLGLQLLFESSEENGPVKGLGLIPGTVGRFDSSNGFRVPHIGWNALQITEDSGILDDVGNHHVYFVHSYRAMPSDDNNEWISSTCDYGDKFIASIRRGNVNAVQFHPEKSGDVGLSILGRFLNPKSNMAKKPGEGKASKLAKRVIACLDVRTNDKGDLVVTKGDQYDVREHTKENEVRNLGKPVDLAGQYYKDGADEVSFLNITGFRDFPLGDLPMLQVLRYTSENVFVPLTVGGGIRDFTDSTGRYYSSLEVASKYFRSGADKISIGSDAVYAAEEYLKAGVKTGKTSLEQISRVYGNQAVVVSIDPRRVYVKDPNDLQLKTIRVSSPGPNGEEYAWYQCTVNGGREGRPIGAYELAKAVEELGAGEILLNCIDCDGQGKGFDVDLIKLISDAVSIPVIASSGAGAPEHFSEVFYKTNASAALAAGIFHRKEVPIQSVKEHLLKEGIEVRI

SEQ ID NO: 99615 - DNA, 24 bp, Artificial sequence
  primer
atgaacgtggtgatccttgatacc

SEQ ID NO: 99616 - DNA, 26 bp, Artificial sequence
  primer
ttacatctccaggaagtttttcagca

SEQ ID NO: 99617 - protein, 306 aa, Artificial sequence
  consensus sequence
  Variant (2)..(4): Xaa in position 2 to 4 is any amino acid
  Variant (7)..(8): Xaa in position 7 to 8 is any amino acid
  Variant (10)..(12): Xaa in position 10 to 12 is any amino acid
  Variant (13)..(16): Xaa in position 13 to 16 is any or no amino acid
  Variant (18)..(37): Xaa in position 18 to 37 is any amino acid
  Variant (38)..(52): Xaa in position 38 to 52 is any or no amino acid
  Variant (57)..(64): Xaa in position 57 to 64 is any amino acid
  Variant (66)..(79): Xaa in position 66 to 79 is any amino acid
  Variant (80)..(84): Xaa in position 80 to 84 is any or no amino acid
  Variant (86)..(87): Xaa in position 86 to 87 is any amino acid
  Variant (91)..(91): Xaa in position 91 is any amino acid
  Variant (93)..(93): Xaa in position 93 is any amino acid
  Variant (95)..(101): Xaa in position 95 to 101 is any amino acid
  Variant (103)..(107): Xaa in position 103 to 107 is any amino acid
  Variant (108)..(122): Xaa in position 108 to 122 is any or no amino acid
  Variant (125)..(127): Xaa in position 125 to 127 is any amino acid
  Variant (128)..(132): Xaa in position 128 to 132 is any or no amino acid
  Variant (134)..(143): Xaa in position 134 to 143 is any amino acid
  Variant (144)..(160): Xaa in position 144 to 160 is any or no amino acid
  Variant (163)..(163): Xaa in position 163 is any amino acid
  Variant (167)..(175): Xaa in position 167 to 175 is any amino acid
  Variant (176)..(206): Xaa in position 176 to 206 is any or no amino acid
  Variant (213)..(225): Xaa in position 213 to 225 is any amino acid
  Variant (226)..(246): Xaa in position 226 to 246 is any or no amino acid
  Variant (249)..(263): Xaa in position 249 to 263 is any amino acid
  Variant (264)..(268): Xaa in position 264 to 268 is any or no amino acid
  Variant (276)..(278): Xaa in position 276 to 278 is any amino acid
  Variant (279)..(298): Xaa in position 279 to 298 is any or no amino acid
  Variant (300)..(305): Xaa in position 300 to 305 is any amino acid
DXXXGNXXSXXXXXXXAXXXXXXXXXXXXXXXXXXXXXXXXXXXXXXXXXXXPGVGXXXXXXXXLXXXXXXXXXXXXXXXXXXXPXXGICXGXQXXXXXXXEXXXXXXXXXXXXXXXXXXXXLGXXXXXXXXGXXXXXXXXXXXXXXXXXXXXXXXXXXXPHXGWNXXXXXXXXXXXXXXXXXXXXXXXXXXXXXXXXXXXXXXXXYFVHSYXXXXXXXXXXXXXXXXXXXXXXXXXXXXXXXXXXYGXXXXXXXXXXXXXXXXXXXXQFHPEKSXXXXXXXXXXXXXXXXXXXXXXXGXXXXXXF

SEQ ID NO: 99618 - protein, 18 aa, Artificial sequence
  protein pattern
  Variant (2)..(8): Xaa in position 2 to 8 is any amino acid
  Variant (9)..(11): Xaa in position 9 to 11 is any or no amino acid
  Variant (17)..(17): Xaa in position 17 is Lys or Arg
AXXXXXXXXXXQFHPEXS

SEQ ID NO: 99619 - protein, 19 aa, Artificial sequence
  protein pattern
  Variant (2)..(2): Xaa in position 2 is Phe, Ile, Leu, Met or Val
  Variant (3)..(3): Xaa in position 3 is Phe, Ile, Leu or Met
  Variant (5)..(5): Xaa in position 5 is Phe, Ile or Val
  Variant (7)..(7): Xaa in position 7 is Ile, Leu or Val
  Variant (9)..(9): Xaa in position 9 is any amino acid
  Variant (11)..(11): Xaa in position 11 is any or no amino acid
  Variant (13)..(16): Xaa in position 13 to 16 is any amino acid
  Variant (17)..(18): Xaa in position 17 to 18 is any or no amino acid
PXXGXCXGXQXLXXXXXXE

SEQ ID NO: 99620 - DNA, 501 bp, Escherichia coli
  CDS (1)..(501): transl_table=11
atgcacgagaatcaacaaccacaaaccgaggcttttgagctgagtgcggcagagcgtgaagcgatcgagcacgagatgcaccactacgaagacccgcgtgcggcgtccattgaagcgctgaaaatcgttcagaagcagcgtggctgggtgccggatggtgcgatccacgcgatcgccgatgtgctgggtattccggcaagcgacgtcgaaggtgtggcaacgttctacagtcagatcttccgccagccggttggtcgccatgtgatccgttattgtgacagcgtggtctgtcatatcaacggttatcagggtattcaggcggcgctcgagaaaaagctgaacatcaaaccagggcaaacgacatttgatggccgctttacgctgctgccaacttgctgcctggggaactgtgataaagggccaaacatgatgatcgatgaggacactcacgcgcatctgaccccggaagcgatccctgaactgctggagcggtataaataa

SEQ ID NO: 99621 - protein, 166 aa, Escherichia coli
MHENQQPQTEAFELSAAEREAIEHEMHHYEDPRAASIEALKIVQKQRGWVPDGAIHAIADVLGIPASDVEGVATFYSQIFRQPVGRHVIRYCDSVVCHINGYQGIQAALEKKLNIKPGQTTFDGRFTLLPTCCLGNCDKGPNMMIDEDTHAHLTPEAIPELLERYK

SEQ ID NO: 99622 - DNA, 738 bp, Bombyx mori
  CDS (1)..(738)
atgttatccagcctcaggactggagtacagggcttgtggcgtatatcctctaggtcaattcagaccacagcatcaaggcaacatgacagtctatttgtccaccgagacactcctgaggacaacccgagcattccctttgagttctcgcaggccaatcaaaagagagtagaggctttgttggccatttaccctgaaggtcacaagcgaggtgccatgattcctttactggatctggcacaacgacagagtggaggctggctaccgatctcagctatgcacaaggtggctgagatcttaaatcttccaaaaatgagagtttatgaagtagctacattttacacaatgttcataagacgaccaattggtaaataccatgttcaagtatgtacgactaccccttgctggcttcgaggctctgatgccatattgaatgcaattaaacaggaaacaaactgtgaggttggaggcaacagtccttgtggaaagttttccgtttcagaggttgaatgtttgggagcttgtgtgaacgccccaatgatacaagtcaatgatgattactatgaggacctgtctgtagaagatacaaaagaaattatcagcaaattaaagaaggacgagaaacccaaacctgggcccaggagtggaagattcgcgtctgagcctctcggaggattgacctcgctgactgaagaacccacagggcctggcttcggagtacaagatgcactcaaggcgtaa

SEQ ID NO: 99623 - protein, 245 aa, Bombyx mori
MLSSLRTGVQGLWRISSRSIQTTASRQHDSLFVHRDTPEDNPSIPFEFSQANQKRVEALLAIYPEGHKRGAMIPLLDLAQRQSGGWLPISAMHKVAEILNLPKMRVYEVATFYTMFIRRPIGKYHVQVCTTTPCWLRGSDAILNAIKQETNCEVGGNSPCGKFSVSEVECLGACVNAPMIQVNDDYYEDLSVEDTKEIISKLKKDEKPKPGPRSGRFASEPLGGLTSLTEEPTGPGFGVQDALKA

SEQ ID NO: 99624 - DNA, 1275 bp, Mesorhizobium loti MAFF303099
  CDS (1)..(1275): transl_table=11
atgtcagtccgccgtctcgcagaagccagcgtccagccagtatccttcgccttcaaccgggcgaacgcggcagcggcgaagcaatggatcaagaagtacccgaagggccgcgagcagtcggcgatcattccgctgctgatgctggcgcaggaacaggaaggctgggtcaccaaggcagcgatcgagacgatttcggacatgctcggcatgccgcgcatccgtgggctcgaggtcgcgaccttctacacgcagtaccagctcaatcccgtcggcacccgcgcgcacatccaggtctgcggcaccacgccctgcatgctgcgcggctcggaagcactgatggatgtctgccgctcgaaaatccatcacgaccagttccacaccaatgacaagggcaccttgtcgtgggaagaggtcgagtgtcttggcgcctgcgtcaacgcgccgatggtgatgattttcaaggacacgttcgaggatttgacaccggagcggctggctgaaatcatcgacctctatgatgcgggcaagggcgcctcggtggcgccgggaccgcagaatggccgcaccggctcggagccggcttccggcctgacgacgctgaaaagcgaaaaggcgatcctcaagtcgacccgcgatcgggaggccagggaggccgcaaaggccgccaaggcggcacccgacgcgatcatcgccgcgcccgttccgacacctgctcctgtcgcaccgtccaatgccagcaagccgaagaccgacgcgcctgaaaccagcccggccttgaagacaccgtcaaagaccaaggtggcgccggcggctgagaaggcggctagcgtttcggcgccgctgcattcggccgccaatgccaacaaggcagcgccggaagtcgagaaggtctccaaacagcgcaatgggccgaaggccaatgccgagccggctgctgccttcaaggcgctggaagccaaggcgccggcggcaaagccggcaaaaacgtcgctggaggacaagaaccgtccggccggtatcgataggccggccgcggtcgacgatctcaagctgatctccggcgtcggcccgaagatcgagggcgtcctgcatacgctgggcatcttcaccttcgcgcaggtcgcttcctggaagaaggccgagcgcgactgggtcgacggctatctctccttccacggccgcatcgagcgcgacgactgggtcaagcaggccaaggcgctcgccaagggcggcgtcgccgaatacatccgcgtcttcggcaagaagccggtctga

SEQ ID NO: 99625 - protein, 424 aa, Mesorhizobium loti MAFF303099
MSVRRLAEASVQPVSFAFNRANAAAAKQWIKKYPKGREQSAIIPLLMLAQEQEGWVTKAAIETISDMLGMPRIRGLEVATFYTQYQLNPVGTRAHIQVCGTTPCMLRGSEALMDVCRSKIHHDQFHTNDKGTLSWEEVECLGACVNAPMVMIFKDTFEDLTPERLAEIIDLYDAGKGASVAPGPQNGRTGSEPASGLTTLKSEKAILKSTRDREAREAAKAAKAAPDAIIAAPVPTPAPVAPSNASKPKTDAPETSPALKTPSKTKVAPAAEKAASVSAPLHSAANANKAAPEVEKVSKQRNGPKANAEPAAAFKALEAKAPAAKPAKTSLEDKNRPAGIDRPAAVDDLKLISGVGPKIEGVLHTLGIFTFAQVASWKKAERDWVDGYLSFHGRIERDDWVKQAKALAKGGVAEYIRVFGKKPV

SEQ ID NO: 99626 - DNA, 531 bp, Thermotoga maritima MSB8
  CDS (1)..(531): transl_table=11
gtgaaaaaattcccgataaattctgatcaggaggtggcggttttggtcaagtcgaaggaggaactcttcaaagagctggagaatttcatagaagaaaatgggtacgagggaaagaaggatgcactcatacaggtgcttcacaaggcccaggaactcttcggatatcttcccgcggatgttctcgagtacatctcagacaaactcgacgttcctctctcgaaggtttatggagtggtcaccttctacaacttcttctccacaaagccaaagggtaaacatcagatcaaggtttgtctcggtaccgcgtgttacgtgaagggtgcggacagaatcttcgaaagattcctcgaagaactcaaggtgaatccggatgaacccaccagcgatggtatgttctccgttcacggtgtgagatgcctcggggcgtgcagtatggcaccggttgtcatggtggatgaagacgatttttacggcagagtaactcccgatatggtgcctcagatcatcagtaagtacaagcgggagggatga

SEQ ID NO: 99627 - protein, 176 aa, Thermotoga maritima MSB8
MKKFPINSDQEVAVLVKSKEELFKELENFIEENGYEGKKDALIQVLHKAQELFGYLPADVLEYISDKLDVPLSKVYGVVTFYNFFSTKPKGKHQIKVCLGTACYVKGADRIFERFLEELKVNPDEPTSDGMFSVHGVRCLGACSMAPVVMVDEDDFYGRVTPDMVPQIISKYKREG

SEQ ID NO: 99628 - DNA, 474 bp, Neisseria meningitidis Z2491
  CDS (1)..(474): transl_table=11
atgttatccgcagaatctttaaaacaaatcgacatcgagttggcaaaatatcctgccgaccaacgccgctccgcgattatgggcgcattgcgtatcgcccaaaccgaaaaaggctggctcgctcccgagaccatcgcctttgtcgcagactatatcggcatctcgcctgcacaagcctacgaagtcgctaccttctacaatatgtacgaccttgagcctgtcggcaaatacaaactgaccgtttgtaccaacctgccctgcgccctgcgcggcggtatggcaaccggcgaatacctcaaacaaaaactcggtatcagctacggcgaaaccacgcctgacggcaaatttacccttgtcgaaggcgaatgcatgggggcgtgcggcgatgctcctgttatgttgttgaataatcataaaatgtgcagctttatgactgaagaggcgattgagaagaaactggcggagttggagtag

SEQ ID NO: 99629 - protein, 157 aa, Neisseria meningitidis Z2491
MLSAESLKQIDIELAKYPADQRRSAIMGALRIAQTEKGWLAPETIAFVADYIGISPAQAYEVATFYNMYDLEPVGKYKLTVCTNLPCALRGGMATGEYLKQKLGISYGETTPDGKFTLVEGECMGACGDAPVMLLNNHKMCSFMTEEAIEKKLAELE

SEQ ID NO: 99630 - DNA, 1110 bp, Agrobacterium tumefaciens str. C58
  CDS (1)..(1110): transl_table=11
atgtccgttcgtcgactagccgaagatcagttccagcccgtggcatttgccttcaatgcggataataccgcatgggcggaaaagacgatccagaaataccccgcgggacgccagcaatcggcggttatcccgctgctcatgcgcgcgcaggagcaggacggctgggttacccgcgccgccatcgaaaaagtcgcagacatgctggatatggcctatatccgtgttcttgaggtggcgaccttctatacccagttccagctgaagccggttggcacgcgtgcccacgttcaggtttgcggcaccacgccctgcatgctgcgcggttccgaagcgctgatggatgtctgccgcaagaagatccaccacgatccgctgcataccaatgacagcggcacgctgtcctgggaagaggtggaatgtcagggcgcctgcgtcaacgcgccgatggtcatcatcttcaaggatgcctatgaggacctgacgcccgagcgtctggaagagatcatcgacacattcgaggccggcaagggcgacacggtcaagaccggaccgcagatcgaccgtcacgagtcggtcccggtcggcggcctgacgacgctgacggaagagatcaagcccgatcgttccaatctcgacaagccggctgaaccgccggctgaggcggcacccgttcccccgtctaatgccgccaagccgaagaccgacgcaccggaaaccgatccgaagctgaaaacgccggtcacggaaccgaaggctgctgcggaaaacgcaaaggccggagaaaaagaatcggccggaaaggaagcggttgcatcgaagccgtcgctcgagtccgctgatcgtcccgctggcatcgacaagccggcgaccccagatgacctgaagcttatttccggcgttggcccgaagatcgaaggcacgctgaacgggctcggcatcttcacctatgcgcagatcgccgcctggaaacaggctgaatgcgactgggtggatggatatctgaatttcaaaggccgtatcggccgtgatgactgggtcaaacaggccgaggcgctcgccaagggtggtgaagccgagtatatcagggtcttcggcaagaagccgcggtaa

SEQ ID NO: 99631 - protein, 369 aa, Agrobacterium tumefaciens str. C58
MSVRRLAEDQFQPVAFAFNADNTAWAEKTIQKYPAGRQQSAVIPLLMRAQEQDGWVTRAAIEKVADMLDMAYIRVLEVATFYTQFQLKPVGTRAHVQVCGTTPCMLRGSEALMDVCRKKIHHDPLHTNDSGTLSWEEVECQGACVNAPMVIIFKDAYEDLTPERLEEIIDTFEAGKGDTVKTGPQIDRHESVPVGGLTTLTEEIKPDRSNLDKPAEPPAEAAPVPPSNAAKPKTDAPETDPKLKTPVTEPKAAAENAKAGEKESAGKEAVASKPSLESADRPAGIDKPATPDDLKLISGVGPKIEGTLNGLGIFTYAQIAAWKQAECDWVDGYLNFKGRIGRDDWVKQAEALAKGGEAEYIRVFGKKPR

SEQ ID NO: 99632 - DNA, 555 bp, Agrobacterium tumefaciens str. C58
  CDS (1)..(555): transl_table=11
atgcagggctgcgacgggatttcaccatatcccgctcatcattccttgcccctgtcggtttgggaggactggcttatgaatatcagagcggttgccgcagatgaggcggcccgtgtttccgctgttatcaacgaatgtctccacctggaggggcctttgctgcccatcctgcacgcggtgcaggaagaatttggttacatcccggaaagcgccaagcagatcatcgcctccgcgctgaatatatcgcgcgcggaagttcatggcgtcgtcaccttctatcccgattttcgcgatcatccccaaggccgacatgtcttaaagctctgtcgcgccgaggcttgccagtcgatgggtggcgagcctcttgcggaaaccatcaagaaccgcctcggtctcgaatggcacgagactgctgccgacggttccgtcacgctggaaccggttttctgtctcgggctctgcgcgcaggcgccggccctgatgctggatggtgaggtccatgcgagactggacgatgactgtcttggcaacattctgacggaggcgcgtcgatga

SEQ ID NO: 99633 - protein, 184 aa, Agrobacterium tumefaciens str. C58
MQGCDGISPYPAHHSLPLSVWEDWLMNIRAVAADEAARVSAVINECLHLEGPLLPILHAVQEEFGYIPESAKQIIASALNISRAEVHGVVTFYPDFRDHPQGRHVLKLCRAEACQSMGGEPLAETIKNRLGLEWHETAADGSVTLEPVFCLGLCAQAPALMLDGEVHARLDDDCLGNILTEARR

SEQ ID NO: 99634 - DNA, 480 bp, Sinorhizobium meliloti 1021
  CDS (1)..(480): transl_table=11
gtgaatatccatctgccgcgtgcagacgtgaccgaacggacgctggcgatcgtcggcgaactcaaggggctcgaaggcccgcttattcccattctgcacgaaatccaggacgagttcggctatgtgccggaggagagcctgccggtgatcgcgcgggaactcaatctgtcgcgcgccgaagtctatggcgtggttaccttctatcacgattttcgcgagcacccggccgggcgtcatgtgctgaagctctgtcgcgccgaagcctgccagtcgatgggcggcgaccggcttgcggagcgcgccaaagcgcttctcgggatcgatttccatgagacgacgccggacggcgccgtgacgctcgagccggtctactgtctcgggctctgttcctgctcgccgtcggcgatgctcgacggcgaggttcatgcgcggctcgacgaaacagtgctcgaggcgctggttgcggaggcgcgccgatga

SEQ ID NO: 99635 - protein, 159 aa, Sinorhizobium meliloti 1021
MNIHLPRADVTERTLAIVGELKGLEGPLIPILHEIQDEFGYVPEESLPVIARELNLSRAEVYGVVTFYHDFREHPAGRHVLKLCRAEACQSMGGDRLAERAKALLGIDFHETTPDGAVTLEPVYCLGLCSCSPSAMLDGEVHARLDETVLEALVAEARR

SEQ ID NO: 99636 - DNA, 519 bp, Yersinia pestis CO92
  CDS (1)..(519): transl_table=11
gtggtgaatctggcagtcaatgcggctgaaccagcggccatgccagacgccttcgaattgagtgccgaagaacgtgatgctatcgagcatgagaaacaccattacgaagatgcccgtgctgcgtcgattgaagcactgaaaattgtgcagaagcaacgtggctgggtgccggatggtgcgatccacgcgattgctgatgtgctgggtatcccggccagtgatgttgagggggtcgccaccttctacagccaaatcttccgccaaccggtagggcgtcatgtgatccgctactgtgacagcgtggtgtgtcatatcaccggctatcaggggattcaggcggcactggagaaaaaactcagtatcaagccaggccaaacgaccttcgatggccgtttcaccctgctgccaacctgttgtctgggtaactgcgaccgtgggccgacgatgatgatcgatgacgacacccacagctacctgaagcctgaagagatcgagaagttactggagcaatatccatga

SEQ ID NO: 99637 - protein, 172 aa, Yersinia pestis CO92
MVNLAVNAAEPAAMPDAFELSAEERDAIEHEKHHYEDARAASIEALKIVQKQRGWVPDGAIHAIADVLGIPASDVEGVATFYSQIFRQPVGRHVIRYCDSVVCHITGYQGIQAALEKKLSIKPGQTTFDGRFTLLPTCCLGNCDRGPTMMIDDDTHSYLKPEEIEKLLEQYP

SEQ ID NO: 99638 - DNA, 495 bp, Nostoc sp. PCC 7120
  CDS (1)..(495): transl_table=11
atgactaccacaacgccacctcatccccatcccagtggtgacaaacgcttgaagatgctagatgcagctatcaagcgtcaccagtatcagcaagacgcattaattgaaattcttcacaaagcccaagaactgtttggttacttagaaaacgacttattactttatattgcccatagcttgaagctaccgcctagccgagtgtatggggtagcaactttctatcatttattttccctagcgccccagggagtccatagttgtgtggtgtgtacaggtacggcttgttatgtgaaaggctcatcagcaattttggcagatttggaaaaagctactcgtattcacgctggggaaactactgctgatggtcaattatcactgctaacggcacggtgtttgggtgcttgtgggattgctccggctgtggtttttgatggcaaagtcttaggtaatcaaaccccagaatcagtgaatgagcgcgtgcaaggatggctataa

SEQ ID NO: 99639 - protein, 164 aa, Nostoc sp. PCC 7120
MTTTTPPHPHPSGDKRLKMLDAAIKRHQYQQDALIEILHKAQELFGYLENDLLLYIAHSLKLPPSRVYGVATFYHLFSLAPQGVHSCVVCTGTACYVKGSSAILADLEKATRIHAGETTADGQLSLLTARCLGACGIAPAVVFDGKVLGNQTPESVNERVQGWL

SEQ ID NO: 99640 - DNA, 504 bp, Ralstonia solanacearum GMI1000
  CDS (1)..(504): transl_table=11
atgctatcagcagaagctctcaaggaaatcgaccgggcggtcgcgaaatatcccgccgaccagaagcagtccgccgtgatggcggcgctggcggtcgcgcagagcgagaaaggctgggtctcgcccgaagtcatgcagttcgtggccgagtatctcgaaatgccgccggtgtgggtcgaggaagtggcgacgttctacaacatgtacgacaccaagccggtgggccgcttcaagctgaccgtgtgcacgaacctgccgtgtgcgctgtcgggcggcgagcgcgcggccgattacctgaagcagaagctgggtatcggcttcaacgagacgaccgcggacggcaccttcacgctcaaggaaggcgagtgcatgggcgcatgtggcgatgctccggtcatgatcgtcaacaacacccatatgtgcagcttcatgagcaacgagaagctcgacgcgctgatcgccgacctgaaggcgaaggcgcccgccaatggagcaggcaagtaa

SEQ ID NO: 99641 - protein, 167 aa, Ralstonia solanacearum GMI1000
MLSAEALKEIDRAVAKYPADQKQSAVMAALAVAQSEKGWVSPEVMQFVAEYLEMPPVWVEEVATFYNMYDTKPVGRFKLTVCTNLPCALSGGERAADYLKQKLGIGFNETTADGTFTLKEGECMGACGDAPVMIVNNTHMCSFMSNEKLDALIADLKAKAPANGAGK

SEQ ID NO: 99642 - DNA, 480 bp, Agrobacterium tumefaciens str. C58
  CDS (1)..(480): transl_table=11
atgaatatcagagcggttgccgcagatgaggcggcccgtgtttccgctgttatcaacgaatgtctccacctggaggggcctttgctgcccatcctgcacgcggtgcaggaagaatttggttacatcccggaaagcgccaagcagatcatcgcctccgcgctgaatatatcgcgcgcggaagttcatggcgtcgtcaccttctatcccgattttcgcgatcatccccaaggccgacatgtcttaaagctctgtcgcgccgaggcttgccagtcgatgggtggcgagcctcttgcggaaaccatcaagaaccgcctcggtctcgaatggcacgagactgctgccgacggttccgtcacgctggaaccggttttctgtctcgggctctgcgcgcaggcgccggccctgatgctggatggtgaggtccatgcgagactggacgatgactgtcttggcaacattctgacggaggcgcgtcgatga

SEQ ID NO: 99643 - protein, 159 aa, Agrobacterium tumefaciens str. C58
MNIRAVAADEAARVSAVINECLHLEGPLLPILHAVQEEFGYIPESAKQIIASALNISRAEVHGVVTFYPDFRDHPQGRHVLKLCRAEACQSMGGEPLAETIKNRLGLEWHETAADGSVTLEPVFCLGLCAQAPALMLDGEVHARLDDDCLGNILTEARR

SEQ ID NO: 99644 - DNA, 729 bp, Drosophila melanogaster
  CDS (1)..(729)
atgctgacaaactgtgcctccaaaacactggccgccgtgcgcgccaacatccgggcaattgccaccagcagtgcccgggccagcgacaatctgttcgtccatcgcgacacaccggaggataatcccaacatcccgttcgagttcacggcggagaacaagaagcgcgtggaggccatactcagcatctatccggaggggcacaagcgcggcgccatgatcccgctgcttgatctggcacagcgccagtacggctggctgccaatctctgccatgcacaaggtggccgagattctccagttgcccaatatgcgcgtctacgaggtggccactttctatacgatgttcatgcgcaagcccactggcaagtatcacatccaggtgtgcaccaccacaccatgctggctccgcggatcggacgacatcctggagacctgcaagaagcagctgggcatcggcgtcggcgacaccaccaaggacaggaagttcaccatctcggaggtcgagtgcttgggcgcctgtgtcaatgcgccaatggtggcgatcaacgatgactactatgaggatctgacatccaaggacatgcaggacatcctgaacgacctgaaggcggataagatatcgccccctgggccacgcaacggacgctttgccagcgagccaaagggcgagcccacttccctgagcgaggagcccaagggtcctggctttggtctgcaggccggtctgtag

SEQ ID NO: 99645 - protein, 242 aa, Drosophila melanogaster
MLTNCASKTLAAVRANIRAIATSSARASDNLFVHRDTPEDNPNIPFEFTAENKKRVEAILSIYPEGHKRGAMIPLLDLAQRQYGWLPISAMHKVAEILQLPNMRVYEVATFYTMFMRKPTGKYHIQVCTTTPCWLRGSDDILETCKKQLGIGVGDTTKDRKFTISEVECLGACVNAPMVAINDDYYEDLTSKDMQDILNDLKADKISPPGPRNGRFASEPKGEPTSLSEEPKGPGFGLQAGL

SEQ ID NO: 99646 - DNA, 528 bp, Xanthomonas campestris pv. campestris str. ATCC 33913
  CDS (1)..(528): transl_table=11
atgaaggcgacgggtaatttcgaagcggcgcgcgacgtcgatccgcaggtagtgctgagcgacaagacgcgcgcgcacatcgatcattggctgagcaagttcccgcccgaccgcaagcgttcggccgtgttgcagggtctgcatgccgcgcaggaacagaaccagggttggttgaccgacgagctgatcgtgggcgtggccaagtatctggagctgccgccggtgtgggcctacgaagtggccagcttctactcgatgttcgaaaccgagaaggtcggccgccacaacgtggcgttctgcaccaacatcagctgctggctcaacggcgctgaagatctgctggcgcacgccgaaaagaagctgggctgcaagttgggtcagtcgaccgccgatgggcgcgtctacctcaagcgcgaagaagaatgcctggcggcctgctctgcagcgccgatgatggtcatcaacggccattaccacgagcacctgacgaaagaaaaggtcgacgcgctactggacgggctggagtaa

SEQ ID NO: 99647 - protein, 175 aa, Xanthomonas campestris pv. campestris str. ATCC 33913
MKATGNFEAARDVDPQVVLSDKTRAHIDHWLSKFPPDRKRSAVLQGLHAAQEQNQGWLTDELIVGVAKYLELPPVWAYEVASFYSMFETEKVGRHNVAFCTNISCWLNGAEDLLAHAEKKLGCKLGQSTADGRVYLKREEECLAACSAAPMMVINGHYHEHLTKEKVDALLDGLE

SEQ ID NO: 99648 - DNA, 528 bp, Xanthomonas axonopodis pv. citri str. 306
  CDS (1)..(528): transl_table=11
atgaaggcgacgggtaatttcgaagcggcgcgcgacgtcgatccgcaggtggtgctgagcgacaagacgcgcgcgcacatcgatcactggctgaccaagttcccgccggaccgcaagcgttcggcggtgctgcagggtctgcatgctgcgcaggaacagaaccagggctggctgaccgacgaattgatcgtgggcgtggccaagtacctggagctgccaccggtatgggcttatgaggtcgccagcttctattcgatgttcgagaccgaacgcgtcggtcgccataacgtggcgttctgcaccaacatcagctgctggctcaatggcgccgaagacctgctggcccatgcggaaaagaagctgggttgcaagctgggccagtcgacggccgatggccgcgtctacctcaagcgcgaagaagagtgcctggctgcctgctccgcagcgccgatgatggtcatcaacggccactatcacgagcacctgacgaaagaaaaggtcgacgcgctgctggacgggctggagtaa

SEQ ID NO: 99649 - protein, 175 aa, Xanthomonas axonopodis pv. citri str. 306
MKATGNFEAARDVDPQVVLSDKTRAHIDHWLTKFPPDRKRSAVLQGLHAAQEQNQGWLTDELIVGVAKYLELPPVWAYEVASFYSMFETERVGRHNVAFCTNISCWLNGAEDLLAHAEKKLGCKLGQSTADGRVYLKREEECLAACSAAPMMVINGHYHEHLTKEKVDALLDGLE

SEQ ID NO: 99650 - DNA, 717 bp, Drosophila melanogaster
  CDS (1)..(717)
atgctgcgcttgcttcagcccatccgccgcatccacctggcacccgttctccgtttgggagcaccggtgaatgccactgaaatacgcaaagcactgaagttcgagttctccaaggataaccagcggagggtgaaggccctgctcgcctggtatccgcaggcggagtggaagggagcactcctgccactactggatattgcccagcggcagcagggatggctttcgatcagtgccgttcaggccgtggccgagaccatcaagatagatccaatggaggccttcgaggcggcgcagttctacaccatgttcttcatgaagccgcgcgggaaatatgtggtcagtgtgtgcacctcgacgccctgcaaattgcgtgggggcgacgaaatctttgaggcgtgcaagaaaacgctcaatctggagcacggtcagaccacgccggacatgcagttcacgctcaaggaggattactgcatgggcgcctgtgtgaatgcccccgttctggcggtcaacgatgacatgtacgaggacctggacgagaagagtctggccaacatcctggcggatctgcgcaatgacaagttgccgcccgctggtccgcgcaacggtaggtttgccagtgagcccaagggtggacttaccaccctaaagatccagccaccgccgcccggcttcatgatgcagaaactaccagatccgaagaccaagaagtgtcagtag

SEQ ID NO: 99651 - protein, 238 aa, Drosophila melanogaster
MLRLLQPIRRIHLAPVLRLGAPVNATEIRKALKFEFSKDNQRRVKALLAWYPQAEWKGALLPLLDIAQRQQGWLSISAVQAVAETIKIDPMEAFEAAQFYTMFFMKPRGKYVVSVCTSTPCKLRGGDEIFEACKKTLNLEHGQTTPDMQFTLKEDYCMGACVNAPVLAVNDDMYEDLDEKSLANILADLRNDKLPPAGPRNGRFASEPKGGLTTLKIQPPPPGFMMQKLPDPKTKKCQ

SEQ ID NO: 99652 - DNA, 564 bp, Yersinia pestis KIM
  CDS (1)..(564): transl_table=11
atgagtgatcaaaaagagactcaggctcataacggaagccttgatgtggtgaatctggcagtcaatgcggctgaaccagcggccatgccagacgccttcgaattgagtgccgaagaacgtgatgctatcgagcatgagaaacaccattacgaagatgcccgtgctgcgtcgattgaagcactgaaaattgtgcagaagcaacgtggctgggtgccggatggtgcgatccacgcgattgctgatgtgctgggtatcccggccagtgatgttgagggggtcgccaccttctacagccaaatcttccgccaaccggtagggcgtcatgtgatccgctactgtgacagcgtggtgtgtcatatcaccggctatcaggggattcaggcggcactggagaaaaaactcagtatcaagccaggccaaacgaccttcgatggccgtttcaccctgctgccaacctgttgtctgggtaactgcgaccgtgggccgacgatgatgatcgatgacgacacccacagctacctgaagcctgaagagatcgagaagttactggagcaatatccatga

SEQ ID NO: 99653 - protein, 187 aa, Yersinia pestis KIM
MSDQKETQAHNGSLDVVNLAVNAAEPAAMPDAFELSAEERDAIEHEKHHYEDARAASIEALKIVQKQRGWVPDGAIHAIADVLGIPASDVEGVATFYSQIFRQPVGRHVIRYCDSVVCHITGYQGIQAALEKKLSIKPGQTTFDGRFTLLPTCCLGNCDRGPTMMIDDDTHSYLKPEEIEKLLEQYP

SEQ ID NO: 99654 - DNA, 543 bp, Shewanella oneidensis MR-1
  CDS (1)..(543): transl_table=11
atgagccagcaatgtcagtgtcaaaataagcagaccccacaggggcaaggggcatgcagcagcaaccagagcgattttgttctgagtcaagctgaacgcgatgccatcgaacacgagaaacatcactacgaagatccccgcgccgccagtattgaagcgctcaaaattgtgcagcaggcccgaggctgggtgcctgacggcgcgatttacgccatcgcggctgagcttggcattcccgccagcgatgtcgaaggtgtcgccaccttctatagccagattttccgccagccggtggggcgccacattattcgcgtctgcgacagcatggtgtgctacatcaatggccacgaacagttgatggccggtctcaaagaggtgatgaacctcgcacctggccaaaccacgcctgatggccgctttaccctgctaccggtctgctgccttggcaactgcgacaaggggccagccatcatgatcgatgatgacacctatggcggccttgaccctatcaccctgctaaaaaccctggaggcttacccatga

SEQ ID NO: 99655 - protein, 180 aa, Shewanella oneidensis MR-1
MSQQCQCQNKQTPQGQGACSSNQSDFVLSQAERDAIEHEKHHYEDPRAASIEALKIVQQARGWVPDGAIYAIAAELGIPASDVEGVATFYSQIFRQPVGRHIIRVCDSMVCYINGHEQLMAGLKEVMNLAPGQTTPDGRFTLLPVCCLGNCDKGPAIMIDDDTYGGLDPITLLKTLEAYP

SEQ ID NO: 99656 - DNA, 498 bp, Pseudomonas putida KT2440
  CDS (1)..(498): transl_table=11
atgaacagcacgcttatccagacagaccgtttcgccctgagcgaaaccgagcgctcggccatcgagcacgaaatgcatcactacgaggacccgcgcgcggcgtccatcgaagccctgaagatcgtccagaaggagcgtggctgggtgccggacggcgccattcacgccatcggcgaagtgctgggcattccggccagcgacgtcgagggtgtcgccaccttctacagccagatcttccgccaaccggtcggccgccacatcatccgcgtgtgcgacagcatggtctgctacatcggcggccatgagtcggtggtcagccagatccagagcgagctgggcatcggcctcggccagaccactgccgacggccgtttcaccctgctgcccgtgtgctgcctgggcaactgcgacaaggctccggcactgatgatcgacgacgacaccttcggtgacgtgcagccggctggcgtttccaaactgctggagggttacgtatga

SEQ ID NO: 99657 - protein, 165 aa, Pseudomonas putida KT2440
MNSTLIQTDRFALSETERSAIEHEMHHYEDPRAASIEALKIVQKERGWVPDGAIHAIGEVLGIPASDVEGVATFYSQIFRQPVGRHIIRVCDSMVCYIGGHESVVSQIQSELGIGLGQTTADGRFTLLPVCCLGNCDKAPALMIDDDTFGDVQPAGVSKLLEGYV

SEQ ID NO: 99658 - DNA, 612 bp, Bradyrhizobium japonicum USDA 110
  CDS (1)..(612): transl_table=11
atgtccgtccgccgattagcaccgaaggaagtccagcccgcgagctttgcgttcacggaggagaaccttgcgttcgccaagcagcagatcgcgaaatatccggccgggcgccaggcctccgcggtcatcgcgatcctctggcgcgcgcaggagcagcacgacggctgggtgtcggaagccgccatccgcgtcatcgccgacatgctcgacatgccctatattcgcgtgctcgaggtcgcgaccttctacacgatgttccagctcgcccccgtcggcaagaaggcccacgtccaggtctgcggcaccacgccatgccgcctgcgcggcgccgaggacctgatccacgtctgtgagcaccgcatccatcacgagcccttccatctctccaaggacggcaatttcagctgggaagaggtcgagtgtctcggcgcctgcgtgaatgcaccgatggtgctgatcggcaaggacacctatgaggacctgaccaaggagagctttggcaaggtgctcgacggctttgcctccggcaatccgccaaagcccggtccgcagaacggccgccagttctcggcgccgatcaccgggccgaccacgctgaaggagatcacctga

SEQ ID NO: 99659 - protein, 203 aa, Bradyrhizobium japonicum USDA 110
MSVRRLAPKEVQPASFAFTEENLAFAKQQIAKYPAGRQASAVIAILWRAQEQHDGWVSEAAIRVIADMLDMPYIRVLEVATFYTMFQLAPVGKKAHVQVCGTTPCRLRGAEDLIHVCEHRIHHEPFHLSKDGNFSWEEVECLGACVNAPMVLIGKDTYEDLTKESFGKVLDGFASGNPPKPGPQNGRQFSAPITGPTTLKEIT

SEQ ID NO: 99660 - DNA, 498 bp, Pseudomonas syringae pv. tomato str. DC3000
  CDS (1)..(498): transl_table=11
atgaatagcccgctgattcagactgaccgtttcgtcttgagcgaaaccgagcgctcggccatcgagcacgagctgcaccactacgaagacccgcgtgcggcgtccatcgaagccctgaaaatcgttcagaaagaacgtggctgggtgcccgacggtgccatctacgccataggcgatctgctgggcatacctgccagtgacgtcgaaggcgttgctacgttctacagtcagattttccgccagccagtgggacgtcacatcattcgcgtctgcaacagtatggtgtgcttcatcggcggccacgaaaacgtggtggacgagatcaagacctcactgggcatcggcctggggcaaaccaccgctgacggtcgtttcacgttgctgccggtctgctgcctgggcaactgcgacaaagccccggccgtcatggtcgatgacgacactttcggcgatgtacagcctgctaccgttgccaaaatgctggagggttacctatga

SEQ ID NO: 99661 - protein, 165 aa, Pseudomonas syringae pv. tomato str. DC3000
MNSPLIQTDRFVLSETERSAIEHELHHYEDPRAASIEALKIVQKERGWVPDGAIYAIGDLLGIPASDVEGVATFYSQIFRQPVGRHIIRVCNSMVCFIGGHENVVDEIKTSLGIGLGQTTADGRFTLLPVCCLGNCDKAPAVMVDDDTFGDVQPATVAKMLEGYL

SEQ ID NO: 99662 - DNA, 489 bp, Enterococcus faecalis V583
  CDS (1)..(489): transl_table=11
atgtgtgcattaagcttaattgaaaaagaagcgattattctagaaaacgatgctgatccacaacgaattttaaatattttaattgaattacaatttgcttcagaggaagggtatatcgatcaggagacagctcaattagttgcagagcatctacatttaacggaagcgcgagtctatgaaatcgtcagtttttatgccattttaaagacggaaccgcaagcgaagtatgtcttgaagatttgtaacagcacaccgtgtcattatactggtggggcgatggttgccgaagttttagaaaccattttagaagtgccagagaatcagccgacaccagatggcttatttatgtatcatagtattccttgtatcggggcttgtgatttaggtccagtaattaaaattaaggacaccgtttttagtcaactaacagaagagaaaatttatcaattaattcaacatttacaaaatgattgctatgaaggactgtag

SEQ ID NO: 99663 - protein, 162 aa, Enterococcus faecalis V583
MCALSLIEKEAIILENDADPQRILNILIELQFASEEGYIDQETAQLVAEHLHLTEARVYEIVSFYAILKTEPQAKYVLKICNSTPCHYTGGAMVAEVLETILEVPENQPTPDGLFMYHSIPCIGACDLGPVIKIKDTVFSQLTEEKIYQLIQHLQNDCYEGL

SEQ ID NO: 99664 - DNA, 525 bp, Coxiella burnetii RSA 493
  CDS (1)..(525): transl_table=11
atgaatgaacagacagaacagtttattttagatgaagtcgtcataaaagaaatcgaccgttggctggccaaatacccgactgaccaaaaacggtcagcggtcgtaccggctttattatttgttcaaaaacaaaataacggttggctcagtaaagcagccatgaacgcgttagccgattatttgcaattgccccgtatttgggtttacgaagtcgctactttttatgacatgtataaccttaaacccatgggcaaacataaaattagcatttgtcaaaatgttccttgttttttaaggggaagcgatgaaattgttgcttgcgttaaagagcggttgggtatcgattttgacgagaccacatccgatggtttatttacgctaaaaagtgttgagtgtatggctgcttgcggtggcgcgccgatgtgccaaattgacgatcaagaataccatgaaaatttaacacccgaaaaaatgatagcgattattgataaattagagcgggagtcgaaaacgaatgctgactaa

SEQ ID NO: 99665 - protein, 174 aa, Coxiella burnetii RSA 493
MNEQTEQFILDEVVIKEIDRWLAKYPTDQKRSAVVPALLFVQKQNNGWLSKAAMNALADYLQLPRIWVYEVATFYDMYNLKPMGKHKISICQNVPCFLRGSDEIVACVKERLGIDFDETTSDGLFTLKSVECMAACGGAPMCQIDDQEYHENLTPEKMIAIIDKLERESKTNAD

SEQ ID NO: 99666 - DNA, 489 bp, Nitrosomonas europaea ATCC 19718
  CDS (1)..(489): transl_table=11
atgagttcgtcgatgttaagcactgaagctctgagaaaaattgatcgggaagtcgctaaatatcctgctgaccggaaacaatcggccgtgatgtctgcactggcgatcgcacaggatgaaaaaggttggctggcaactgaaacgatggatttcattgcagattatcttgagatgcctgcaattgctgtctatgaagttgcgactttctacaatatgtataacctgaagccggtcggaaagtacaagcttacggtttgtaccaatctgccttgtgcattgtcaggtggaaaccagacggcagattatcttaaacagaaactgggtattggtttcaatgaaaccacgacagacgggttattcactctcaaagaaggtgaatgtatgggttcctgcggggatgcgccggtgcttctggtcaataacaagcgtatgtgcagtttcatgactgaagaccagatagataaactgcttgaggaattaaacagatga

SEQ ID NO: 99667 - protein, 162 aa, Nitrosomonas europaea ATCC 19718
MSSSMLSTEALRKIDREVAKYPADRKQSAVMSALAIAQDEKGWLATETMDFIADYLEMPAIAVYEVATFYNMYNLKPVGKYKLTVCTNLPCALSGGNQTADYLKQKLGIGFNETTTDGLFTLKEGECMGSCGDAPVLLVNNKRMCSFMTEDQIDKLLEELNR

SEQ ID NO: 99668 - DNA, 465 bp, Candidatus Blochmannia floridanus
  CDS (1)..(465): transl_table=11
atgaaatttaataaagaagaattagatattattcgactagaatgtacacattatgaaaatgatcgagctgcttcaatagaagcattaaaaattatccagaaaaggcagggatgggtatcagatgatgcaattaaattagtgtcacaagtattacatatctctgaatctgatgtagaaggtatagcgacattctataatcaaatttttaggcaaccggtaggaaaatatattgtacgttattgtgatagtaatgtatgttatattaatggatgtgaacaaattcaacaaactttagagtctagtttgggcattaagataggaaacactacacaagataataagtttactttgttacctacttgttgtatgggtttatgtgataaatctccggttcttatgatagataagaaaatatattcatgtattgttccatcagatataatgcaaatattgaggtcgtattag

SEQ ID NO: 99669 - protein, 154 aa, Candidatus Blochmannia floridanus
MKFNKEELDIIRLECTHYENDRAASIEALKIIQKRQGWVSDDAIKLVSQVLHISESDVEGIATFYNQIFRQPVGKYIVRYCDSNVCYINGCEQIQQTLESSLGIKIGNTTQDNKFTLLPTCCMGLCDKSPVLMIDKKIYSCIVPSDIMQILRSY

SEQ ID NO: 99670 - DNA, 501 bp, Chromobacterium violaceum ATCC 12472
  CDS (1)..(501): transl_table=11
atgctgtccgcacaatcgctagccttgatcgaccgcgaggtcgccaaatatccggccgaccagaagcgctccgccgtcatgggcgcgctgcgcatcgcgctggacgagcggcgcgccgccggtgaaaccccggaagcgcgctgcctgaacccggagctgatcgaattcgtcgcgaactacctgggcatcgccccggtggccgcctacgaagtcgccaccttctacaacatgtacgacatgaagccggtgggcaaattcaagatcaccgtctgcaccaacctgccctgtgcgctgtccggcggcgtcaacgccgcggagtacatctcgaagaagctgggcatcgccatcggcgaaaccagcgccgacggcatgtacaccctgctggaaggcgaatgcatgggcgcctgcggcgacgcgccggtcttgctggtgaacaaccacaagatgtgcagcttcatgacgcccgaagcaatcgataaaaaactggcggagttgaaataa

SEQ ID NO: 99671 - protein, 166 aa, Chromobacterium violaceum ATCC 12472
MLSAQSLALIDREVAKYPADQKRSAVMGALRIALDERRAAGETPEARCLNPELIEFVANYLGIAPVAAYEVATFYNMYDMKPVGKFKITVCTNLPCALSGGVNAAEYISKKLGIAIGETSADGMYTLLEGECMGACGDAPVLLVNNHKMCSFMTPEAIDKKLAELK

SEQ ID NO: 99672 - DNA, 549 bp, Photorhabdus luminescens subsp. laumondii TTO1
  CDS (1)..(549): transl_table=11
atgcaaagtgaaattaacgcgagtgctcaacaagcgcgccttgatgtggttaacgtaacagagtctcaggcaaaagcagattttgtgctgagtaccgaagagcacgatgctattgagcatgaaaaacaccactacgaagatccgcgcgccgcttcgatagaagcattgaaaattgtacagaagcatcgtggctgggtaccggatggtgccatttacgcgattgctgatgtgcttggtattcccgctagtgatgtggaaggtgtggcaacattctacagccagatttatcgtcaacctgtgggccgccatattattcgttattgtgacagcgtggtttgtcatattaccggttatcaagatgtccaggctgcaattgaaaaacatctaaatatctgtccgggacagacgacgaaagatgggcgttttacgctgttgccaacctgttgtctgggtaactgtgacaaaggcccgaccatgatgatcgatgacgatacgcacagttctgtcagacctgaagagattgagaagttactggagcagtatccatga

SEQ ID NO: 99673 - protein, 182 aa, Photorhabdus luminescens subsp. laumondii TTO1
MQSEINASAQQARLDVVNVTESQAKADFVLSTEEHDAIEHEKHHYEDPRAASIEALKIVQKHRGWVPDGAIYAIADVLGIPASDVEGVATFYSQIYRQPVGRHIIRYCDSVVCHITGYQDVQAAIEKHLNICPGQTTKDGRFTLLPTCCLGNCDKGPTMMIDDDTHSSVRPEEIEKLLEQYP

SEQ ID NO: 99674 - DNA, 489 bp, Rhodopseudomonas palustris CGA009
  CDS (1)..(489): transl_table=11
atgagcctcagtcccgccctcaagaccgcaatccagcacgcggccgccacccatggcggcgcgaaggccgcgatggtggaagcgctgaagctggtgcaggaagccgaaggctgggtgtccgacgcgcacctgaaggaagcagccgatgtgctcggcgtcacgcccgccgagatcgacgcgctcgcgaccttctacagccagatcttccgctcgcctgtcggcgacaccgtgatcctgctgtgcgacgggctgagctgctatctgtgcggcggcgatgcggtgcgcgatgcggtgatgagcaagctcggcatcggctttggcgaaaccacgccggacggcaagttcacgctgatcaacatctgctgcgttggtggctgcgatcgcgccccggtggcgctggtcggccccgagcgcaagctggtcggcccgttgacgccggacgatctcgacgccctgatcggtggcgtctcggtgggaggcacgccatga

SEQ ID NO: 99675 - protein, 162 aa, Rhodopseudomonas palustris CGA009
MSLSPALKTAIQHAAATHGGAKAAMVEALKLVQEAEGWVSDAHLKEAADVLGVTPAEIDALATFYSQIFRSPVGDTVILLCDGLSCYLCGGDAVRDAVMSKLGIGFGETTPDGKFTLINICCVGGCDRAPVALVGPERKLVGPLTPDDLDALIGGVSVGGTP

SEQ ID NO: 99676 - DNA, 489 bp, Geobacter sulfurreducens PCA
  CDS (1)..(489): transl_table=11
atgatctcggagcttctcaaaaaggaacttcaggcccgcgtcgctcacgccgtcaccagccgtgaggcggccgtggacgtgatgaaagcgctgcagcgccactacggctggctcaccgacgaggcagtgggggaggcggcggagctcctgggactcacccccctccaggtggaggagctggccaccttctacgagatgatctaccgccgccccgtgggaaagcgggtgatccacgtctgcgactccatttcttgctgggccctggggggcgagagcctcatggcgcacctggcagcggcgctgaacatcgaaccggggggaaccacggcggacgggctctttacgcttctgccctgctgctgccttggcaactgcggcgaagccccgacgctcatggtcggcgacaccctccacggccgggtgacgctggagcgggccggggagatcctggcgactgagcggcggcagcttgcagccgcggagggatga

SEQ ID NO: 99677 - protein, 162 aa, Geobacter sulfurreducens PCA
MISELLKKELQARVAHAVTSREAAVDVMKALQRHYGWLTDEAVGEAAELLGLTPLQVEELATFYEMIYRRPVGKRVIHVCDSISCWALGGESLMAHLAAALNIEPGGTTADGLFTLLPCCCLGNCGEAPTLMVGDTLHGRVTLERAGEILATERRQLAAAEG

SEQ ID NO: 99678 - DNA, 501 bp, Wolbachia endosymbiont of Drosophila melanogaster
  CDS (1)..(501): transl_table=11
atgatagaaaaagaagagcagtttagttttacatcagaaaacctcaagaaagcgggaaagtttatagagatgtatcccaaaggtagagaaggtagtgctgttatgcctttactatatctggttcaagagcaatgcggatgggtttctgaatctgctatgcgttatgttgctgatatgctgcatattccacatattcgtgtatatgaagtggcaaatttttacaccatgtataatttaaaaccagtaggcaaatatctaatacaaatttgtagaacaactccttgctggttgtgcaatagtgaagaagttttaaatacctttaaaaaaaaacttggaatcaatatcggtgagactactaaagataatttgttcactttaaaagaagttgaatgcctaggtgcatgcgttaatgctcccgttgtgcagatcaataatgacttctatgaaaatcttactcctgagaaagtagaaaacatcataacagaactttcaggcaaatag

SEQ ID NO: 99679 - protein, 166 aa, Wolbachia endosymbiont of Drosophila melanogaster
MIEKEEQFSFTSENLKKAGKFIEMYPKGREGSAVMPLLYLVQEQCGWVSESAMRYVADMLHIPHIRVYEVANFYTMYNLKPVGKYLIQICRTTPCWLCNSEEVLNTFKKKLGINIGETTKDNLFTLKEVECLGACVNAPVVQINNDFYENLTPEKVENIITELSGK

SEQ ID NO: 99680 - DNA, 480 bp, Bdellovibrio bacteriovorus HD100
  CDS (1)..(480): transl_table=11
ttgaatatgtttaaattgtctgattctggcttggctgcagtaaaaagtgaactggctcgctacgaggcgaaagagtccgctattattccaagcctttacattgctcaaaaagaaaacaacggcttcatcacgccggaaatcatccgcacactttctcaggtgatggatattccggaagcacgtatcaatgaagtgtttaagttctacaccatgttcaaccagaagcccgtgggcaagtaccacgtgcaggtttgcacgaacatctcctgcgctcttgagggcggtcgtgagatggcaaaacacatctgtcatgaactgggcgtgaagttcgatcaggtcactgcggacggtcgtttcacagtttccaaggtcgagtgccttggttcctgcggaactgcgccgatgatgcaggtgaatgacagctatcacgaaaagctgactcctgagactgcgatgaacctgttgagaggtatgaaataa

SEQ ID NO: 99681 - protein, 159 aa, Bdellovibrio bacteriovorus HD100
MNMFKLSDSGLAAVKSELARYEAKESAIIPSLYIAQKENNGFITPEIIRTLSQVMDIPEARINEVFKFYTMFNQKPVGKYHVQVCTNISCALEGGREMAKHICHELGVKFDQVTADGRFTVSKVECLGSCGTAPMMQVNDSYHEKLTPETAMNLLRGMK

SEQ ID NO: 99682 - DNA, 729 bp, Strongylocentrotus purpuratus
  CDS (1)..(729)
atgatgagattaccctttcaaatgttggttcggtcaacggcccagcagctgaggaccttacacaccagtagagctgctgcatcaggacaactatttgtgcacagagattcggatgccaacaacccaaatactccgtttgaattcacagaagagaatatgaagagagtaaatgacatcatagccaactatccagagggtcaccaagcagcagcgtgcctgccaatccttgacctcgcccagaggcagcatggatggacgcccatctcagccatgaacaaggtagcagatatcctcaagatgcccaagatgagagtctacgaggtcgccaccttctacaccatgtttaacaggaatccagtgggcaaataccacattcagatctgcacaacaacaccctgtatgctgagagattcagactctattcttgaagtcctcacaaggaaattaggcatcaaggtcggagagacaaccaaggacaacatgttcacactggccgaggtggaatgcctaggagcttgtgtgaacgcacccatggtgcagatcaacgacaactactatgaagaccttgcggtcaaggacatggaggagatcatcgatgacctgaaggctggcaggactcccaagcctggaccaaggaatgcaaggtttgcatcagaaccagagggcggtctaactagtctcattgacccacccacagggcctggattcggtgtacgggacgacttgtga

SEQ ID NO: 99683 - protein, 242 aa, Strongylocentrotus purpuratus
MMRLPFQMLVRSTAQQLRTLHTSRAAASGQLFVHRDSDANNPNTPFEFTEENMKRVNDIIANYPEGHQAAACLPILDLAQRQHGWTPISAMNKVADILKMPKMRVYEVATFYTMFNRNPVGKYHIQICTTTPCMLRDSDSILEVLTRKLGIKVGETTKDNMFTLAEVECLGACVNAPMVQINDNYYEDLAVKDMEEIIDDLKAGRTPKPGPRNARFASEPEGGLTSLIDPPTGPGFGVRDDL

SEQ ID NO: 99684 - DNA, 732 bp, Nasonia vitripennis
  CDS (1)..(732)
atgtttacgtcgcttcgaaaggcttgcagcctttcgctgctaaagaatatacggaatctacaaacatcagctgtgcgaacctctgatgctctattcgttcatagagatacagaacaggataaccctaacataccgtttgagtttgacgctgcaaataagaagcgaattgaagcaattcttaagatttatccagaaggtcacaagcgaggagctatgattccactgctggatcttgctcaacgtcagcatggttggctaccaatttcagcgatgcacaaagttgcagaaattcttggagtatcgaacatgagagtgtacgaggtcgctactttttacacaatgttcaatcgcagaccaatgggcaaatatcatgttcaagtgtgtacttgtaccccatgctggttaagagattctgatagtattatgaaggctgtcaaggaacttactaattgcgaagtcggtggaaattcgcccgacaacatgttctccatctctgaagttgaatgtctaggtgcctgtgccaatgctccgatgttacaagtcaacgatgactactatgaggatttgacaccagaaacaacagcaactattataaacgctttaaagcgaggagaacggccagcaccaggacctcagtgtaaaaatcgatacgcagctgaaccaaatggaggtcttacttcactgacttctccgccaaaagaacctagttttggagtacgatcagatttgtag

SEQ ID NO: 99685 - protein, 243 aa, Nasonia vitripennis
MFTSLRKACSLSLLKNIRNLQTSAVRTSDALFVHRDTEQDNPNIPFEFDAANKKRIEAILKIYPEGHKRGAMIPLLDLAQRQHGWLPISAMHKVAEILGVSNMRVYEVATFYTMFNRRPMGKYHVQVCTCTPCWLRDSDSIMKAVKELTNCEVGGNSPDNMFSISEVECLGACANAPMLQVNDDYYEDLTPETTATIINALKRGERPAPGPQCKNRYAAEPNGGLTSLTSPPKEPSFGVRSDL

SEQ ID NO: 99686 - DNA, 696 bp, Anopheles gambiae str. PEST
  CDS (1)..(696)
atgcgactcggggctacccggcctctgagcacgtcggcggtgaagatgagcgacaacctgttcgtgcatcgcgatacgcccgaggataatgccagcattccgttcgagtttaccgcagacaaccagaagcgagcggaagccatcctgaacatctatccggagggtcacaagcgtggtgcgatgattccgctgctggatcttgcccagcgccagcacggttggctgccactgtcggccatgcacaaggtggccgacatcctgggcctgcctcacatgcgcgtgtacgaggtggccaccttctacacgatgtttatgcgcaaaccgaccggaaagtatcacatccaggtgtgcactaccacaccgtgctggctgcgcggatccgacgaagtgctggatgtctgcaagaaaaacctcggcatcggtgtcggcgaaactaccaaggatggtaagtttaccatctctgaagtggaatgtctcggtgcatgcgtaaacgccccgatgctggcagtcaacgatgattactatgaggatttaagcgtggctgatacggaagaaattctaaacagtctcaagcagggacagcagccccgccccggaccacgcaatggacgatacgcctccgaaccagtcggtcagctgacctcgcttacggaggaaccgaagggtcccggctttgggctacaagcagggctgtaa

SEQ ID NO: 99687 - protein, 231 aa, Anopheles gambiae str. PEST
MRLGATRPLSTSAVKMSDNLFVHRDTPEDNASIPFEFTADNQKRAEAILNIYPEGHKRGAMIPLLDLAQRQHGWLPLSAMHKVADILGLPHMRVYEVATFYTMFMRKPTGKYHIQVCTTTPCWLRGSDEVLDVCKKNLGIGVGETTKDGKFTISEVECLGACVNAPMLAVNDDYYEDLSVADTEEILNSLKQGQQPRPGPRNGRYASEPVGQLTSLTEEPKGPGFGLQAGL

SEQ ID NO: 99688 - DNA, 774 bp, Magnaporthe grisea 70-15
  CDS (1)..(774)
atggcaagcaaaatgacgcctttaatccgcaccgccgtccggtcggcgtgccgctcaacaccaaagtcgcagatcagcatgagcagcaggacaatctcttcgacggcctcaagacgtagcgatacgctcatggtccaccgcaacacgcccgacaacaacccagacatccccttcaagttctcggcccagaacgaaaaggtcatcaccgaggtcctgaagcgttaccctccccagtacaagaaggccgccgtcatgccgctgctcgacattggccagcgtcagcacggcttcaccagcatcagcgtcatgaacgaggtcgcccgcatccttgagatgcctcccatgcgcgtctacgaggtcgctagcttctacaccatgtacaaccgcacccccgtgggcaagtactttgttcaggcctgcacgacgacaccatgccagctcggcggctgcggctctgacgccatcgtcaaggccatcaaggaggagctcggcatctctcagggccagaccaccccagacggcctcttcacctttatcgaggttgagtgcctcggcgcctgcgtcaacgcccccatgatccagatcaacgatgactactacgaagatctgaccccggagaccaccaagagcctacttgccggcctcaaggaccccagcaaggcggtgcccccggctggtcctctgagcggccgccactcgtgtgagcacagcggaggcctcacgaacctgacgagcgagccatggggtattgagaccacgaggagtgatctgtaa

SEQ ID NO: 99689 - protein, 257 aa, Magnaporthe grisea 70-15
MASKMTPLIRTAVRSACRSTPKSQISMSSRTISSTASRRSDTLMVHRNTPDNNPDIPFKFSAQNEKVITEVLKRYPPQYKKAAVMPLLDIGQRQHGFTSISVMNEVARILEMPPMRVYEVASFYTMYNRTPVGKYFVQACTTTPCQLGGCGSDAIVKAIKEELGISQGQTTPDGLFTFIEVECLGACVNAPMIQINDDYYEDLTPETTKSLLAGLKDPSKAVPPAGPLSGRHSCEHSGGLTNLTSEPWGIETTRSDL

SEQ ID NO: 99690 - DNA, 783 bp, Gibberella zeae PH-1
  CDS (1)..(783)
atggcgagcaggttcactcctctcatccgctccgtcatccggccggcgtgccgggttgcccgccctcagtctcgcgccgccttctccctcacagccagccgacgaagcgacactctcatggtgcatcgaaacaccgaggacaacaaccccgacatccccttcaagttcaacgcagagaaccaaaaagtcatggccgagatccttaagcgataccctccccagtacaagaaggctgctgtcatgcctctgctcgacctcggccagcgccagcacggcttcaccagcattagcgtcatgaacgaggtcgctcgtcttcttgagatgcctcccatgcgagtgtacgaggtcgcttctttctacaccatgtacaaccgaaccccagtgggcaagtactttgtccagatctgcactacgaccccttgccagcttggaggctgcggctccgatgttatcgtcaaggccatcaaggaggagctcggcattgagcagggccagaccaccgccgacggtctcttcaccatcctcgaggtcgaatgcctcggtgcctgtgtcaacgcccctatgatccagattaacgacgactactacgaggaccttacccctgcttccgtcaaggaccttctcaagtccctccgatccaaggccactgctactgatccttccaccgtcaatgttcccaagcctggtccccttagcggccgaaaagactgcgagaacagtgctggcctgacaagccttacctcggagccctggggaaccgagaccacaaggaaggatctgtag

SEQ ID NO: 99691 - protein, 260 aa, Gibberella zeae PH-1
MASRFTPLIRSVIRPACRVARPQSRAAFSLTASRRSDTLMVHRNTEDNNPDIPFKFNAENQKVMAEILKRYPPQYKKAAVMPLLDLGQRQHGFTSISVMNEVARLLEMPPMRVYEVASFYTMYNRTPVGKYFVQICTTTPCQLGGCGSDVIVKAIKEELGIEQGQTTADGLFTILEVECLGACVNAPMIQINDDYYEDLTPASVKDLLKSLRSKATATDPSTVNVPKPGPLSGRKDCENSAGLTSLTSEPWGTETTRKDL

SEQ ID NO: 99692 - DNA, 732 bp, Apis mellifera
  CDS (1)..(732)
atgtttccatctttgtatacaattcgtactttttttaattacaaaaatgttagaagattacaaacttcaatcattcgtacttcagatcaattatttgttcatagagatagtgaagttgataatccaagtataccatttgaattcaatgaagcaaataaaaaacgtattgaagctcttttgaaaatttatcctgaaggtcataaacgtggtgcaatgatacctctattagatttggctcaacgacaatatgggtggttacccatttctgctatgcacaaagtagcagaaatattaaatatacctcgtatgagagtttatgaagttgcaacattttatacaatgtttaacagaagaccaatgggaaaatatcatgtacaaatttgtacttgtactccatgttggttacgagattccgattctattgtagaagctgtaactaaggttacaaattgtaaagtcggagaaatgtctgcagataaacttttcacagtttctgaagtagaatgtcttggtgcttgtgctaatgcaccaatgtttcaagttaatgatgattattatgaagatttaactcctgaaagtgctatttctataataaatgcatttaaaaaaggagaaagaccaccaccaggaccacaaaattctcctagatttgcagcagatccagcaggaggtttaacatcattaacatctccaccaccaggaccgggatttggagttagatcagatttataa

SEQ ID NO: 99693 - protein, 243 aa, Apis mellifera
MFPSLYTIRTFFNYKNVRRLQTSIIRTSDQLFVHRDSEVDNPSIPFEFNEANKKRIEALLKIYPEGHKRGAMIPLLDLAQRQYGWLPISAMHKVAEILNIPRMRVYEVATFYTMFNRRPMGKYHVQICTCTPCWLRDSDSIVEAVTKVTNCKVGEMSADKLFTVSEVECLGACANAPMFQVNDDYYEDLTPESAISIINAFKKGERPPPGPQNSPRFAADPAGGLTSLTSPPPGPGFGVRSDL

SEQ ID NO: 99694 - DNA, 732 bp, Yarrowia lipolytica CLIB122
  CDS (1)..(732)
atgctccgactgatccgaccccgtttggcagctctcgcccggcccaccactcgggccccccaggctctcaatgcccgaactcacattgtctctgtacaccgaaacactgagaacaacaaccccagcattccctttgagttctcccccgagaacatgaagcgagctgaggaggtgattgccaagtacccccctcagtacaagaaggctgctgttatgcctcttctcgacattggccagcgacagctcggttatacctccatctccgtcatgaactacgtggccaagctgctggaaatgccccccatgcgagtctatgaggtggccaccttctacacaatgtacaaccgaacccctatgggccggtaccatctgcagatctgtaccaccaccccctgtcagctgtgtggctccgacggtatcatggaggctgtccagaacacccttaacatcaagcccggtgagaccaccaaggacaacctcttcactctctctgaggttgagtgtctcggagcctgtgtcaacgcccccatgatggccatcaacgacgactactacgaggatctcactcccgagggaaccgtcaagcttctggaggactgcaaggccggcaagatgcccactcccggccccgagaaccacgttcgacgagactgcgagcccgcctccggccagaaggtgctgctcagcaaggagcctcataacgtggccgatttcctccaggagggtatttaa

SEQ ID NO: 99695 - protein, 243 aa, Yarrowia lipolytica CLIB122
MLRLIRPRLAALARPTTRAPQALNARTHIVSVHRNTENNNPSIPFEFSPENMKRAEEVIAKYPPQYKKAAVMPLLDIGQRQLGYTSISVMNYVAKLLEMPPMRVYEVATFYTMYNRTPMGRYHLQICTTTPCQLCGSDGIMEAVQNTLNIKPGETTKDNLFTLSEVECLGACVNAPMMAINDDYYEDLTPEGTVKLLEDCKAGKMPTPGPENHVRRDCEPASGQKVLLSKEPHNVADFLQEGI

SEQ ID NO: 99696 - DNA, 813 bp, Aspergillus nidulans FGSC A4
  CDS (1)..(813)
atggcttccaaatttttccccgcccttcctcgggctggtcgccagttcactcgccagatctctcggccccaattcagacccttttccgcggctccgcaacggttgagcgacacccttcatgtgcaccgcaacacccccgagaacaacccgtccattcccttcaagttctccgaacagaaccaacagctcatcgaggaaatcatcgcccggtacccccctcaatacaagaaggcagccgtcatgcctttgctggatctcggccagcgtcaacacggcttcacaagcatcagcgtcatgaatgaggtcgctcgcatccttgagatgcccccgatgcgcgtctacgaagtcgcaaccttctacacaatgtacaaccgtgagccggttggcaaatactttgttcagctttgcacgacgacaccatgccaactcggcggctgcggaagcgacaagatcgtcaaggccatcacagaacacctcggtatcaccccaggccacacaaccgaagatggcctgttcacattcatcgaggttgaatgtctcggtgcctgcgtcaacgctcctatggtccagatcaacgacgactactacgaagacctgacccccgagtccatcaaggagcttctcactgcgctcaaagaatccgctaccgccacctccggccaggttaagatccctgctccaggccctctatccggcagaatcagctgcgagaacagcgctggtctcacgaatttgcacaaccccgtgtgggatcccgagacgatgatgaggaaggacggtgccctggacggggaggcgcagcaggcgcaataa

SEQ ID NO: 99697 - protein, 270 aa, Aspergillus nidulans FGSC A4
MASKFFPALPRAGRQFTRQISRPQFRPFSAAPQRLSDTLHVHRNTPENNPSIPFKFSEQNQQLIEEIIARYPPQYKKAAVMPLLDLGQRQHGFTSISVMNEVARILEMPPMRVYEVATFYTMYNREPVGKYFVQLCTTTPCQLGGCGSDKIVKAITEHLGITPGHTTEDGLFTFIEVECLGACVNAPMVQINDDYYEDLTPESIKELLTALKESATATSGQVKIPAPGPLSGRISCENSAGLTNLHNPVWDPETMMRKDGALDGEAQQAQ

SEQ ID NO: 99698 - DNA, 732 bp, Candida albicans SC5314
  CDS (1)..(732): transl_table=12
atgttggctcgttttattgggaaatcaactacaacaccagtgggtgtatacgcttctactgtatcaaagagatactcttccatcatctccgttcatagagacaccaaagaagacaacccaaacatagcatttgaatttaattcagaaaacaaaaaaagagctgaggaaataattgccaaataccctccacaatataaaaaaggtgcctgtatgccattattagatttgggacaacgtcaattaggatttacttctatttcagtgatgaactatgttgccaagttattagatatgccaccaatgagagtgtatgaagtggctacattttataccatgtacaatagacatccaatggggaaatacaatttgcaagtttgtactaccacgccttgtcaattatgtggaagtgacagtattatgaaggccattactgattatttaaaaattaaaccaggacaaaccactccagataaattgtttacattacaagaggttgaatgtttaggtgcttgtgttaatgctccaatgattgcaatcaacgatgattatcatgaagatttgtcaccagaagctaccataaacttgttgaaacaattacaagaaggtaaagagttgactgaaatcggaccagtagatggtaaaagacaatcttgtgaacctttcagtggaccaaaggtattattgaacaaagaacctaatgatataagaaaattcacgagagctgatttgtaa

SEQ ID NO: 99699 - protein, 243 aa, Candida albicans SC5314
MLARFIGKSTTTPVGVYASTVSKRYSSIISVHRDTKEDNPNIAFEFNSENKKRAEEIIAKYPPQYKKGACMPLLDLGQRQLGFTSISVMNYVAKLLDMPPMRVYEVATFYTMYNRHPMGKYNLQVCTTTPCQLCGSDSIMKAITDYLKIKPGQTTPDKLFTLQEVECLGACVNAPMIAINDDYHEDLSPEATINLLKQLQEGKELTEIGPVDGKRQSCEPFSGPKVLLNKEPNDIRKFTRADL

SEQ ID NO: 99700 - DNA, 810 bp, Ustilago maydis 521
  CDS (1)..(810)
atggccgctcttcgtacatcttcgcgtttgctgatgcgatctgcagcctttgttgccagtgccgctacgcgatccaaccttgttgctgttgccagcagctcctctcgcacagccgctagccgaactctctccacctcagcagctcgatcctccgactctctcttcgttcaccgcaacaccgactataacaacccggacattccattcgagtttaacgaggagaatgcaaagatggcacaggagatcatctcgcactacccagaacagtacaaaaaagcagccgtgatccccttgcttgacttgggtcaacgacagaactccggttgggtctcgatctcggtcatgaactacgtggccaagctgctcgagatgccacctatgcgtgtatatgaagtagctacgttctacaccatgttcaatcgcgaaccggttggcaagtactttttacagctttgcactaccaccccttgcatgctcggaggttgcggttccacaaagatcctcgaggcgctcgaatccaagttgggcatcaaggctggtcaaactaccaaggacaacaagttcaccttggtcgaggtcgaatgcttgggcgcttgcgccaacgctcccatgatccagatcaacgatgacttcttcgaggacttgacgccggagagcatgaacaacatcatcgacaagcttagcaacggtgaaaaggtaaagcctggcccgcagtcgggtcgtcactcttcggagcctgctaacggtcgaaccgcgctcacttccgagccatacggaccgggcaaattctgtgttcccgagttcgcttga

SEQ ID NO: 99701 - protein, 269 aa, Ustilago maydis 521
MAALRTSSRLLMRSAAFVASAATRSNLVAVASSSSRTAASRTLSTSAARSSDSLFVHRNTDYNNPDIPFEFNEENAKMAQEIISHYPEQYKKAAVIPLLDLGQRQNSGWVSISVMNYVAKLLEMPPMRVYEVATFYTMFNREPVGKYFLQLCTTTPCMLGGCGSTKILEALESKLGIKAGQTTKDNKFTLVEVECLGACANAPMIQINDDFFEDLTPESMNNIIDKLSNGEKVKPGPQSGRHSSEPANGRTALTSEPYGPGKFCVPEFA

SEQ ID NO: 99702 - DNA, 732 bp, Tribolium castaneum
  CDS (1)..(732)
atgttgacaacaataaagaccgtcgggagctgtttgcgccgaactttgggggtccgttcccttcaaactgcttcaaccctccaacatgaagcagttttcaatcatagagacactcctgaagacaaccccgatatcccttttgatttcacccccgaaaacaagaagagagctgatgccattcttgcaatttaccctgagggacataaacgagccgcgatgatcccccttcttgacttggcgcaaagacaacacggttggctccctatttcagctatgcacaaagttgctgaaattttaaacctgccaaggatgagagtgtacgaagttgcgacgttctacacaatgtttatgcgtaaaccgacaggaaagtaccatatccaagtttgtacaacaacgccgtgttggctgagaggctctgacgagattttagacacaatcaagtgtaatttgaagttggaagttggggaaacttcgagcgatggcatgtttacactttctgaagttgagtgtctcggggcgtgcgtgaatgcccccatgattcaagttaatgatgattattatgaggatttgacggccaaagatacggaagagattttgaacgatttgaaaaataataaaaaaccaaaacctggccccaggaatggccgttttgctgctgagccaattggcgagccaacctgtctcgccggtgagcccccaggtccaggcttcggggtccgttccgatctataa

SEQ ID NO: 99703 - protein, 243 aa, Tribolium castaneum
MLTTIKTVGSCLRRTLGVRSLQTASTLQHEAVFNHRDTPEDNPDIPFDFTPENKKRADAILAIYPEGHKRAAMIPLLDLAQRQHGWLPISAMHKVAEILNLPRMRVYEVATFYTMFMRKPTGKYHIQVCTTTPCWLRGSDEILDTIKCNLKLEVGETSSDGMFTLSEVECLGACVNAPMIQVNDDYYEDLTAKDTEEILNDLKNNKKPKPGPRNGRFAAEPIGEPTCLAGEPPGPGFGVRSDL

SEQ ID NO: 99704 - DNA, 498 bp, Clostridium thermocellum ATCC 27405
  CDS (1)..(498): transl_table=11
atgagcgcaaatggttgctgctgttgcggcggagtagactccagagaacaaaaacttaacgaaataattgaaaaatacaaaaacacaaaaggagcgcttgttcctgttcttcatgaagcacaggaagtatatggttatttgcctctggaggttcagaaaaaaattgctgaagggcttaacatacctttggctgaagtttacggtgttgtaacattctatacccagttttccttgaatccaaaaggaaaatataaaatccaggtttgcatgggtactgcatgttatgtaaaaggatccggagctattttggaaaagcttaaagaaaagcttgagattgatgttggcgaatgcaccagtgacggcaagttttctttggaagcttgcagatgtataggagcttgtggattggccccggtaataatgattaacgacgatgtatacggcagacttgtacctgatgatatagaagggataattgaaaagtataagaaagaatga

SEQ ID NO: 99705 - protein, 165 aa, Clostridium thermocellum ATCC 27405
MSANGCCCCGGVDSREQKLNEIIEKYKNTKGALVPVLHEAQEVYGYLPLEVQKKIAEGLNIPLAEVYGVVTFYTQFSLNPKGKYKIQVCMGTACYVKGSGAILEKLKEKLEIDVGECTSDGKFSLEACRCIGACGLAPVIMINDDVYGRLVPDDIEGIIEKYKKE

SEQ ID NO: 99706 - DNA, 480 bp, Herminiimonas arsenicoxydans
  CDS (1)..(480): transl_table=11
atgctgttatcagagcaagcgtataaaaaaatcgatcgcgagatcgccaaattccctgcggatcaaaagcagtctgccgttatggcggcactcgccattgcgcaggatgaaaccggctggttgccaccggaggtgatgcaggaagttgccgactacctcggcatgccggcgatcgcggtgcaggaagtggcgactttctacaatatgtacgacaccaagccggtcggcaagcacaagatttcagtgtgcaccaacttgccttgcctgttgtccggtggcgagagagcagcacactatttgaaacataaactcggcatcgactatcgtgaaacaacggcagacggccagttcaccctgattgaaggggagtgcatgggcgcctgcggcgatgcacctgtgatgatcgtgaataacaaacgcatgtgcagcttcatgtcggatgacaagatcgatgcgctggtagaggaattgaaaaaatga

SEQ ID NO: 99707 - protein, 159 aa, Herminiimonas arsenicoxydans
MLLSEQAYKKIDREIAKFPADQKQSAVMAALAIAQDETGWLPPEVMQEVADYLGMPAIAVQEVATFYNMYDTKPVGKHKISVCTNLPCLLSGGERAAHYLKHKLGIDYRETTADGQFTLIEGECMGACGDAPVMIVNNKRMCSFMSDDKIDALVEELKK

SEQ ID NO: 99708 - DNA, 468 bp, Dehalococcoides sp. BAV1
  CDS (1)..(468): transl_table=11
atggaaagtatctggaaagaaaaagtagacggcgtcattacccagagcggaagctctcggctctctctccttccatgtttggaagcggttcaggaagagtgcggctacataccccacgaagctgtaaattatttgagggaatgcttaagcattccctcaattgatatttacggcatgattaccttctatagcctgctctctactaaccaaaagggaaagtacgtgatccgcctgtgtaattcgctaccctgttacctgaatggtacggaaaacattctggataccctggtggacaacctgggtatagaaccgggccaaaccactctggatcgacgttttaccctggagctggtaccctgtctgggattatgtgaccagtcaccggccatggtaattaacggggtggtttacggtaagctgactgctcagttggtaaccgaagtcctggatgaattgaggacttactaa

SEQ ID NO: 99709 - protein, 155 aa, Dehalococcoides sp. BAV1
MESIWKEKVDGVITQSGSSRLSLLPCLEAVQEECGYIPHEAVNYLRECLSIPSIDIYGMITFYSLLSTNQKGKYVIRLCNSLPCYLNGTENILDTLVDNLGIEPGQTTLDRRFTLELVPCLGLCDQSPAMVINGVVYGKLTAQLVTEVLDELRTY

SEQ ID NO: 99710 - DNA, 486 bp, Leptospira interrogans serovar Copenhageni str. Fiocruz L1-130
  CDS (1)..(486): transl_table=11
ttgctgatgggttataagttcagcgaaacttccgaaaaaagatttcaaaaaatgctggaagcgtttccggacaaacgttccctgattcttccttgtttgtatattctacaaagagaaaacggatttgtggatcaagaaggaatgaactacattgcagaacgtataggagatccgatttctctggcgcaagtctacggggtcgccacgttttataccctctacaataaaaaaccggtcggtaaatatcatatacagatttgcggaacgtctagctgttatctgcgtggaagcgacgaaatcgaagaacatatttgtaaacgtctcggaattcataccggacaaactacgtctgatcaaaaattcaccttagaagaagtagaatgtttaggcgcctgtggatacgctcctatggtgcaaattaacgacgacttttacgaacatctgactcccgaaaaagtagatcagattttagacgatctgaactga

SEQ ID NO: 99711 - protein, 161 aa, Leptospira interrogans serovar Copenhageni str. Fiocruz L1-130
MLMGYKFSETSEKRFQKMLEAFPDKRSLILPCLYILQRENGFVDQEGMNYIAERIGDPISLAQVYGVATFYTLYNKKPVGKYHIQICGTSSCYLRGSDEIEEHICKRLGIHTGQTTSDQKFTLEEVECLGACGYAPMVQINDDFYEHLTPEKVDQILDDLN

SEQ ID NO: 99712 - DNA, 651 bp, Bartonella quintana str. Toulouse
  CDS (1)..(651): transl_table=11
atgtccgtccgccgtcttgcagatgatgtctaccaacctgccgagttttcttttacaaaagaaaatcagatatgggtgcaaaatactatagaaaaatatcctgtagggcgtgaacagtctgctgtaattccattattaatgcgtgctcaagagcaagatggttgggtgacacgtgctgcaattgagcatatcgctcagatcctttccatggcttatattcgtgttctagaggttgcaactttttacacgcagtttcaactccagccagttggaacaaaagcacatattcaaatctgtggtacaaccccttgtatgttacgtggttctggtgaattgattaaagtttgtcagaaaaaaattcataatgaaccttttgttaccaatcaggatggaacactatcatgggaagaggtagagtgtcttggtgcctgtgtaaatgctccaatggttatgatttttaaagatacttatgaagatcttacagctgagcgtcttgaagaaattattgatgcgtttgaagcaggtaagggttctgagatagcggttgggccgcaaaatagtcgtaaatcatcggagccgattagcggtttaacttctctcattgatgatgaagaagaaaaaaagaaatcgctcaagtcttcaaaaaaataa

SEQ ID NO: 99713 - protein, 216 aa, Bartonella quintana str. Toulouse
MSVRRLADDVYQPAEFSFTKENQIWVQNTIEKYPVGREQSAVIPLLMRAQEQDGWVTRAAIEHIAQILSMAYIRVLEVATFYTQFQLQPVGTKAHIQICGTTPCMLRGSGELIKVCQKKIHNEPFVTNQDGTLSWEEVECLGACVNAPMVMIFKDTYEDLTAERLEEIIDAFEAGKGSEIAVGPQNSRKSSEPISGLTSLIDDEEEKKKSLKSSKK

SEQ ID NO: 99714 - DNA, 513 bp, Acinetobacter sp. ADP1
  CDS (1)..(513): transl_table=11
atgatgatgattttgactgataaaaaacctcgtgtgaatgttgaaggaattttgactgctgatgaaattcatgaaattgaacatcacattcatcactatccttatccacgcgctgcatctttagatgcgttgaaatgtgttcagcgtcgtaatggctgggtcgatgatgcgcaaatgaatgcgattgcacaaatgctcagtattagtgtggctgatttggaaggtgtagcaacattctataaccgtatttaccgccagcctgtaggccgtcatgtgattttactctgcgattcgatcgcgtgttttctcatgggtgctgaaacgttagcagaggcattccagcgtgagcttggaatccagtatgggcaaacgacagcagatggtcgcttcacattattgccaatttgctgtttaggaaattgcgataaaggaccaaccttaatgattgatgaagatacacatggcttagttgatgtatcttcggtcaaacagttattggagaagtatgtatga

SEQ ID NO: 99715 - protein, 170 aa, Acinetobacter sp. ADP1
MMMILTDKKPRVNVEGILTADEIHEIEHHIHHYPYPRAASLDALKCVQRRNGWVDDAQMNAIAQMLSISVADLEGVATFYNRIYRQPVGRHVILLCDSIACFLMGAETLAEAFQRELGIQYGQTTADGRFTLLPICCLGNCDKGPTLMIDEDTHGLVDVSSVKQLLEKYV

SEQ ID NO: 99716 - DNA, 546 bp, Erwinia carotovora subsp. atroseptica SCRI1043
  CDS (1)..(546): transl_table=11
atgcatgatcacaacaatcacgatcatattgacgctcagggacaacctgctgccgattcgctgacaaaagaaaatgcttttgtattgagtgacgccgaacgtgacgccattgagcacgaaaagcatcactacgaagatgcacgtgccgcgtcaattgaagcactgaaaattgtgcaaaaagcacgtggctgggtaccggatggtgctatcaacgcgattgccgatctgctgggtatccccgccagtgacgtggaaggtgtggcaacgttctacagccagatttatcgccagccagtcgggcgtcatattattcgctattgcgatagcgtcgtgtgccacatcaatggctatcagggtgttcaggctgcgcttgagcgtaagctcagcatcaaaccggggcagacaacgttcgatggacgtttcacactgctgccgacctgctgcctgggtaactgtgacaaggggccgtcaatgatgattgacgacgatacccacagccatgtgacgccggaaggtatcgaatcgttattggagcagtatcaatga

SEQ ID NO: 99717 - protein, 181 aa, Erwinia carotovora subsp. atroseptica SCRI1043
MHDHNNHDHIDAQGQPAADSLTKENAFVLSDAERDAIEHEKHHYEDARAASIEALKIVQKARGWVPDGAINAIADLLGIPASDVEGVATFYSQIYRQPVGRHIIRYCDSVVCHINGYQGVQAALERKLSIKPGQTTFDGRFTLLPTCCLGNCDKGPSMMIDDDTHSHVTPEGIESLLEQYQ

SEQ ID NO: 99718 - DNA, 786 bp, Propionibacterium acnes KPA171202
  CDS (1)..(786): transl_table=11
atgagcgatcgcgaacccgtcaacctgggatacccctacgtcgagtctttccactcggacttctcggggaccggcggagtcgatcagaccgaccgttctaccaatatcgacgagcacaccatcgaggagatgcatcagatcgcctcgcgttaccccgactcccgttcggcgttgctgccgatcctgcacctggttcagtcggtggacggacgcatctcgccggtcggcattgagactgcggctgaagtgctcggcattaccaccgcccaggtatccggggtggcgaccttctacaccatgtataagaagcaccctgcgggccagcatcacatcggtgtctgcaccacggcgctgtgcgccgtcatgggtggcgaggaggtgcttgcccgtgtcgagaagaagcttggcattaaagaggggcagacaacccccgacggcaagttctctcttgagcgggtggagtgtaatgctgcctgcgatttcgcgccgatcatgatggtcaactgggaatacatggataacatgactccgatccgcgctgaggaaatcttggattccttggctcgcgacgaagaggttcattccacccgcggtgcgaagatcactagctggcgtgaggctgagcgagtgctcgctggcttccccgatggtcgggctgacgagggccctagcgccggtgaggcatctctgcagggtgtccggctagctaagcagagcggctggaaggctccagatccgaataacctgcccgctcccgctgagcccgtggaagaggagaagaagtga

SEQ ID NO: 99719 - protein, 261 aa, Propionibacterium acnes KPA171202
MSDREPVNLGYPYVESFHSDFSGTGGVDQTDRSTNIDEHTIEEMHQIASRYPDSRSALLPILHLVQSVDGRISPVGIETAAEVLGITTAQVSGVATFYTMYKKHPAGQHHIGVCTTALCAVMGGEEVLARVEKKLGIKEGQTTPDGKFSLERVECNAACDFAPIMMVNWEYMDNMTPIRAEEILDSLARDEEVHSTRGAKITSWREAERVLAGFPDGRADEGPSAGEASLQGVRLAKQSGWKAPDPNNLPAPAEPVEEEKK

SEQ ID NO: 99720 - DNA, 465 bp, Desulfotalea psychrophila LSv54
  CDS (1)..(465): transl_table=11
atgcaaaacatcgtgaaaactatccttgactcatacacaggcatagacatggaactcattcccattctgcagaatgtccaacacaaatttggctacctgccggaagatgccatgagagaagtcgccgatttcttacgcattcccgaaagtcgcgtctacggcgtcgccacattttatgaacaatttcgctttactcccgtcggcaaaactaaggtcaccgtttgccgcggaactgcctgccatgtacgaggggctcaaaagatcatagcaagcgttgaaaaacgccttggtataaaagaaggtgaaaccacggaagatggtgagtacaccctggaaacagcagcatgcatcggctgttgtgcccttgctccctgtgtcatgatcaatgaagaggttgaggccaacttaactccaaaaaaaatgaatgcatattttgaccagaaggaagaggccaatgacgattaa

SEQ ID NO: 99721 - protein, 154 aa, Desulfotalea psychrophila LSv54
MQNIVKTILDSYTGIDMELIPILQNVQHKFGYLPEDAMREVADFLRIPESRVYGVATFYEQFRFTPVGKTKVTVCRGTACHVRGAQKIIASVEKRLGIKEGETTEDGEYTLETAACIGCCALAPCVMINEEVEANLTPKKMNAYFDQKEEANDD

SEQ ID NO: 99722 - DNA, 564 bp, Yersinia pseudotuberculosis IP 32953
  CDS (1)..(564): transl_table=11
atgagtgatcaaaaagagactcaggctcataacggaagccttgatgtggtgaatctggcagtcaatgcggctgaaccagcggccatgccagacgccttcgaattgagtaccgaagaacgtgatgctatcgagcatgagaaacaccattacgaagatgcccgtgcagcgtcgattgaagcactgaaaattgtgcagaagcaacgtggctgggtgccggatggtgcgatccacgcgattgctgatgtgctgggtatcccggccagtgatgttgagggggtcgccaccttctacagccaaatcttccgccaaccggtagggcgtcatgtgatccgctactgtgacagcgtggtgtgccatatcaccggctatcaggggattcaggcggcactggagaaaaaactcagtatcaagccaggccaaacgaccttcgatggccgtttcaccttgctgccaacctgttgtctgggtaactgcgaccgtgggccgacgatgatgatcgatgacgacacccacagctacctgaagcctgaagagatcgagaagttactggagcaatatccatga

SEQ ID NO: 99723 - protein, 187 aa, Yersinia pseudotuberculosis IP 32953
MSDQKETQAHNGSLDVVNLAVNAAEPAAMPDAFELSTEERDAIEHEKHHYEDARAASIEALKIVQKQRGWVPDGAIHAIADVLGIPASDVEGVATFYSQIFRQPVGRHVIRYCDSVVCHITGYQGIQAALEKKLSIKPGQTTFDGRFTLLPTCCLGNCDRGPTMMIDDDTHSYLKPEEIEKLLEQYP

SEQ ID NO: 99724 - DNA, 504 bp, Legionella pneumophila subsp. pneumophila str. Philadelphia 1
  CDS (1)..(504): transl_table=11
atgtctgctaattcagcaaaaatattaagtcaattgatgccggcaaaccgtatgctcgatattgatcattggatatcaaaatatcccaaagatcaaaaacaatccgcggtcatgagtgctcttcgaatagtacaagaagaacatggtcatttaacaacggaattaatgaatgcagtagctgaatatcttgatatgccgcccatcgcagtttatgaagtagcaagtttttatacaatgtatgaacacaagccagtggggcgacatttaattaatgtttgtaccaatatttcttgcatgctgagggattctgctggcgttgttgaacatttagaaaaaaaattgggtgttaatctaggtggaacaacagaagatggtcgatttactttaagatcagttgaatgcttgggtgcttgtgtgaatgcgccaatgatgcaagttgataaagattatcacgaaaatttgactgctgaatctatagataaagtattggaacagtaccaatag

SEQ ID NO: 99725 - protein, 167 aa, Legionella pneumophila subsp. pneumophila str. Philadelphia 1
MSANSAKILSQLMPANRMLDIDHWISKYPKDQKQSAVMSALRIVQEEHGHLTTELMNAVAEYLDMPPIAVYEVASFYTMYEHKPVGRHLINVCTNISCMLRDSAGVVEHLEKKLGVNLGGTTEDGRFTLRSVECLGACVNAPMMQVDKDYHENLTAESIDKVLEQYQ

SEQ ID NO: 99726 - DNA, 474 bp, Methylococcus capsulatus str. Bath
  CDS (1)..(474): transl_table=11
atgaccctcacatccgacgaaatccaagccatcctccgggaagccgggcatttccctcacccttcggcggccgcgatcgaagcgttgaacatcgtgcagcgcagtcacggctggatttccgatgaactgctgcaggagatcgccgaactgctgggaatgtcgccggcggagctggacagcatcgccaccttctacaacctgatctaccgccggccggtcggcaggcgcgtcatccactactgcaacagcgtgagctgctggatgctgggcgccgaggacaaccgccgccatctgagcgaaaaactcggcatcgctgtgggggaaaccacggggaacggcgaatacaccctgctgcccatcgtctgcctgggggcctgcgacaaggcgccggtactcatgatcggcgacgagacccatttcaacgtcgatcccgccagactggacgacattctcggtgaaaccggagcgccctga

SEQ ID NO: 99727 - protein, 157 aa, Methylococcus capsulatus str. Bath
MTLTSDEIQAILREAGHFPHPSAAAIEALNIVQRSHGWISDELLQEIAELLGMSPAELDSIATFYNLIYRRPVGRRVIHYCNSVSCWMLGAEDNRRHLSEKLGIAVGETTGNGEYTLLPIVCLGACDKAPVLMIGDETHFNVDPARLDDILGETGAP

SEQ ID NO: 99728 - DNA, 510 bp, Anaplasma marginale str. St. Maries
  CDS (1)..(510): transl_table=11
atggatcaacgttcggagaaatttgagtttacacccgaaaacttggaggaggcccgcaagcatatcagccattatccggacgatcggaagtccagcgcagtgatgccacttttgcatctagtgcaaagccaagctggggggtttataccacagtcagccataggctacatagccgatcttctgggcatgcgtccagttcatgttcgggaggttgttgagttttactctatgtacaacaccgctccggtggggaaatacttagtgcaggtctgtcgcacaactccctgctggctgcgcgggggaagtgatatattaaatacttgcaagaaagcgcttaagattgatgttgatgagagcacaaaagataacctcttcacgctcagagaggttgaatgcctcggggcttgcgttaatgccccggtcgtgcaaataaacgaggactactacgaggacttggattccgaaaagatgggagagattctacacaagctcaaacacagtgagaactag

SEQ ID NO: 99729 - protein, 169 aa, Anaplasma marginale str. St. Maries
MDQRSEKFEFTPENLEEARKHISHYPDDRKSSAVMPLLHLVQSQAGGFIPQSAIGYIADLLGMRPVHVREVVEFYSMYNTAPVGKYLVQVCRTTPCWLRGGSDILNTCKKALKIDVDESTKDNLFTLREVECLGACVNAPVVQINEDYYEDLDSEKMGEILHKLKHSEN

SEQ ID NO: 99730 - DNA, 480 bp, Azoarcus sp. EbN1
  CDS (1)..(480): transl_table=11
atgctgagtcagaaatcgctacaacagatcgatcgcgagatcgcgaaatatccgccagatcagaaacagtcggcggtaatgtcggcgttgcgcatcgcccagattgaaatgggctggctggcgaaagagacgatcgaatttgtcgccggctatctcgacatgccggcaatcgccgcttacgaggtggcgagcttctacaacatgtacgatcttcagccggtgggacgccacaagatcacggtgtgcaccaacctcccgtgcgccctgtcggggggcgtgcatgcagccgattatgtgaagcagaagctggggatcgatttcaacgagaccacgccggacggcaagttcaccctcaaggagggtgaatgcatgggagcctgtggcgacgctccagtgctgctggtgaataatcaccacatgtgcagctggatgacgacggaaaagatcgatcaactgctggccgatctggaaaacaaatga

SEQ ID NO: 99731 - protein, 159 aa, Azoarcus sp. EbN1
MLSQKSLQQIDREIAKYPPDQKQSAVMSALRIAQIEMGWLAKETIEFVAGYLDMPAIAAYEVASFYNMYDLQPVGRHKITVCTNLPCALSGGVHAADYVKQKLGIDFNETTPDGKFTLKEGECMGACGDAPVLLVNNHHMCSWMTTEKIDQLLADLENK

SEQ ID NO: 99732 - DNA, 1245 bp, Silicibacter pomeroyi DSS-3
  CDS (1)..(1245): transl_table=11
atgctacgccgtctgcatcccgaacagcccgacagctttgcctttacgcccgccaacctggcctgggccgaggcgcaggtcaccaagtttcccgaaggccgtcaggccagcgcggtcatcccgctgctctggcgcgcacaggagcaggagggctggctgacccggcccgccatcgaagcggtcgccgatatgctgggcatggcctatatccgggttctcgaagtggcctccttctacttcatgttccaactgcaaccggttggaaccgtggcgcatatccagatctgtggcaccacgtcctgcatgatctgcggcgccgaggatctgatcgcggtctgcaaggaaaagatcgccgacaagccgcataccctgtccgccgatggcaagttcagctgggaagaggttgaatgcctcgggtcctgcaccaatgcgcccatggcccagatcggcaaggattattacgaagacctgaccgccaagcggttcggcgagcttctggacgagctggctgctggcaaggtgccggtgcccggcccccagaacgggcgttacgcgtcggaaccgctcaagggtctgaccagcttgaccgaatatgacagtggcaagacccgctataatgccagcgtgcaactggccaccgatatcggcgatacggtcaagcggatcgacggcaccgaagtgccgctgctgacgccctggatcggcaaggacggaaccgtcgccagccgcgcgggcaaggtcagcccgccgcccgcacccgccgccccgaaaccggcggtcaagcagacccccaaggccgaggcgaaacccgcgcccaagcccgaggccgaaccggtgctgaaaccctcggccgcgctgccgggtcaagaggagctggccgcccgcaagggaagctggcggtatgaagcacctgcggcagaggtcgcccaagcggacgcaaccggcgatgccggcgaggaacagccgctgaccctgtccgccgcgcgcgagggcggggccgacgacctcaagctgctcaagggcgttgggcccaagctcgaaggtctgctcaacgagctgggcttttaccatttcgaccaggtcgcggcctggaccccggcccaggtggcctgggtcgatgcccgcctgacattcaagggccggatcgaacgcgacggctggatcgaacaggcccgccaactggcggcgggcgaggaaacggaatttgccaaacgggcgaagaaggacggaatctacgacgaataa

SEQ ID NO: 99733 - protein, 414 aa, Silicibacter pomeroyi DSS-3
MLRRLHPEQPDSFAFTPANLAWAEAQVTKFPEGRQASAVIPLLWRAQEQEGWLTRPAIEAVADMLGMAYIRVLEVASFYFMFQLQPVGTVAHIQICGTTSCMICGAEDLIAVCKEKIADKPHTLSADGKFSWEEVECLGSCTNAPMAQIGKDYYEDLTAKRFGELLDELAAGKVPVPGPQNGRYASEPLKGLTSLTEYDSGKTRYNASVQLATDIGDTVKRIDGTEVPLLTPWIGKDGTVASRAGKVSPPPAPAAPKPAVKQTPKAEAKPAPKPEAEPVLKPSAALPGQEELAARKGSWRYEAPAAEVAQADATGDAGEEQPLTLSAAREGGADDLKLLKGVGPKLEGLLNELGFYHFDQVAAWTPAQVAWVDARLTFKGRIERDGWIEQARQLAAGEETEFAKRAKKDGIYDE

SEQ ID NO: 99734 - DNA, 468 bp, Dehalococcoides ethenogenes 195
  CDS (1)..(468): transl_table=11
atggaaagtatctggaaagaaaaagtagacggcgtcattacccagagcggaagctctcggctctctctccttccatgtttggaagcggttcaggaagaatgtggctatataccccatgaagctgtaaattatttgagggaatgcttaagcattccctctattgatatttacggcatgattaccttttatagcctgctctccaccaaccaaaagggaaagtacgtaattcgcctgtgtaattcgctgccctgttacctgaacggtacagaaaacatcctggataccctggtggataatctgggtatcgaacccggtcaaaccactctggaccaacgttttaccctggagctggtcccctgtttgggattatgtgaccagtcaccggctatggtaataaacggggtggtttacggaaagctgactgctcagctggtaaccgaagtcctggacgaattgaggacttactaa

SEQ ID NO: 99735 - protein, 155 aa, Dehalococcoides ethenogenes 195
MESIWKEKVDGVITQSGSSRLSLLPCLEAVQEECGYIPHEAVNYLRECLSIPSIDIYGMITFYSLLSTNQKGKYVIRLCNSLPCYLNGTENILDTLVDNLGIEPGQTTLDQRFTLELVPCLGLCDQSPAMVINGVVYGKLTAQLVTEVLDELRTY

SEQ ID NO: 99736 - DNA, 465 bp, Thermococcus kodakarensis KOD1
  CDS (1)..(465): transl_table=11
atgggggctggcttagattacatccgctcttatccacccgagccgagctcgcttattcccctcctccagaggacgcaggagcgcttcggctatctcccgcgggaagttcttgaggagattgcgaactaccttggaattccgctcagcagggtctacggcgttgccaccttctacgcgcagttccgctttgagccgctcgggaagtacgtggtgaaggtgtgccacgggacagcgtgccacgtcaacggtgccgtcaacatagcccaggccctaaaggaggagctcggcatagaggaaggacagacgacagaggacgggcttgtaacgcttgagcgcgtcgcctgcctcggctgttgcagcctcgcgccggtaataatgatcaacgagaaggtcttcggcaagctcacgcccgacaaggtgaggaagctggtcaagcaactcaaggaggggaagctcgatgtctga

SEQ ID NO: 99737 - protein, 154 aa, Thermococcus kodakarensis KOD1
MGAGLDYIRSYPPEPSSLIPLLQRTQERFGYLPREVLEEIANYLGIPLSRVYGVATFYAQFRFEPLGKYVVKVCHGTACHVNGAVNIAQALKEELGIEEGQTTEDGLVTLERVACLGCCSLAPVIMINEKVFGKLTPDKVRKLVKQLKEGKLDV

SEQ ID NO: 99738 - DNA, 498 bp, Pseudomonas syringae pv. syringae B728a
  CDS (1)..(498): transl_table=11
atgaatagcccgctaatccagactgaccgtttcgccctgagcgaaaccgagcgctcggccatcgagcatgagatgcatcactacgaggacccgcgcgcggcgtccatcgaagccctgaaaattgttcagaaggaacgtggctgggtgcctgacggtgccatttacgcgatcggcgacctgctgggcatccccgccagcgacgtcgaaggcgttgccaccttctacagccagatctttcgccagccggtcgggcgtcacatcattcgtgtctgtaacagcatggtgtgtttcatcggcggccacgaaaacgtggtcgacgagatcaagaactcactgggcatcggcctgggccagaccaccgccgacggtcgtttcacactgctgccggtctgctgcctcggcaactgtgacaaggcgccggccgtgatggtcgacgacgacactttcggcgatgtacagcctgctggcgttgccaagatgctggagggttacctatga

SEQ ID NO: 99739 - protein, 165 aa, Pseudomonas syringae pv. syringae B728a
MNSPLIQTDRFALSETERSAIEHEMHHYEDPRAASIEALKIVQKERGWVPDGAIYAIGDLLGIPASDVEGVATFYSQIFRQPVGRHIIRVCNSMVCFIGGHENVVDEIKNSLGIGLGQTTADGRFTLLPVCCLGNCDKAPAVMVDDDTFGDVQPAGVAKMLEGYL

SEQ ID NO: 99740 - DNA, 498 bp, Pseudomonas fluorescens Pf-5
  CDS (1)..(498): transl_table=11
atgaacagcacgcttatccagacagaccgtttcgccctgagcgaaaccgagcgctcggccatcgagcacgagatgcatcactacgaggacccgcgcgcggcgtccatcgaagccctgaagatcgtccagaaggaacgtggctgggtgcctgacggcgcggtctacgccatcggcgagatcctcggcattcctgccagcgacgttgaaggcgtggcgacgttctacagccagatcttccgccagccagtgggccgccacatcattcgcgtctgcgacagcatggtctgctacatcggcggccacgagtccgtggtcagccagatccagagcgagctgggcatcggcctcggccagaccaccgccgacggccgcttcaccctgctgccggtgtgctgcctgggcaactgcgacaaggcaccggcgctgatgatcgacgacgacactttcggcgacgtgcagcctgctggcgtggccaaactgttggagggctacgtatga

SEQ ID NO: 99741 - protein, 165 aa, Pseudomonas fluorescens Pf-5
MNSTLIQTDRFALSETERSAIEHEMHHYEDPRAASIEALKIVQKERGWVPDGAVYAIGEILGIPASDVEGVATFYSQIFRQPVGRHIIRVCDSMVCYIGGHESVVSQIQSELGIGLGQTTADGRFTLLPVCCLGNCDKAPALMIDDDTFGDVQPAGVAKLLEGYV

SEQ ID NO: 99742 - DNA, 510 bp, Psychrobacter arcticus 273-4
  CDS (1)..(510): transl_table=11
atgagaattgtttccgataaaatgccaaaagtagatgtggcaagtatcttaactgctgaagaaattgcggctatccatgagtttatgcatcattatccccatccacgggcagcatctttagatgctctaaaaatcgtgcaaaagcgtaacggctgggtcgatgatgcgcaagtgaatgccattgctaacattctaaatgttcctatgacagatatggatggagtagccaccttttttaaccgtatctatcgtcagccggtcggtcgtcatgtcatcctcatttgtgattcggtcgcttgttatttaacaggttatgaagcactggcagctgaactgaaagcgcagctgggtatcgattatggtcaaaccaccgccgacaaacgctttacgctattgccgatttgctgtttgggcaactgtgataaaggtcctgctgtattgattaatgaagatacttatggtcctgtccagcctgaagaagtcgcccaattgttggagctatacgcatga

SEQ ID NO: 99743 - protein, 169 aa, Psychrobacter arcticus 273-4
MRIVSDKMPKVDVASILTAEEIAAIHEFMHHYPHPRAASLDALKIVQKRNGWVDDAQVNAIANILNVPMTDMDGVATFFNRIYRQPVGRHVILICDSVACYLTGYEALAAELKAQLGIDYGQTTADKRFTLLPICCLGNCDKGPAVLINEDTYGPVQPEEVAQLLELYA

SEQ ID NO: 99744 - DNA, 498 bp, Pseudomonas syringae pv. phaseolicola 1448A
  CDS (1)..(498): transl_table=11
atgaatagcccgctaatccagactgaccgtttcgccctgagcgaaaccgagcgctcggccatcgagcacgagatgcatcactacgaagacccgcgtgcggcgtccatcgaggccctgaagatcgttcagaaagagcgtggctgggtgcccgatggtgccatctacgcaatcggcgatttgctcggcatccccgccagcgacgtcgaaggtgttgcaaccttttacagccagatcttccgccagccggtcggacgtcacatcattcgtgtctgcaacagcatggtgtgcttcatcggcggccatgaaaacgtggtagacgagatcaagagttcactgggtatcggcctgggtcagaccaccgctgacggtcgcttcaccttgctgccggtctgctgcctcggcaactgcgacaaggcaccggccgtgatggtcgacgacgacactttcggcgatgtacagcctgctggcgttgccaagatgctggagggttacctatga

SEQ ID NO: 99745 - protein, 165 aa, Pseudomonas syringae pv. phaseolicola 1448A
MNSPLIQTDRFALSETERSAIEHEMHHYEDPRAASIEALKIVQKERGWVPDGAIYAIGDLLGIPASDVEGVATFYSQIFRQPVGRHIIRVCNSMVCFIGGHENVVDEIKSSLGIGLGQTTADGRFTLLPVCCLGNCDKAPAVMVDDDTFGDVQPAGVAKMLEGYL

SEQ ID NO: 99746 - DNA, 543 bp, Ehrlichia canis str. Jake
  CDS (1)..(543): transl_table=11
atgtctagtacacaaaaaaatagtaatacaaattatattggagaatttaaatttagtaaggaaaatctaaaacatgcaaaagatacaattaataaatatcctcaagatagaaaatctagtgctgtaatggctttattgcatatagcacaaaaacagtgtggtggttttattccatcttctgctataaattatatagcggattttttaggtatgcagctgatacatgtatatgaagtagcaaagttttactccatgtataatttgtctgttactggtaaatatttagttcaagtgtgtagaacaactccttgttggttatgtggtagtgatgatgttttaaagtcatgcaaggaattgcttaatataggtattggtgagacaacaagtgataacttatttactttgaaggaagtggaatgtttaggtgcatgcgttaatgctcctgttgtgcagatcaatgatgattattatgaaaaattaactcctgataaaatgaaagatatactattggaaatacagaaaaaagaaaatttaacatcttga

SEQ ID NO: 99747 - protein, 180 aa, Ehrlichia canis str. Jake
MSSTQKNSNTNYIGEFKFSKENLKHAKDTINKYPQDRKSSAVMALLHIAQKQCGGFIPSSAINYIADFLGMQLIHVYEVAKFYSMYNLSVTGKYLVQVCRTTPCWLCGSDDVLKSCKELLNIGIGETTSDNLFTLKEVECLGACVNAPVVQINDDYYEKLTPDKMKDILLEIQKKENLTS

SEQ ID NO: 99748 - DNA, 507 bp, Thiobacillus denitrificans ATCC 25259
  CDS (1)..(507): transl_table=11
ttgatggccgatcaggatgtgaaagacaaggtcgagctcagcgccgaggcgctggctttgatcgacgccgaagtcgccaaatacccggcggaccagaagcagtccgcggtcatggccgcgctcaggatcgcgcaggtcgagaagggctggctcaagccggaactgatcgactatgtcgccgactacctgcagatgccgccgatcgcggcctacgaagtggcgaccttctacaacatgtacgacacccagcccgtcggtcgccacaagatcacggtgtgcacgaatcttccctgtgccttgaggggggcgggcgagatcgccgcgcacctcaaggaaaaactcggcatcggcttcggcgagacgaccgaggacgggcgctacacgctgaaggaaggcgagtgcatgggggcatgcggcgatgcgccgatgtgcctgcacaacaatcacacgatgcacacgcaccttacgccagagaaggtcgacgagttgctggacaagctgaaatga

SEQ ID NO: 99749 - protein, 168 aa, Thiobacillus denitrificans ATCC 25259
MMADQDVKDKVELSAEALALIDAEVAKYPADQKQSAVMAALRIAQVEKGWLKPELIDYVADYLQMPPIAAYEVATFYNMYDTQPVGRHKITVCTNLPCALRGAGEIAAHLKEKLGIGFGETTEDGRYTLKEGECMGACGDAPMCLHNNHTMHTHLTPEKVDELLDKLK

SEQ ID NO: 99750 - DNA, 495 bp, Anabaena variabilis ATCC 29413
  CDS (1)..(495): transl_table=11
atgactaccacaacgccgcctcatccccatcccagtggtgataaacgcttgaagatgctggatgcagctatcaagcgtcaccagtatcagcaagacgcattaattgaaattcttcacaaagcccaagaactgtttggctatttagaaaacgacttattactttatattgcccatagcttgaagctaccgcctagccgagtgtatggagtagcaactttctatcatttgttttccctagcgccccagggagtccatagttgtgtggtgtgtacgggtacggcttgttatgtgaaaggcgcacaagcaattttgactgatttggaaaagtctactcgcattcatgctggggaaactactgcggatggtcaattatcactgctaacggcacggtgtttgggtgcttgtgggattgctccggctgtggtttttgatggcaaagtattaggtaatcaaaccccagaatcagtgagtgagcgtgtgcaaggatggctatga

SEQ ID NO: 99751 - protein, 164 aa, Anabaena variabilis ATCC 29413
MTTTTPPHPHPSGDKRLKMLDAAIKRHQYQQDALIEILHKAQELFGYLENDLLLYIAHSLKLPPSRVYGVATFYHLFSLAPQGVHSCVVCTGTACYVKGAQAILTDLEKSTRIHAGETTADGQLSLLTARCLGACGIAPAVVFDGKVLGNQTPESVSERVQGWL

SEQ ID NO: 99752 - DNA, 498 bp, Pseudomonas fluorescens PfO-1
  CDS (1)..(498): transl_table=11
atgaacagcacgcttatccagacagaccgtttcaccttgagtgaaaccgagcgctcggccatcgagcacgagctgcatcactacgaagacccgcgcgcggcgtcgatcgaagccttgaagatcgtccagaaggaacgcggctgggtgccggacggcgctctgtacgccatcggcgagatcctcggcatcccggccagcgacgttgaaggcgtggccacgttctatagccagatcttccgtcagccggtcggccgtcacatcattcgcgtctgcgacagcatggtctgctacatcggtggccacgagtcggtggtcagcgaaatccagaacaacctgggtatcggcctgggtcagaccaccgccgacggtcgcttcaccctgctgccggtctgctgcctcggcaactgcgacaaggcaccggcgctgatgatcgatgacgacacctttggcgatgtccagcctgccggcgtcgccaaactgctcgagggctacgtatga

SEQ ID NO: 99753 - protein, 165 aa, Pseudomonas fluorescens PfO-1
MNSTLIQTDRFTLSETERSAIEHELHHYEDPRAASIEALKIVQKERGWVPDGALYAIGEILGIPASDVEGVATFYSQIFRQPVGRHIIRVCDSMVCYIGGHESVVSEIQNNLGIGLGQTTADGRFTLLPVCCLGNCDKAPALMIDDDTFGDVQPAGVAKLLEGYV

SEQ ID NO: 99754 - DNA, 474 bp, Rhodobacter sphaeroides 2.4.1
  CDS (1)..(474): transl_table=11
atgagcctttcgcccgatcttctcgcccgcatccgcgccgcctcggacgagcatggcggcccccgtgccgcgatgctcgaggcgctgaagctgatccagcacgagcacggctgggtgtcggatccgcatctggcggaagcggcggcgacgctcggcgtgcatcgcgcggaaatggaagcgctggcgagcttctactcgctgatcttccgccatccggtcgggcggacggtgatcctgctctgcgacggcgcctcctgctggctgaacggcgccgaggaggtccgcgaggagctgaaacgccgcctcggcatcggcttcggcgagaccacggccgatgggcgctacacgctgctgaacgtggcctgcctcggcggctgcgaccgtgcgcccgcggccgtcgtgggccgcgaccggcagctcgtgggcccgctctcgcccgcgggcgtcgcggccctgctggaggacggattgtga

SEQ ID NO: 99755 - protein, 157 aa, Rhodobacter sphaeroides 2.4.1
MSLSPDLLARIRAASDEHGGPRAAMLEALKLIQHEHGWVSDPHLAEAAATLGVHRAEMEALASFYSLIFRHPVGRTVILLCDGASCWLNGAEEVREELKRRLGIGFGETTADGRYTLLNVACLGGCDRAPAAVVGRDRQLVGPLSPAGVAALLEDGL

SEQ ID NO: 99756 - DNA, 486 bp, Carboxydothermus hydrogenoformans Z-2901
  CDS (1)..(486): transl_table=11
ttggtttgtgcctgcgggaaggaagtagttgatccaaaaaaagaaaaactaaaagaactgctatctcagtatcaagggcaaaaaggggctctgattccggttttacagggtgctcaggaaatttatggctatcttcccagagaggttatggaagaaataagtcgtagccttaaaattccttttagcaaggtttatggagtggcaaccttctatgctcagtttcatctaaagcctcgcggacgcaatgtgattcgcgcctgtctggggactgcctgtcatgtacgcggtggagcgaaagtatttgagaccctaaagaatgaactgggaattggtgatggggagacgactcccgatttacggtttaccctggaatcggtagcctgcattggagcctgcgggttagctccggtaattatggtcaacaatgatacttacggccggcttaccccggataaggtaaaagaaattcttgccaagtacgaatag

SEQ ID NO: 99757 - protein, 161 aa, Carboxydothermus hydrogenoformans Z-2901
MVCACGKEVVDPKKEKLKELLSQYQGQKGALIPVLQGAQEIYGYLPREVMEEISRSLKIPFSKVYGVATFYAQFHLKPRGRNVIRACLGTACHVRGGAKVFETLKNELGIGDGETTPDLRFTLESVACIGACGLAPVIMVNNDTYGRLTPDKVKEILAKYE

SEQ ID NO: 99758 - DNA, 486 bp, Burkholderia sp. 383
  CDS (1)..(486): transl_table=11
atgatctcagctgaaggcctgaaggaaatcgatcgagcgttgacgaagtatcccgccgatcagaaacagtccgccgtgatgtcggcattggccgttgctcaggaagagcacggctggctgtcgcccgaactgatgcagttcgtcgcggactatctcggcatgccggccgttgccgtgcaggaagtcgcgacgttctacacgatgtacgagctcaacccggtcggcaagcacaagatcacgctctgcacgaacctgccgtgccagctcggcccggacggtggcgcggaagcgactgccgactacctgaaacagaagctcggcatcggcttcggcgagaccacgcccgacggcaagttcacgctgaaggaaggcgaatgcatgggctcgtgcggcgatgcgccggtgctgctggtgaacaatcacagaatgtgcagcttcatgagccgcgagaagatcgaccagctgcttgaggagctctcgaaatga

SEQ ID NO: 99759 - protein, 161 aa, Burkholderia sp. 383
MISAEGLKEIDRALTKYPADQKQSAVMSALAVAQEEHGWLSPELMQFVADYLGMPAVAVQEVATFYTMYELNPVGKHKITLCTNLPCQLGPDGGAEATADYLKQKLGIGFGETTPDGKFTLKEGECMGSCGDAPVLLVNNHRMCSFMSREKIDQLLEELSK

SEQ ID NO: 99760 - DNA, 522 bp, Geobacter metallireducens GS-15
  CDS (1)..(522): transl_table=11
atgcttactaaccgtctgaaatctgatctccaggcccgcatcgcccacgccgtcaccaaccgcgaggcggcggtggacgtgataaaggagctgcagcggcactacggctggctcaccgacgaggcggtggccgaggcggcagggctcctggggctcacgccgctccaggtggaggagctggccactttctacgaaatgatctaccgccggccggtaggtaagcgggtggtccacgtctgcgactccatctcctgctgggccatgggaggagagagcctcatggcgcacctggcggcgaagctcggcgtagaacccggcgggaccacggcggacgggatgttcacgctccttccctgctgctgcctcggcaactgcggcgaggcgccgacgctgatgatcggcgacaccctctatggccgggtgacgccggagcggggagaggaaatcctgagcaacgcgcgggaaaccgcagcaaccgtgccagaaggacccggcacaccacaagaggaggagaacgtatga

SEQ ID NO: 99761 - protein, 173 aa, Geobacter metallireducens GS-15
MLTNRLKSDLQARIAHAVTNREAAVDVIKELQRHYGWLTDEAVAEAAGLLGLTPLQVEELATFYEMIYRRPVGKRVVHVCDSISCWAMGGESLMAHLAAKLGVEPGGTTADGMFTLLPCCCLGNCGEAPTLMIGDTLYGRVTPERGEEILSNARETAATVPEGPGTPQEEENV

SEQ ID NO: 99762 - DNA, 618 bp, Geobacter metallireducens GS-15
  CDS (1)..(618): transl_table=11
atgggacgcaccagccgctttaccctccaatcatcggaaatcacccccgagagcatctctcagaccccctctactcctacagaattgacatccgatccccgtttccaggcggtggaacggaccatcaagcagttccagtgccgggccgacgccctcattgaggtgctccacgtggcccaggaggccttcggctacctgagcgacgagctcatggcccacgtggcgaggcagttgaaaatccccttcagccaggtctacggggtcgccaccttctaccacttcttttcccttgaaccccgcggcgcccatacctgcgtcgtctgcaccggcacggcctgctatgtgaagcgatccgccgagatccttgtgcgccttgagcaggagttcagggtcaaggccggcaagaccaccgaagacggtggcctcacgctctccacaatccggtgccttggtagttgcggccaggcgccagtcatggttcttgacggggagacggtgggacaatgcacccccgattcggccgttgtcgcggtaaaggcgcttcaggagagcggccggccccggccgaacgatgagggaggggtgcggcaggaggggggaggggggagaaccccatga

SEQ ID NO: 99763 - protein, 205 aa, Geobacter metallireducens GS-15
MGRTSRFTLQSSEITPESISQTPSTPTELTSDPRFQAVERTIKQFQCRADALIEVLHVAQEAFGYLSDELMAHVARQLKIPFSQVYGVATFYHFFSLEPRGAHTCVVCTGTACYVKRSAEILVRLEQEFRVKAGKTTEDGGLTLSTIRCLGSCGQAPVMVLDGETVGQCTPDSAVVAVKALQESGRPRPNDEGGVRQEGGGGRTP

SEQ ID NO: 99764 - DNA, 627 bp, Rhodospirillum rubrum ATCC 11170
  CDS (1)..(627): transl_table=11
atgagcggcaacggcgctgccggcgagcagccggcgaccttcgcgttcacccccgagaacctggaaaaggcccaggccatcttggccaaatatcccaagggccgggaaagaagcggcgttttgccgttgctcgatctcgcccagcgtcagcagggctgggtcagccacgccgccatcgaagaggtcggccgtttaaccggaacgccgcgcatgcgggtgctcgaggtcgccaccttctataccatgtacaagctgtcgccgaagggccgccaccacatcgaggtctgcaccaatctgccgtgctggctgcgcggatccgacgagatcctgcgcgccgtgcgcgacgaactgggcatcgaggttggcggcgagaccgatgacgggctgttctcgctggccgaggcggaatgcctgggcgcctgcgtcaacgctcccatgctccagatcggcgatgattactatgaagacctgacctatgagagcgtgcgcgaactggtgcgcaagctcaaggtcggcgagccggtgacgccgggctcgcaatcgggtcgccagggggcttgccccgagggtgggccgacgaccctgaaaagtttctgtaccgccgataaggccggggggagcgtgtga

SEQ ID NO: 99765 - protein, 208 aa, Rhodospirillum rubrum ATCC 11170
MSGNGAAGEQPATFAFTPENLEKAQAILAKYPKGRERSGVLPLLDLAQRQQGWVSHAAIEEVGRLTGTPRMRVLEVATFYTMYKLSPKGRHHIEVCTNLPCWLRGSDEILRAVRDELGIEVGGETDDGLFSLAEAECLGACVNAPMLQIGDDYYEDLTYESVRELVRKLKVGEPVTPGSQSGRQGACPEGGPTTLKSFCTADKAGGSV

SEQ ID NO: 99766 - DNA, 480 bp, Moorella thermoacetica ATCC 39073
  CDS (1)..(480): transl_table=11
atggggagtaggagggaggtacaaccgatgccagccgagaccataaaacaaattgtggcccgctaccaggaagaaaagggcgccctgatccctgtattgcaggcaacccaggaagccctggggtacctgcccccggaggctttaaaggagattgccgccgccatggacctgcccttgagcaccgtctacagcgtcgtcaccttttatgcccagttccacctgcaaccccgcggccggcatgttatccatgtctgccagggaacagcctgccatatccgcgggggcaaccgtatcttaaatcgaatcaaagagcttttacaaatcgatgccggggaaacaacgcccgatctgcgctttaccctggaaccggtggcctgcctgggggcctgtgccctggccccggtaatgagcatcagcggggatacctatggccacttaaaacccgatatgatcgccggcatcctagaaaagtaccagtag

SEQ ID NO: 99767 - protein, 159 aa, Moorella thermoacetica ATCC 39073
MGSRREVQPMPAETIKQIVARYQEEKGALIPVLQATQEALGYLPPEALKEIAAAMDLPLSTVYSVVTFYAQFHLQPRGRHVIHVCQGTACHIRGGNRILNRIKELLQIDAGETTPDLRFTLEPVACLGACALAPVMSISGDTYGHLKPDMIAGILEKYQ

SEQ ID NO: 99768 - DNA, 522 bp, Syntrophus aciditrophicus SB
  CDS (1)..(522): transl_table=11
gtggcgggaaatgtaaccgaaaaaatcaaggggaaaataatgaacaaagaggtagacagggggaaaatcagggagattatcagcaagtacgatggagaaaaaagtgctgccgtcgccgtattgcaggatctccaggaggaattccgatacctgccgaaggaggccttaaccatcgtgagtgatgagcttcaggtgcccttgagcaggatctatgagattgcgaccttctacaatgtcttcagcctgaagccgcggggtaaatatcttattgaagtgtgcgccggtacggcttgccatgttcagggaggcttcaacctcatgaaccggctggagaggaatctcaatatctcctgcggagagacgacggaggatgccatgttcacccttgaggaggtgcggtgtctcggctgctgcagtcttgccccggtggtacggattgacgggaacattcatccttacctcacccaggatgagattcccgggattctgaaaaactatcgcaaagcaggggtgaaaaagtga

SEQ ID NO: 99769 - protein, 173 aa, Syntrophus aciditrophicus SB
MAGNVTEKIKGKIMNKEVDRGKIREIISKYDGEKSAAVAVLQDLQEEFRYLPKEALTIVSDELQVPLSRIYEIATFYNVFSLKPRGKYLIEVCAGTACHVQGGFNLMNRLERNLNISCGETTEDAMFTLEEVRCLGCCSLAPVVRIDGNIHPYLTQDEIPGILKNYRKAGVKK

SEQ ID NO: 99770 - DNA, 453 bp, Syntrophus aciditrophicus SB
  CDS (1)..(453): transl_table=11
atggataacgagagaatcgatcagatcatcgaaaagcatcagggagcgtccagtgcgctgattcagatactgctggatatccaggaggagaatcactggcttcccaaggaagcgctggagcgggtcagtgagaaactccagattcccattacgacggtgcgtcatgccgcgaccttttacaaggtcttcagcacggtgccgaagggtcgccatcaggttcacgtctgtctggggacggcctgccacgtccgtggggcgacgcgagtcctggacaccgtacaggaatccaccggcatcaagcccggggaaacggacctggatctgaagttcagcctggaaacggtgaactgtctcggctgctgcgccctggggcccgtgatggaaatcgacgggaaggtttacggcaaggcgacgccgagcaagacaatcgatgtgctaaaaaaatacgagtag

SEQ ID NO: 99771 - protein, 150 aa, Syntrophus aciditrophicus SB
MDNERIDQIIEKHQGASSALIQILLDIQEENHWLPKEALERVSEKLQIPITTVRHAATFYKVFSTVPKGRHQVHVCLGTACHVRGATRVLDTVQESTGIKPGETDLDLKFSLETVNCLGCCALGPVMEIDGKVYGKATPSKTIDVLKKYE

SEQ ID NO: 99772 - DNA, 453 bp, Syntrophus aciditrophicus SB
  CDS (1)..(453): transl_table=11
atggataacgagagaatcgatcagattatcgaaaagcatcatggtgcctccagtgcgctcattcagatcctgctggatatccaggaggagaatcactggcttcccaaggaagcgctggatcgggtcagtgaaaagctccaggttccgcttaccacggtgcgtcatgccgcgaccttttataaggtcttcagcacggttcccaaaggtcgccatcaggttcatgtctgcctgggaacggcctgtcacgtccgtggagcgaaccgtgtcctggacaccgtggaagagatgacgggcatcaaaccgggggagacggacctggatttgaagttcagtctggaaacggtgaactgtctgggctgctgcgccctgggtcccgtgatggaaatcgacgggaaggtatacggcaaggcgacaccgagcaagaccatcgatgtgttaaaaaaatacgagtag

SEQ ID NO: 99773 - protein, 150 aa, Syntrophus aciditrophicus SB
MDNERIDQIIEKHHGASSALIQILLDIQEENHWLPKEALDRVSEKLQVPLTTVRHAATFYKVFSTVPKGRHQVHVCLGTACHVRGANRVLDTVEEMTGIKPGETDLDLKFSLETVNCLGCCALGPVMEIDGKVYGKATPSKTIDVLKKYE

SEQ ID NO: 99774 - DNA, 546 bp, Neorickettsia sennetsu str. Miyayama
  CDS (1)..(546): transl_table=11
ttgcaggtttttttagttttgcttttcatgaaaaaacgtattgctcatgcatcaattcaaccggacaaattctgctttagtgaagagaattcacgagaggtagctagaatccttgctaaatatcccgcttcccgtaagaggagtgctgtccttccgttgctacaccttgtccaaagacagcatgaaaactggattcctatcgctgcaatggatcatgttgcacagttacttggactaccggttattaaagtgtatgaagtggcgtctttctacagtatgtttaatactgccccggtggggaagcataccatacgtgtctgcagaaccacgccatgttggttgagaggttccgattgtctaattgaagctgcgaaacgagaattagggatcaaagtgggccataaaaccgaagacaacaaattttctttagatgaagtagagtgtcttggggcctgtgttagcgcgccagtcgtacagattaacgacgactattttgaaaatttggacgaaaggtcttttctcgagcttttatccaggcttaagtaa

SEQ ID NO: 99775 - protein, 181 aa, Neorickettsia sennetsu str. Miyayama
MQVFLVLLFMKKRIAHASIQPDKFCFSEENSREVARILAKYPASRKRSAVLPLLHLVQRQHENWIPIAAMDHVAQLLGLPVIKVYEVASFYSMFNTAPVGKHTIRVCRTTPCWLRGSDCLIEAAKRELGIKVGHKTEDNKFSLDEVECLGACVSAPVVQINDDYFENLDERSFLELLSRLK

SEQ ID NO: 99776 - DNA, 546 bp, Ehrlichia chaffeensis str. Arkansas
  CDS (1)..(546): transl_table=11
atgtctaatatacagaaaaatagtaatgaacattatactgaaacatttaaatttaataaggataacttaaaacaagcaaatgatacaattagtaagtatcctcatgatagaaaatcgagtgctgtaatggatttattgcatattgctcagaagcagtgtggtggatttattccattgtctgctatgaattatatagcagattttttgggtatgcggctaatacatgtatatgaggtagcaaaattttattctatgtataatttatctcctactggtaaatatttaatacaagtgtgtaggacaactccttgttggttgtgtggtagtgatgatattttaaaatcgtgtaaggaattgcttaatatatgtgttggagaaacaacgagtgataatttattcactttgaaagaagtagagtgtttaggggcttgtgttaatgctcctgttatgcagatcaatgatgattattatgagaaattaactcctgataaggtaaaggatatattgatggaaatacaaaaaaaagaagctgtagtatcagattaa

SEQ ID NO: 99777 - protein, 181 aa, Ehrlichia chaffeensis str. Arkansas
MSNIQKNSNEHYTETFKFNKDNLKQANDTISKYPHDRKSSAVMDLLHIAQKQCGGFIPLSAMNYIADFLGMRLIHVYEVAKFYSMYNLSPTGKYLIQVCRTTPCWLCGSDDILKSCKELLNICVGETTSDNLFTLKEVECLGACVNAPVMQINDDYYEKLTPDKVKDILMEIQKKEAVVSD

SEQ ID NO: 99778 - DNA, 483 bp, Desulfitobacterium hafniense Y51
  CDS (1)..(483): transl_table=11
ttgtgtgaggagtgtaaagagttagttgatcctaaagaggagcaattggatcagatattagctcatcataagcgggagaaaggggcgcttattcctgttttgcaggaagcgcaagggctttatgggtatttgcctgaacatgtgatcaagcacatcagcagggggctgggcataccttcagctaaggtttatggagtcgttacattttatgctcaatttcgccttacccctatggggcgcaatgtgattagtgtctgcttaggtacggcctgccatgttcgcggaggcgctaaagttctggaagccatagagaaggatacaaagattaaagatgggcagaccacggaagacgggcgctttactttagagatcgtcaactgtattggagcctgtggattggctcccgttatgtccattaatgggaatgtccacggaagattgaatgcagatcaaatcccaggaatcctggcagagtataagtag

SEQ ID NO: 99779 - protein, 160 aa, Desulfitobacterium hafniense Y51
MCEECKELVDPKEEQLDQILAHHKREKGALIPVLQEAQGLYGYLPEHVIKHISRGLGIPSAKVYGVVTFYAQFRLTPMGRNVISVCLGTACHVRGGAKVLEAIEKDTKIKDGQTTEDGRFTLEIVNCIGACGLAPVMSINGNVHGRLNADQIPGILAEYK

SEQ ID NO: 99780 - DNA, 480 bp, Methylobacillus flagellatus KT
  CDS (1)..(480): transl_table=11
atgagcttgtctgctgagtctttagccagaatcgaccgagagttgaccaaatatccgcctgagcatcgccaggcggcagtgatgtccgcgttacggattgcacagaccgagaaaggctggctgtcgaaagagacgatctccgaggtggccgactacttgggtattcctgccatcgccgcactggaagtggctaccttctacaacatgtatgaactggagccggtcggcaagtacaagatcacggtgtgtaccaatatctcctgcatgctacgcgattcggccgaaatcgtggcgcatttgcagaagcgtctcggcatcggcttcaacgaaaccacgccggataatcgatataccttgcgcgagggcgagtgcatgggatgctgcggcggggcgccactgctccatatcaacaataccgagatgcatgagttcctgacgccagagaaggtggaccagatattggagggcctggaaaaatga

SEQ ID NO: 99781 - protein, 159 aa, Methylobacillus flagellatus KT
MSLSAESLARIDRELTKYPPEHRQAAVMSALRIAQTEKGWLSKETISEVADYLGIPAIAALEVATFYNMYELEPVGKYKITVCTNISCMLRDSAEIVAHLQKRLGIGFNETTPDNRYTLREGECMGCCGGAPLLHINNTEMHEFLTPEKVDQILEGLEK

SEQ ID NO: 99782 - DNA, 486 bp, Burkholderia xenovorans LB400
  CDS (1)..(486): transl_table=11
atgatctcagctgaaggcctgaaagaaatcgatcgtgcgatcgcgaagtatcccgccgatcagaaacagtccgccgtgatgtcggcgttggccactgctcaggaagagcatggctggctgtcgcccgaactcatgcagttcgtcgcggactatctcggcatgccggcagtcgccgtgcaggaggtggccaccttctacacgatgtacgagacctcgccggtcggcaagtacaagatcacgctctgcacgaacctgccgtgtcagcttggcccggacggcggctcggacagcgcggctgaatatctgaagcagaagctcggcatcgacttcggcgaaaccacgcccgacggcaagttcaccctgaaagaaggtgagtgcatgggctcgtgcggcgacgcgccggtgatgctggtgaacaaccatcgcatgtgcagcttcatgagccgcgcgaagatcgaccagctgctcgaggaactttcgaaatga

SEQ ID NO: 99783 - protein, 161 aa, Burkholderia xenovorans LB400
MISAEGLKEIDRAIAKYPADQKQSAVMSALATAQEEHGWLSPELMQFVADYLGMPAVAVQEVATFYTMYETSPVGKYKITLCTNLPCQLGPDGGSDSAAEYLKQKLGIDFGETTPDGKFTLKEGECMGSCGDAPVMLVNNHRMCSFMSRAKIDQLLEELSK

SEQ ID NO: 99784 - DNA, 507 bp, Ralstonia metallidurans CH34
  CDS (1)..(507): transl_table=11
atgaccatgctatcagcagaagctctcaaggaaatcgatcgcgcgatcgcgaagtatccggccgaccagaagcagtcggccgtgatggcggcactcgccgtggcacagggcgaggtgggctgggtttcccccgaagtcatgcagttcgtcgccagctacctcgaaatgccgcctgtgtgggtggaagaggtggccacgttctacaacatgtatgacaccaagccggtgggcaagcacaagctcgccgtctgtaccaacctgccgtgcgcgctgtcgggcggcgagcgggctggcgaatacctgaagcgcaagctcgggatcgactataacgagaccaccgccgacggctgtttcaccctgaaagagggcgagtgcatgggcgcgtgcggcgacgcaccggtgatgatcgtcaacaacacccgcatgtgcagcttcatgagcgagcagaagatcgacgcactggtcgaagagctcaagtccgaagccgccgccaagggggacaagtaa

SEQ ID NO: 99785 - protein, 168 aa, Ralstonia metallidurans CH34
MTMLSAEALKEIDRAIAKYPADQKQSAVMAALAVAQGEVGWVSPEVMQFVASYLEMPPVWVEEVATFYNMYDTKPVGKHKLAVCTNLPCALSGGERAGEYLKRKLGIDYNETTADGCFTLKEGECMGACGDAPVMIVNNTRMCSFMSEQKIDALVEELKSEAAAKGDK

SEQ ID NO: 99786 - DNA, 1197 bp, Silicibacter sp. TM1040
  CDS (1)..(1197): transl_table=11
atgctgcgtcgtcttcatcacgaacagcctgacagctttgcgttcaccccggccaatcaggcctgggccgaagctcagatgaccaaataccccgaaggccgtcaggcctcggcggtcattccgattctgtggcgcgctcaggagcaagagggctggatttccaaacccgcgatcgaatatgtggccgatatgctcggcatggcctacatccgcgtgctggaagtggcctctttctatttcatgttccagctgcagcccacgggttcggttgcgcatatccagatctgtggcaccacgtcctgcatgatctgtggtgccgaggatctggtcgcgatctgcaaggacaagatctctgccaagccgcatacgctgtccgaggacggcaagttctcttgggaagaggtagaatgccttggctcctgcgccaatgcgccgatggcgcagatcggcaaggattattacgaggatctgaccgcggcatcttttaccaagctgctcgatgatctggcggcgggtaaacccgtcgtacccggcccgcaaaacggtcgctacgctgcagagccaaaggcgggcctgacctcgctcaccgaatatgaagcaggcaagccgcagtataatgcctcggcggagcttgcgaccgaaatcggtgacggtgtgaagcgtattcagggcgatgaagttccgctcctgaccccatgggtcggcaaggatggcgtggttgcagggcgtgccgctgcagatccgacgccgcccgcgccagagcgtccgcaacccgcggccaagcaggctgagaccgccaagaagaaggctccggccaagcctgcggtcaagaaatcggatgcggcaacgcctgcacagcccgaagccgccgccgcaaaggtgacggaacccaaggcggacttggaagaacaagcacccgagacgctgacagcggcgcgcgagggcggggcggacgatctcaagctcctcaaaggtgtggggccaaagctcgaacagacgctcaatgagctgggctttttccactttgaccagattgccaaatggaccgaggccgaggtggcctgggtggatgcgcgcctgaagttcaaaggccgcatcgagcgcgacggctggatcgagcaagccaagcaactggcagccggtgaagaaaccgagtttgccaaatcggccaagaaagacggccgctacaaagactaa

SEQ ID NO: 99787 - protein, 398 aa, Silicibacter sp. TM1040
MLRRLHHEQPDSFAFTPANQAWAEAQMTKYPEGRQASAVIPILWRAQEQEGWISKPAIEYVADMLGMAYIRVLEVASFYFMFQLQPTGSVAHIQICGTTSCMICGAEDLVAICKDKISAKPHTLSEDGKFSWEEVECLGSCANAPMAQIGKDYYEDLTAASFTKLLDDLAAGKPVVPGPQNGRYAAEPKAGLTSLTEYEAGKPQYNASAELATEIGDGVKRIQGDEVPLLTPWVGKDGVVAGRAAADPTPPAPERPQPAAKQAETAKKKAPAKPAVKKSDAATPAQPEAAAAKVTEPKADLEEQAPETLTAAREGGADDLKLLKGVGPKLEQTLNELGFFHFDQIAKWTEAEVAWVDARLKFKGRIERDGWIEQAKQLAAGEETEFAKSAKKDGRYKD

SEQ ID NO: 99788 - DNA, 1038 bp, Mesorhizobium sp. BNC1
  CDS (1)..(1038): transl_table=11
atggcagtccgccgtctcgcagacgaagccgtccagccccagggctttgccttcaccagggaaaacgaggcctgggcgcatcatacgatccgcaaatacccccctgggcgccagcagtcggcggtgatcccgcttttgatgcgcgcgcaggaacaggaaggctgggtcacgcgcgcggcgatcgagcatgtcgccaaaatgctcgacatgccgttgatccgcgtcctggaggtcgcgaccttctatacccagttccagctggcaccggtcggcacgcgcgcccatgtgcaggtctgcggcaccacgccctgcatgctgcgcggggcaggcgacctgatcgaggtttgcaagagcaggatccatcccgagcccttccacaccaatgagggcggcacgctctcctgggaagaggtggagtgccagggcgcctgcgtgaacgcgcccatgatcatgatctccaaggatagctacgaggatctgacgccagagcggctggaagagatcatcgatgcgttcgaggcgggcaagggcgacacgatcaagccgggcacgcagatcgaccgcctgacctcggcgcctgcttccggtctgacctcgctcaccgacgagagcgttatcctgaagttccccaatggtggcaagaaggttgccaagcgcgcggccaaggccggtgacagcgcggccgttcccccgacgcgggccggcaggccgaagaccgatgccctggagaccgatgcggcaatcaagtcgccctcgcccgtcaaggcgcgtagcggcggcgagaagcgcgtcagcgtgcgagggccaaaggaaaaccccgtgcaggcggatcgtgtggccgaggagacggaagttgcctcccgcacacgccgtcacagcgatgcgccaaagaccgaggagccgtcgctgcgctcgccggagctgaaaaagcgcaaggcgccacgcaacaaaatggatgtcgggccggaatcgcccgagcgcggcgtcgaccccgcgggacctgcgggcggtccggggtcgggcaggaagcggcgctga

SEQ ID NO: 99789 - protein, 345 aa, Mesorhizobium sp. BNC1
MAVRRLADEAVQPQGFAFTRENEAWAHHTIRKYPPGRQQSAVIPLLMRAQEQEGWVTRAAIEHVAKMLDMPLIRVLEVATFYTQFQLAPVGTRAHVQVCGTTPCMLRGAGDLIEVCKSRIHPEPFHTNEGGTLSWEEVECQGACVNAPMIMISKDSYEDLTPERLEEIIDAFEAGKGDTIKPGTQIDRLTSAPASGLTSLTDESVILKFPNGGKKVAKRAAKAGDSAAVPPTRAGRPKTDALETDAAIKSPSPVKARSGGEKRVSVRGPKENPVQADRVAEETEVASRTRRHSDAPKTEEPSLRSPELKKRKAPRNKMDVGPESPERGVDPAGPAGGPGSGRKRR

SEQ ID NO: 99790 - DNA, 534 bp, Cytophaga hutchinsonii ATCC 33406
  CDS (1)..(534): transl_table=11
atggaacaaacacaacagcaattccagttttctgaagcaagcctgaaaaaaattcaggagatgaaagcacgttatccggaaggcagacaaaaatcagcgttattgcccgtgttgcatatggcacaggatgagttaggcggctggcttcctgccccgcttatggattatgttgcttcccttttagatatcactccgattgaagtatatgaagtagcttcgttctactccatgtacaacttaaagccggttggcaagtgcatgtttgaattttgtcagacagggccgtgctgcctaaacggtgttgaggaactgatcgaatatacggaagacaaacttggaattaaactgaatcagacaagtgctgatggcagattcaccattaaagcggtagaatgcatgggttcatgcggtacagctccaatggctcagatcggaacctattattacgaaaatctgacgaaagaaaagattgataaaatcatcgaagtattcggtcagccggattttgatccatttaaaaaatacgcaatctaa

SEQ ID NO: 99791 - protein, 177 aa, Cytophaga hutchinsonii ATCC 33406
MEQTQQQFQFSEASLKKIQEMKARYPEGRQKSALLPVLHMAQDELGGWLPAPLMDYVASLLDITPIEVYEVASFYSMYNLKPVGKCMFEFCQTGPCCLNGVEELIEYTEDKLGIKLNQTSADGRFTIKAVECMGSCGTAPMAQIGTYYYENLTKEKIDKIIEVFGQPDFDPFKKYAI

SEQ ID NO: 99792 - DNA, 501 bp, Alkalilimnicola ehrlichei MLHE-1
  CDS (1)..(501): transl_table=11
ttgagcagcgggcttgcagaaaaggtgctgacgcccgagatgcgggcggagatcgaccactggctgaccaagtatcccgaggatcagaagcaatcggcggtgatcccggcgctgcatgtggtgcaggacaacagcggtggctggttgcggcgcgagcagatggacgcggtggcggaatacctgggcatggacccggtggccgtttacgaggtggccaccttctattccatgttcgacctggagccggtgggccggcataaggtcaacatctgcaccaatatctgctgctggttgaagggcgccgaggacatcgtcgcctacaccgagaagaaactgggtatcaagctcggcgagaccacgcccgaccagcggatcaccctcaagatcgaagaggagtgcctggcggcctgtacgggggcgccgatgatggtggtggacggccactattacaccgatctgacccccgagaagatcgatcagattctcgacgcgctggagtaa

SEQ ID NO: 99793 - protein, 166 aa, Alkalilimnicola ehrlichei MLHE-1
MSSGLAEKVLTPEMRAEIDHWLTKYPEDQKQSAVIPALHVVQDNSGGWLRREQMDAVAEYLGMDPVAVYEVATFYSMFDLEPVGRHKVNICTNICCWLKGAEDIVAYTEKKLGIKLGETTPDQRITLKIEEECLAACTGAPMMVVDGHYYTDLTPEKIDQILDALE

SEQ ID NO: 99794 - DNA, 774 bp, Hyphomonas neptunium ATCC 15444
  CDS (1)..(774): transl_table=11
atggcattgcgccggtttgatctcgaggcggggggcgacagcttctcgttcaagtccgagacggaagagaagatcacattctggcgggcaaaatacccggcagacaagcagcgttcggctgtcatcccgatgctgtggctggcgcagaaagacaataatggctggctatccgagcctgccatgcgcgaagtcgcagaccgtctggaaatgccctatatgcgggtctacgaggtcgcgactttctacacgatgttccgcctgcagccggtcggtaaattccacgtccagctctgcggtactacgccttgccagcttcgcggcgccgaaaacctcaaggaagtctgcacccgcgagatcggcaagcagatgtatgtgaccgacgataaacgtctgtcctgggaagaagtcgagtgcctgggcgcttgcgtgaatgcgccgatggttcagatcaatgacgactattacgaagacctcacgccggactcgctggcccagatcatcggccgtctgaagaatggcgtggaagttacgcccggcccgcagatcgaccgcgtgaacagcgcgcccgaagggggcaacgcaacactgactgaacctgccctgttcgatggcagccgcaattccgtcagtacgcttccaaaccttccggagcccccggcgcccgagccggcgcccaagccagaagcgacggcagaagctaccggccagccagaaaaatctgcgccgacgaataccgatcgcgaagagccctccagcaaggacatcaaggaatag

SEQ ID NO: 99795 - protein, 257 aa, Hyphomonas neptunium ATCC 15444
MALRRFDLEAGGDSFSFKSETEEKITFWRAKYPADKQRSAVIPMLWLAQKDNNGWLSEPAMREVADRLEMPYMRVYEVATFYTMFRLQPVGKFHVQLCGTTPCQLRGAENLKEVCTREIGKQMYVTDDKRLSWEEVECLGACVNAPMVQINDDYYEDLTPDSLAQIIGRLKNGVEVTPGPQIDRVNSAPEGGNATLTEPALFDGSRNSVSTLPNLPEPPAPEPAPKPEATAEATGQPEKSAPTNTDREEPSSKDIKE

SEQ ID NO: 99796 - DNA, 480 bp, Rhizobium leguminosarum bv. viciae 3841
  CDS (1)..(480): transl_table=11
atgaccattcatatcgccgaaggcgatattgcagcacgcacccgagccatcgtcgccgatcttcgctttctcgaaggaccgctgcttcccattctgcacgaggttcagcaggaattcggctatgtgccgcaggaagccatgcctgttatcgcggaggaattgaacctctcgcgcgccgaggtgcatggcgtggtgaccttctatcacgattatcgcgaccatcccgccggccggcatctgctgaagctctgtcgcgccgaagcctgtcagtcgatgggcggcgatgcgctggccgaacgtgtcaaggcgctgctcggcatcgattttcatcagacgacgcccgatggcggcgtgacgctggagccggtctattgtctcgggctctgcgcctgtgcgccggcggcgatgctcgacggcgaggtccatggccgggtcgacgaacagagggcggcggaactcgtcgctgaggcacgccgatga

SEQ ID NO: 99797 - protein, 159 aa, Rhizobium leguminosarum bv. viciae 3841
MTIHIAEGDIAARTRAIVADLRFLEGPLLPILHEVQQEFGYVPQEAMPVIAEELNLSRAEVHGVVTFYHDYRDHPAGRHLLKLCRAEACQSMGGDALAERVKALLGIDFHQTTPDGGVTLEPVYCLGLCACAPAAMLDGEVHGRVDEQRAAELVAEARR

SEQ ID NO: 99798 - DNA, 513 bp, Solibacter usitatus Ellin6076
  CDS (1)..(513): transl_table=11
atgcagacgtatctgggagcaccccaactaccgtcagacgacaagcggtggaaactggtggaggccacggcgcgccggcacgggcgcgaaccgcatgctctcattgaaaccctgcacacggtccaggaatgcttcgggtatctcgacgaggccgggcttcgcttcgtcgcctcggtactacgggtaccgctcagccgcgtttatggcgcggcgacgttctatcacttcttcacgctgaaaccgaaggggcgccacacatgtgtggtctgcaccggcacggcctgctacatcaaaggagcgccggcgctgctgggcgcgattgagaaacagtacgggataaaacccggcgagaccacggcggacggcgaattgagcgtattgaccgcgcgctgcctgggatcgtgcggattggcgccggcggccgtgatggatcaggccgtcctgggcaaaatcggacccgccgagatgctggcgcggatcgagaaagatatccgcctagaggtccagaaatga

SEQ ID NO: 99799 - protein, 170 aa, Solibacter usitatus Ellin6076
MQTYLGAPQLPSDDKRWKLVEATARRHGREPHALIETLHTVQECFGYLDEAGLRFVASVLRVPLSRVYGAATFYHFFTLKPKGRHTCVVCTGTACYIKGAPALLGAIEKQYGIKPGETTADGELSVLTARCLGSCGLAPAAVMDQAVLGKIGPAEMLARIEKDIRLEVQK

SEQ ID NO: 99800 - DNA, 513 bp, Magnetococcus sp. MC-1
  CDS (1)..(513): transl_table=11
atgagtgagattgcaccagcggccaagcccgctttttcccaagaggctctcaaaaaggttgagaccatctataaccgttatcccgcagataagcgtcaatctgccctgctgcccgtgttggatctggcccagcgggagtttggtggctggctgtcgcgggcatccatggactatgtggcggagctgatgggtctggcgccgatccgtgtttatgaggtggccaccttctacaccatgtacaacctcaagcccgtgggtaaacaccatgtacaggtgtgtaccaacatctcttgttggctgtgtgggtcggatggcattggtgaagcggtaaaacagcgtctggagattgagtatggtcaaaccacggaggatggtaactttaccctctccgaagtggagtgcctgggggcttgtgtcaatgcacccatgttccagatcaatgacgactactacgaaaatctgacaccagaaacagcggttaagattatcgacgagctggccaacaaggcctaa

SEQ ID NO: 99801 - protein, 170 aa, Magnetococcus sp. MC-1
MSEIAPAAKPAFSQEALKKVETIYNRYPADKRQSALLPVLDLAQREFGGWLSRASMDYVAELMGLAPIRVYEVATFYTMYNLKPVGKHHVQVCTNISCWLCGSDGIGEAVKQRLEIEYGQTTEDGNFTLSEVECLGACVNAPMFQINDDYYENLTPETAVKIIDELANKA

SEQ ID NO: 99802 - DNA, 738 bp, Mycobacterium smegmatis str. MC2 155
  CDS (1)..(738): transl_table=11
gtgagcgaggtgttcctggaactgggccagcgcccggacgaagcgggtccgccgatcagcggacccgcgacgtatcccgacgacgtcaccgaaagcctgcgggccgatgccgagcagatcatcgcgcgctaccccgacgcccggtcggcactgctgccgctgctgcacctggtccaggcacaggacggatatctcaccccggccgggatcggtttctgtgcagcgcaattggggctcaccgaggccgaggtgacggcagtcgcgacgttctactcgatgtaccgccgcaccccgaccggcgactacctcgtcggtgtgtgcaccaacaccctgtgcgcgatcatgggcggcgacgcgatcctcgaggcgctcgaagaccacctcggtgtgcatccaggacagaccacgcccgacggccgggtgacgttagaacacgtcgagtgcaacgccgcgtgtgactacgcgccggtggtgatggtcaactgggagttctacgacaaccagacaccgtcgtcggcgcgcgacctcgtcgacggtctgcgctcgggatccccgccgccgcccacacgcggatcgctgtgcacgttccgcgaaaccgcccgcacccttgccggtctcaccgatccgaacgcaccaggcggtgcgccgggcgcggccacgctggcgggtctgcgactggcccgtgagcgcggcatgaccgcacccaccccgccccagacgaacggttcggcctcatga

SEQ ID NO: 99803 - protein, 245 aa, Mycobacterium smegmatis str. MC2 155
MSEVFLELGQRPDEAGPPISGPATYPDDVTESLRADAEQIIARYPDARSALLPLLHLVQAQDGYLTPAGIGFCAAQLGLTEAEVTAVATFYSMYRRTPTGDYLVGVCTNTLCAIMGGDAILEALEDHLGVHPGQTTPDGRVTLEHVECNAACDYAPVVMVNWEFYDNQTPSSARDLVDGLRSGSPPPPTRGSLCTFRETARTLAGLTDPNAPGGAPGAATLAGLRLARERGMTAPTPPQTNGSAS

SEQ ID NO: 99804 - DNA, 480 bp, Azoarcus sp. BH72
  CDS (1)..(480): transl_table=11
atgctgagccaggaatcgctgcaacagatcgatcgcgagatcgcgaaatatcctcccgaccagaagcagtcggcggccatgtccgcgctgcgtatcgctcaagtcgagaaaggctggctttcgaaggaaacgatcgccttcgtcgcggactacctccagatgccggcgatcgccgtctatgaggtagcgagcttctacaacatgtacgacctgcagccggtggggcgccacaagattaccgtgtgcaccaacctcccttgtgcgctgtcgggcggcgttcatgcggccgaatacatcaagcagaagctcggtatcgatttcaacgagaccacgcccgatggcaagttcacgctgaaggaaggcgagtgcatgggcgcctgtggtgacgccccggttctgctgcacaacaaccacacgatgtgcagctggatgacgactgagaaaatcgaccaactcctggccgacctgggaagcaaatga

SEQ ID NO: 99805 - protein, 159 aa, Azoarcus sp. BH72
MLSQESLQQIDREIAKYPPDQKQSAAMSALRIAQVEKGWLSKETIAFVADYLQMPAIAVYEVASFYNMYDLQPVGRHKITVCTNLPCALSGGVHAAEYIKQKLGIDFNETTPDGKFTLKEGECMGACGDAPVLLHNNHTMCSWMTTEKIDQLLADLGSK

SEQ ID NO: 99806 - DNA, 504 bp, Rickettsia rickettsii
  CDS (1)..(504): transl_table=11
atgaatacaaaaattacaaattttacatttgataagaaaaatttaaatctagcagaagagattataaaaaaatatccaccgcatggaaaaagaagtgcaatacttccgctgcttgatctagcacaacgtcaaaacggcggctggctacctgttcctgctatcgaatatgtagcaaatatgttagcaatgccttatatacgggcttatgaggttgcaacattttatactatgtttaacttaaagcgagttggtaaatatcatatccaagtatgtactaccactccttgctggctgagtggtagtgatgatataatgaaaatttgcgaaaagaaattaggtgtaaaactcaaagaaactactgaagatcaaaaatttactttaagcgagatagaatgtttgggagcatgcgttaacgctccggtcgtacagattaatgacgattattatgaagatctaactcaagaaaaaatgggggaaataatagacaagcttcaaaatgactag

SEQ ID NO: 99807 - protein, 167 aa, Rickettsia rickettsii
MNTKITNFTFDKKNLNLAEEIIKKYPPHGKRSAILPLLDLAQRQNGGWLPVPAIEYVANMLAMPYIRAYEVATFYTMFNLKRVGKYHIQVCTTTPCWLSGSDDIMKICEKKLGVKLKETTEDQKFTLSEIECLGACVNAPVVQINDDYYEDLTQEKMGEIIDKLQND

SEQ ID NO: 99808 - DNA, 609 bp, Magnetospirillum magnetotacticum MS-1
  CDS (1)..(609): transl_table=11
atgagcaatcactcctacgaaccggaaagcttcgctttcacccccgaatacctggagaaggccaaggtcttcatcgccaagtatcccgctggccgccagcagagcgcggtgatgccgctgctggatctggctcagcgccaggaaggctgggtcagccgcgccgccatggaagtcatcgcggagatgctggacatggcccccatccgggtggaggaggtggcgaccttctacaccatgtataaccgcaagcccgtgggcaccttccacgtccaggtctgcaccaatctgccctgcatgctcaggggctccgacgaagtggtggccgccgccaaggccgcgctgggtgtcgagttcggcgagatgaccgccgacggcaagttcaccctgtccgaggtggaatgcctgggcgcctgcgtcaatgcgcccatgatgcagatcaacgacgactactacgaggacctttcggccgaaaccaccaaggcggtgctggaagccttcaagcggggcgagacgcccaagcccggtccccagaacggtcgtcagttctcgtgcccggcaggtggtcccaccagtctgaccgaattgaagttcgagggggggaaggcctga

SEQ ID NO: 99809 - protein, 202 aa, Magnetospirillum magnetotacticum MS-1
MSNHSYEPESFAFTPEYLEKAKVFIAKYPAGRQQSAVMPLLDLAQRQEGWVSRAAMEVIAEMLDMAPIRVEEVATFYTMYNRKPVGTFHVQVCTNLPCMLRGSDEVVAAAKAALGVEFGEMTADGKFTLSEVECLGACVNAPMMQINDDYYEDLSAETTKAVLEAFKRGETPKPGPQNGRQFSCPAGGPTSLTELKFEGGKA

SEQ ID NO: 99810 - DNA, 528 bp, Xylella fastidiosa Dixon
  CDS (1)..(528): transl_table=11
atgaaggcgacaaagagttttgaacgggtgcgtgatgtggatccccaggtggtattgggtgaccgcacgcgggctcacattgatcattggcttgccaagtttccagcggatcagaagcgatcagccctgttgcaggggctgtatgccgcgcaggagcaaaatcagggttggttgacggatgagctcatcgccgctgtggccaaatatctggatattccgtccgtatgggcttatgaggttgctactttctactcgatgtttgagacgcggaaggttggccgtcataacgttgctttctgcaccaatgtcagttgttggctcaacggtgctgaggatttggtgagctatgcggaggaaaaactaggttgcaagcttggccagtccactgctgacggtcgtgtttacctcaagtgtgaggaagaatgccttgctgcttgtgctggtgctccgatgatggtgattaacggtcattatcatgagcgtctgaccaaggagaaggttgaccagttgttagacggcttggagtaa

SEQ ID NO: 99811 - protein, 175 aa, Xylella fastidiosa Dixon
MKATKSFERVRDVDPQVVLGDRTRAHIDHWLAKFPADQKRSALLQGLYAAQEQNQGWLTDELIAAVAKYLDIPSVWAYEVATFYSMFETRKVGRHNVAFCTNVSCWLNGAEDLVSYAEEKLGCKLGQSTADGRVYLKCEEECLAACAGAPMMVINGHYHERLTKEKVDQLLDGLE

SEQ ID NO: 99812 - DNA, 1314 bp, Roseovarius nubinhibens ISM
  CDS (1)..(1314): transl_table=11
atgctgcgccgtctgtacaaagaccaacccgaaagtttcgccttcagcgcggccaaccaggcctgggccgaggggcagattgccaaatatcccgaaggccgtcaggccagcgccatcatcccgttgctgtggcgggcgcaggagcaggaaggctggctcacccggcccgcgatcgagcatgtggccgatatgcttggcatggcctatatccgggcgctcgaggttgcgtccttctatttcatgttccagatgcagccggtgggcagcgtcgcgcatttccagatctgcggcaccacctcctgcatgatctgtggcgccgaagacctcgtggccgtgtgccgcgaaaaggtcgcgcctaacccgcatgagctctcgcctgatggcaagttctcgtgggaagaggtcgaatgtctcggcgcctgcaccaatgcgccgatggcgcagatcggcaaggattactacgaagatctcaccgccgagcggttcgccgagatcatcgacgagatggcggccggcaagacgccgctgccggggccgcagaatggccgctatgccgccgagccgaaatcggggctgaccagcctgaccgagttcgacagcggccgcaccaaatacaatggctcggtccagcgcgccgccgatattggcgacacgatcaagcggatcgatggcaccgaagtgccgctgctgacgccttgggtgaccaagggcgcgatgcacaaaccggcgaaacccggcaagaacatcgcggcagaagagggcgacacgcctgccaagaccgccaagaagaccgaggccaaggtgaccaaagcgcccgccgccaaggaagcgccgaaggatgaggtgtcggacaaggccgcggaggcgctcagccaaaagcccaagggccgcccggcgtcgaaacctgagaccgcaggcgaggccgcgcgcgccgatgcgcccgccaaggcccccaaggccaaaaccgccaagggcgatgtgccgatggccgggaccaaggatggcagggcagagggccccgcacagggcaagaagccgcgcacgatgaaagcaccgcgcaaggccggggccgatgatctcaagatgatcaagggcgttggtccgaagctcgaacagatgctgcatggcatggggttctatcatttcgaccaggtggcgaaatggagcgcggatgaggtgtcttgggtcgaccagaacctcgaaggtttcaagggccgggtgagccgcgacaattgggtcgagcaagccaagcttttgtcggaaggcaaggagaccgagttctccaaacgcgccaagaaggggggcgtttactag

SEQ ID NO: 99813 - protein, 437 aa, Roseovarius nubinhibens ISM
MLRRLYKDQPESFAFSAANQAWAEGQIAKYPEGRQASAIIPLLWRAQEQEGWLTRPAIEHVADMLGMAYIRALEVASFYFMFQMQPVGSVAHFQICGTTSCMICGAEDLVAVCREKVAPNPHELSPDGKFSWEEVECLGACTNAPMAQIGKDYYEDLTAERFAEIIDEMAAGKTPLPGPQNGRYAAEPKSGLTSLTEFDSGRTKYNGSVQRAADIGDTIKRIDGTEVPLLTPWVTKGAMHKPAKPGKNIAAEEGDTPAKTAKKTEAKVTKAPAAKEAPKDEVSDKAAEALSQKPKGRPASKPETAGEAARADAPAKAPKAKTAKGDVPMAGTKDGRAEGPAQGKKPRTMKAPRKAGADDLKMIKGVGPKLEQMLHGMGFYHFDQVAKWSADEVSWVDQNLEGFKGRVSRDNWVEQAKLLSEGKETEFSKRAKKGGVY

SEQ ID NO: 99814 - DNA, 669 bp, Erythrobacter sp. NAP1
  CDS (1)..(669): transl_table=11
atggctgaccgtactcccgcacccgatacgcccgagctgcgcgcgcgttggggctctttcgagtggtcgaaagagaacaagaagaaggccgatcgcgagatcgccaagtatcccgagggccgccagaagtcggcagtgatggcgctgctcgacctcggccagcgtcaggttggcgaagagaccgacacgcagggctggctgccgcttccggtgatcgaatacatcgccgactatctcgatatgccggtgatccgcgtgctcgaagtcgcgaccttctacttcatgtacaacatgaagccggtgggtaagtaccacgtgcaggtttgcggcacgacgccgtgcatgctgcgcggttcggacgatatcatcagcgcgtgcaaaaagcgcggcatgggttttggcaaggtctccgaggacggcctttggaccctcaccgaagtcgaatgcatgggcaattgcgcgaccgcgccgatggtccagatcaatgacgacaattacgaggacctgaccgtcgaacgtctcgacgctgtgctcgacgcgctggccgctggcgagcagcccaaaacgggcacgcaagagccgggccgccacacctccgagccaagcggtggcccaaccacgctcaaggaaatggtcgacgccaaccacgattaccggggtgactggtaa

SEQ ID NO: 99815 - protein, 222 aa, Erythrobacter sp. NAP1
MADRTPAPDTPELRARWGSFEWSKENKKKADREIAKYPEGRQKSAVMALLDLGQRQVGEETDTQGWLPLPVIEYIADYLDMPVIRVLEVATFYFMYNMKPVGKYHVQVCGTTPCMLRGSDDIISACKKRGMGFGKVSEDGLWTLTEVECMGNCATAPMVQINDDNYEDLTVERLDAVLDALAAGEQPKTGTQEPGRHTSEPSGGPTTLKEMVDANHDYRGDW

SEQ ID NO: 99816 - DNA, 507 bp, Synechococcus sp. WH 5701
  CDS (1)..(507): transl_table=11
atggcctacaccaaaggtcccggcaacaggtccatcgaagcggcacctgaagcgtccttcgcggccctggagcccctgctgctgcgctcccagggacgggccgatgccctgatcgaggtgcttcatggcgcccagaagctctacagctacctgagcgatgacttgctccgccacgtggcgacgcgcctgcagctcccactcagccgggtcaagggaaccgccagcttctatcacctcttccgtttccagccgccggcccgccaccgctgcgtggtctgcaccggcaccgcctgccagatccagggagccccggccctgatcgccgccatggaggagggactggggctgaagctgggcgccaggcgaggggatggctgggcaagcctctcggaggtgcgctgtctcggcacctgcagcgacgcgcccctggtgctgatcgacggcaccgtcggccgccagcagacccccgccggcctgcgccgctggctgaaggagctggagccatga

SEQ ID NO: 99817 - protein, 168 aa, Synechococcus sp. WH 5701
MAYTKGPGNRSIEAAPEASFAALEPLLLRSQGRADALIEVLHGAQKLYSYLSDDLLRHVATRLQLPLSRVKGTASFYHLFRFQPPARHRCVVCTGTACQIQGAPALIAAMEEGLGLKLGARRGDGWASLSEVRCLGTCSDAPLVLIDGTVGRQQTPAGLRRWLKELEP

SEQ ID NO: 99818 - DNA, 567 bp, Photobacterium sp. SKA34
  CDS (1)..(567): transl_table=11
atgttaacagatcaagaaagagctcatctggaagagcatattgctcattacccagaaaaaagagccggtgccatctattgtctttattttatgcaagataaatatggctatatcacgaaaccaagtctcaaccttgtcagtgagctcacagacctatcaacaacacagctagatgaacttatcacgttttacacgcttttgcgccgacgtcctgttggccgcaatatcatgcgtgtttgtgacagcatttcttgccatacccgaggtgcgaaaaaagttctagaagctgcagaaaatgcaacaggtaaagcattaggagagatcgctaatgatggcagcattaccgttctacctagtatttgcctaggattatgcgatcgcgctcccgcagctctgatcaatgatgatcgtgttgaaggtgaactaacacctgaacgcatgagaatgatcttaactgaattagcagaagaagagatcaagctatcagagaagcccgactatcaaaatattatttcgatgctgactcctcaagatgcgccagcaaaaccgaataaagaggtgatgtaa

SEQ ID NO: 99819 - protein, 188 aa, Photobacterium sp. SKA34
MLTDQERAHLEEHIAHYPEKRAGAIYCLYFMQDKYGYITKPSLNLVSELTDLSTTQLDELITFYTLLRRRPVGRNIMRVCDSISCHTRGAKKVLEAAENATGKALGEIANDGSITVLPSICLGLCDRAPAALINDDRVEGELTPERMRMILTELAEEEIKLSEKPDYQNIISMLTPQDAPAKPNKEVM

SEQ ID NO: 99820 - DNA, 531 bp, Xanthobacter autotrophicus Py2
  CDS (1)..(531): transl_table=11
atgcgccctcacggcttttgggaaagcgagacgtccatggcggtctatgaggattggagcaccgagcgcgcagcgcaggtgatctcggagaaccggcatctcgaaggggccaccatgcccatcctgcatgccctgcaggagacgttcggcttcgtgccggacccggcggtgcccatgatcgccgaaagcctcaacctctcgcgcgccgaggtctatggcgtcctcaccttctatcacgacttccggcgtgaggcgcccggtcgccatgtggtgaagctgtgcgccgctgaggcctgccagtccgtgggcggcaaggcgctcgcccagtatgtcgaggaaaagctcggcgtggacatgggttcgacctcccccgacgggcgggtgaccctggagcccatctattgcctgggcctgtgcgcctgcgctccgtccgctctggtggacggccagctggtgggccgcctcgaccgcgatgccatcgacgagatcgccgactgcttcgccaacggcaagagcttcggagacgcctga

SEQ ID NO: 99821 - protein, 176 aa, Xanthobacter autotrophicus Py2
MRPHGFWESETSMAVYEDWSTERAAQVISENRHLEGATMPILHALQETFGFVPDPAVPMIAESLNLSRAEVYGVLTFYHDFRREAPGRHVVKLCAAEACQSVGGKALAQYVEEKLGVDMGSTSPDGRVTLEPIYCLGLCACAPSALVDGQLVGRLDRDAIDEIADCFANGKSFGDA

SEQ ID NO: 99822 - DNA, 690 bp, Xanthobacter autotrophicus Py2
  CDS (1)..(690): transl_table=11
atgtccgtccgccgcctcgccgcagagcagcccgagagcttcgacatcacgccggagcttgaggccatcgcccagaagctgatcgcgaaatatcccgagggccgccaggccagcgccgtcgtgccgctgctctgggaaacccagaaggccgccggcggctggctgcccgagccggccatacgcgccgtggcggagcgcctcggcatggcgaacatccgcgtgctggagatcgccaccttctacaccatgttcaacctggaaccggtggggaagtatttcgtgcagctgtgcgggacgaccccctgcatgctgcgcggcgccgaagccatcaagcatgtgtgcgagaagaagatcggccacgagcggcacgtttccgccgatggcaccttctcctggcttgaggtggagtgcctgggtgcctgtaccaacgcccccatggtccagatcaacgacgattactacgaagacctgacgcccgagaatttcgagaagctgctcgatgatctcgccgccggccgtccggtgaaggtcggcccgcagaattcgcgccgtggctccgagcccgagggcggcgcacgggtgctgtccgatccggcgctctatgcgcacgccgtcgcgcccgaggcgcctgcggctcccgcggccgaggcccccacatccggcgccttcgcgccgacctccggggagtga

SEQ ID NO: 99823 - protein, 229 aa, Xanthobacter autotrophicus Py2
MSVRRLAAEQPESFDITPELEAIAQKLIAKYPEGRQASAVVPLLWETQKAAGGWLPEPAIRAVAERLGMANIRVLEIATFYTMFNLEPVGKYFVQLCGTTPCMLRGAEAIKHVCEKKIGHERHVSADGTFSWLEVECLGACTNAPMVQINDDYYEDLTPENFEKLLDDLAAGRPVKVGPQNSRRGSEPEGGARVLSDPALYAHAVAPEAPAAPAAEAPTSGAFAPTSGE

SEQ ID NO: 99824 - DNA, 489 bp, gamma proteobacterium HTCC2207
  CDS (1)..(489): transl_table=11
ttgggtatcagccaaaatgagcagcaatcgatcagtgctttagtcggccaatatacgcagttgcccggcgcgttattgcctctgttacatgccattcagtcggacttaggctatgtgcctgattcagctgtgccgattattgccaaaggtctgaatctctcccgtgccgaagtgcatggtgtcatcagcttttatcatgattttaaaaccaccccagtaggccgtcacaccgtccaagtttgtcgcgcagaagcttgccagtctatgggctcccgtcaattggaagctcatgccaagcaggccctgggtatagactatggtgaaacgactgccgatggggctgttacgctcgagcctgtttactgcttgggcaactgcgcctgttcgccttcagtgcgaatagatgatgctatttatgcgcgagtcgatacagatctttttgatgacctaatgtccggactcttaacggaagagggggcatccaaatga

SEQ ID NO: 99825 - protein, 162 aa, gamma proteobacterium HTCC2207
MGISQNEQQSISALVGQYTQLPGALLPLLHAIQSDLGYVPDSAVPIIAKGLNLSRAEVHGVISFYHDFKTTPVGRHTVQVCRAEACQSMGSRQLEAHAKQALGIDYGETTADGAVTLEPVYCLGNCACSPSVRIDDAIYARVDTDLFDDLMSGLLTEEGASK

SEQ ID NO: 99826 - DNA, 507 bp, Rickettsiella grylli
  CDS (1)..(507): transl_table=11
atgaagcacgttacaaataaaaatgaaccattgcctgaagaattaaaaaaggcaattgataaatggatccagaaatatccatcgactcgtcgacagtctgccatattgcaggcgttgacaatagcgcaggaatataatgggggttatttatcgcagtatttaattgatgcagttgctgactatttagcaatgtcccgtgttacggcctatgaggttgccaccttttacacgctttatgaactcaaaccggtaggccggcataagattggtgtatgtaccaatatttcgtgtatgttgagtggttgtgacaaaatcgtcaagcatttacaaacgcgtttgaacattaatctgggcgaaacgacggcggataaaaaatttacgttacgagaagttgaatgtttaggtgcgtgtgccaatgcaccggtcgtccatatcggacaccgttattatgaaacgttaacgcctgaaaaattagataaaatcttggatggtttagatggccaatga

SEQ ID NO: 99827 - protein, 168 aa, Rickettsiella grylli
MKHVTNKNEPLPEELKKAIDKWIQKYPSTRRQSAILQALTIAQEYNGGYLSQYLIDAVADYLAMSRVTAYEVATFYTLYELKPVGRHKIGVCTNISCMLSGCDKIVKHLQTRLNINLGETTADKKFTLREVECLGACANAPVVHIGHRYYETLTPEKLDKILDGLDGQ

SEQ ID NO: 99828 - DNA, 483 bp, Desulfitobacterium hafniense DCB-2
  CDS (1)..(483): transl_table=11
ttgtgtgaggagtgtaaagagttagttgatcctaaagaggagcaattggagcagatattagctcatcataagcgggagaaaggggcgcttattcctgttttgcaggaagcgcaagggctttatgggtatttgcctgaacatgtgatcaagcacatcagcagggggctgggcataccttcagctaaggtttatggagttgttacattttatgctcaattccgccttacccctatggggcgcaatgtgattagtgtctgcttaggcacggcctgccatgttcgaggaggcgctaaagttctggaagccatagagaaggatacaaagattaaggatgggcagaccacggaagacgggcgctttactttagagatcgtcaactgtattggggcctgtggattagctcccgttatgtccattaatgggaatgtccacggaagattgaatgcagatcaaatcccaggaatcctggcagagtataagtag

SEQ ID NO: 99829 - protein, 160 aa, Desulfitobacterium hafniense DCB-2
MCEECKELVDPKEEQLEQILAHHKREKGALIPVLQEAQGLYGYLPEHVIKHISRGLGIPSAKVYGVVTFYAQFRLTPMGRNVISVCLGTACHVRGGAKVLEAIEKDTKIKDGQTTEDGRFTLEIVNCIGACGLAPVMSINGNVHGRLNADQIPGILAEYK

SEQ ID NO: 99830 - DNA, 498 bp, Pseudomonas putida GB-1
  CDS (1)..(498): transl_table=11
atgaacagcacgcttatccagacagaccgtttcgccctgagcgaaacagagcgctcggccatcgagcacgagatgcatcactacgaggacccgcgcgcggcgtccatcgaagccctgaagatcgtccagaaagaacgtggctgggtgccggacggcgccatccacgccatcggcgaagtgctgggcatcccggccagcgacgtcgagggcgtggccaccttctacagccagatcttccgccagccggtcggccgccacatcatccgtgtgtgcgacagcatggtctgctacatcggcggccacgagtcggtcgtcagccagatccagagcgagctgggcatcggcctcggccagactaccgccgacggccgtttcaccctgctgccagtgtgctgcctgggcaactgcgacaaggccccggcgctgatgatcgacgatgacacctttggcgacgtgcagcccgctggcgtcaccaaactgctggagggttacgtatga

SEQ ID NO: 99831 - protein, 165 aa, Pseudomonas putida GB-1
MNSTLIQTDRFALSETERSAIEHEMHHYEDPRAASIEALKIVQKERGWVPDGAIHAIGEVLGIPASDVEGVATFYSQIFRQPVGRHIIRVCDSMVCYIGGHESVVSQIQSELGIGLGQTTADGRFTLLPVCCLGNCDKAPALMIDDDTFGDVQPAGVTKLLEGYV

SEQ ID NO: 99832 - DNA, 525 bp, Marinobacter sp. ELB17
  CDS (1)..(525): transl_table=11
atgtcgcaaaatacgaaccccctcagcactgccgccgacctgatcacgacggatggcttccagctgcacgaggacgaccgccaggccatgctcaccgaacgcgaccattacgaacagcctcaggcagcctgcattgaggcgctgaaaatcgtgcaaaagcgccacggctgggtgccagatggagcaattgtcgctatcgccgaaaccctcggcgtcggtgccggagcagtggagggcgttgctaccttctatagcctgatctttcgccaaccggtggggcgtcatgtgatcctgctgtgcgatagcagctcatgcttcctcacaggctatgaagcgttgagcgaggttttgagtgagcgtctcggcataggcttcggccagactacgggagatggccgctttactctgctgccggtgtgctgcctgggagcctgcgatcgcggccctgcgatgatgattggcgatgacactttcggccccatcgaagcagacgacctagatgaacttctggaggcctatccatga

SEQ ID NO: 99833 - protein, 174 aa, Marinobacter sp. ELB17
MSQNTNPLSTAADLITTDGFQLHEDDRQAMLTERDHYEQPQAACIEALKIVQKRHGWVPDGAIVAIAETLGVGAGAVEGVATFYSLIFRQPVGRHVILLCDSSSCFLTGYEALSEVLSERLGIGFGQTTGDGRFTLLPVCCLGACDRGPAMMIGDDTFGPIEADDLDELLEAYP

SEQ ID NO: 99834 - DNA, 747 bp, Oryza sativa subsp
  CDS (1)..(747)
atgctgccgccggccgcccgcctcgcggcccgccgcctcctagggctcgcgacctcctccgcctcggattcggccgcggcgcgacgcttgtcccgttctccgcacctcgattcgccggaaaacaaccccgacatgccgtgggagttcacggaggccaacatgaagaaggttaatgagatattgtctcactatccaagcaactacaagcagtctggtattattccaatgcttgatcttgcccagcagcagcatggtggatgggtgccagttgcagcaatgaatgctattgctaagatcgttgaagttgcaccaatcagagtatatgaagttgctacattttacacaatgtttaaccggactaaggtgggtaaatatcaccttttggtgtgtggaaccacaccttgcatgattcgtggttcacgtgaaattgaagaagccttgttagaacatcttggagttaaacggaatgaggtgaccagtgatggtttattttctgttggagaaatggagtgcatgggctgctgtgtgaatgctcccatgattgctgtggccgattattctaaaggttcagagggttacacatacaactattatgaggacctcactcctaaacgagttgttgagatcgtcgagatgctgaaaagaggagaaacccctcctcgcggcacacaacacccagagcggaaaaactgtggccctgctggagggaataccaccttgcacgctgacatgaggcggcagtggtaa

SEQ ID NO: 99835 - protein, 248 aa, Oryza sativa subsp
MLPPAARLAARRLLGLATSSASDSAAARRLSRSPHLDSPENNPDMPWEFTEANMKKVNEILSHYPSNYKQSGIIPMLDLAQQQHGGWVPVAAMNAIAKIVEVAPIRVYEVATFYTMFNRTKVGKYHLLVCGTTPCMIRGSREIEEALLEHLGVKRNEVTSDGLFSVGEMECMGCCVNAPMIAVADYSKGSEGYTYNYYEDLTPKRVVEIVEMLKRGETPPRGTQHPERKNCGPAGGNTTLHADMRRQW

SEQ ID NO: 99836 - DNA, 798 bp, Ostreococcus tauri
  CDS (1)..(798)
atgacgaaacctaacgacgctcgcgcggtggcgacggcgcgaacgcgcgcgcgcgcgtactcggtgggacagatggtgcatcgagacgtcccggaggataactcgacgatgacgtggacgttcgaggcgtcggtgagaccgaaagtggatgcgatcttgcggcggtacccgtcgaattataagcgaagcgcgatgattccgttgttggatttggcgcagcagcaaaataaaggacacctgacgttggcgatgatgaatcacatcgcggatgtgctcgaggtggcgccgattcgcgtgtacgaggtggcgacgttttactcgatgtttaatcgacaaaagatgggcaagctgcacgtcatggtgtgcgggacgacgccgtgcatgttgcgagggagccgagagattgaaaaggcgttggaggagtggatgggggtgaaaaagtttgaaaccacggcgtgtgggacgtttaccctgggagagatggagtgcatggggtgttgcgtcaacgcgccgatgatcgccgtggcggattacagaaacggcgtcgaagggtactcgtacaactattacgaagacctcaccccgcaaaccgcggtgaaggtgtgcgaggcgttgaaagctgggaaatcgcctcgcgtcgggtcacaaattcgcgataaagcggagccgattaagggtttaacgacgctcacgggtgacccctccgggccgttttcgcgcgacttggaccaaatcaaggcggacgtcgacgccgccgccgccgccgccgccgccgccgccgcggcggagaaaaagtag

SEQ ID NO: 99837 - protein, 265 aa, Ostreococcus tauri
MTKPNDARAVATARTRARAYSVGQMVHRDVPEDNSTMTWTFEASVRPKVDAILRRYPSNYKRSAMIPLLDLAQQQNKGHLTLAMMNHIADVLEVAPIRVYEVATFYSMFNRQKMGKLHVMVCGTTPCMLRGSREIEKALEEWMGVKKFETTACGTFTLGEMECMGCCVNAPMIAVADYRNGVEGYSYNYYEDLTPQTAVKVCEALKAGKSPRVGSQIRDKAEPIKGLTTLTGDPSGPFSRDLDQIKADVDAAAAAAAAAAAAEKK

SEQ ID NO: 99838 - DNA, 885 bp, Phaeosphaeria nodorum
  CDS (1)..(885)
atggcctccaaactggtaccgtttatgttcaggagcgccccgcgggcctcgcgccagttccagagggctcaatggcgggccttcagtgtatcgcggcctgcgcgtagcgactcgctcaatgtgcaccgcgatacacccgagaacaatgcgaatatccccttcgagttcactgcgcagaacaaggagctcatcaaggagattgtctcccggtacccgtcccagtacaagaaggccgccgtcatgccgctcctcgatcttggccagcgccagcacggcttcaccagcatcagcgtcatgaacgaggtcgcgcggatactcgagatgcccccaatgcgtgtctacgaggtcgccaccttctacaccatgtacaaccggaatccgacgggcaagttccacgttcagatctgcacaacgacgccctgcatgctccgcgacagcgacgccgtcatgaaggcctgcgaggacactcttggcatccaccatggccagaccaccaaggacggcctgttcaccatgactgaagtcgagtgcctcggcgcatgcgcaaacgcacccatggtccagatcaacgacgactactacgaggacctgacctacgaatcaactgtgtctcttctcaaggctctgaggcacgcttccgaagctacgggtgctaacttgggcggagcagatggcctcaacaccaagggcaacaatgcttcgccgaactccgctggcgaggacgcgatcaacaggcagggacgatccatcgaggctggtaacctgaagataccatcacccggaccattgagcggaaggaagagctgcgagccagctggtggattgacctgtttgactggcgagccatggggtaacgagaccctgcgcaaggacggcgagctgtaa

SEQ ID NO: 99839 - protein, 294 aa, Phaeosphaeria nodorum
MASKLVPFMFRSAPRASRQFQRAQWRAFSVSRPARSDSLNVHRDTPENNANIPFEFTAQNKELIKEIVSRYPSQYKKAAVMPLLDLGQRQHGFTSISVMNEVARILEMPPMRVYEVATFYTMYNRNPTGKFHVQICTTTPCMLRDSDAVMKACEDTLGIHHGQTTKDGLFTMTEVECLGACANAPMVQINDDYYEDLTYESTVSLLKALRHASEATGANLGGADGLNTKGNNASPNSAGEDAINRQGRSIEAGNLKIPSPGPLSGRKSCEPAGGLTCLTGEPWGNETLRKDGEL

SEQ ID NO: 99840 - DNA, 624 bp, Aedes aegypti
  CDS (1)..(624)
atgtcaatgagatttgcgcacgtccttgcagcatggctacatcaaggacattctcaaagggttaatgccattctcaacatttatccggaaggtcataagcgtggagccatgattccgctgttggatttggcacaacgccaacatggttggttgcccatctcggctatgcatagagtggcggatattttaggccttccgaacatgagagtttacgaagtagcaacattttacaccatgtttatgcgaaaacctacaggaacctatcatgtgcaggtatgcactacaactccgtgctggttgcgtggatctgatgaaataatgactgcttgtaaggaaaaactaggcattggagcaggtgaaacaacaaaggacggaaaattcaccatatcagaagtagaatgtttgggcgcgtgtgtgaatgccccaatgatcgcagtcaatgacgattattacgaagatttgacagcaaaggatactatagaaattttgagtgatttaaagcaaggtaaggttccaagaccagggccaaggaacggacgattcgcttcggaacctacaggcggtttaacatcgttgaccgaagaaccaaaaggtccaggattcggaatgcaaacaggcttttag

SEQ ID NO: 99841 - protein, 207 aa, Aedes aegypti
MSMRFAHVLAAWLHQGHSQRVNAILNIYPEGHKRGAMIPLLDLAQRQHGWLPISAMHRVADILGLPNMRVYEVATFYTMFMRKPTGTYHVQVCTTTPCWLRGSDEIMTACKEKLGIGAGETTKDGKFTISEVECLGACVNAPMIAVNDDYYEDLTAKDTIEILSDLKQGKVPRPGPRNGRFASEPTGGLTSLTEEPKGPGFGMQTGF

SEQ ID NO: 99842 - DNA, 723 bp, Aedes aegypti
  CDS (1)..(723)
atgctgacaaactcctttaaaataattccaaaggtgagactcctccgtggaatcagcagttcagcggcaagatgtagcgataatctctttgtgcaccgagatacggccgaagataatcccagcatcccgtttgagtttaccgaggaaaacaaaaagagggttaatgccattctcaacatttatccggaaggtcataagcgtggagccatgattccgctgttggatttggcacaacgccaacatggttggttgcccatctcggctatgcatagagtggcggatattttaggccttccgaacatgagagtttacgaagtagcaacattttacaccatgtttatgcgaaaacctacaggaacctatcatgtgcaggtatgcactacaactccgtgctggttgcgtggatctgatgaaataatgactgcttgtaaggaaaaactaggcattggagcaggtgaaacaacaaaggacggaaaattcaccatatcagaagtagaatgtttgggcgcgtgtgtgaatgccccaatgatcgcagtcaatgacgattattacgaagatttgacagcaaaggatactatagaaattttgagtgatttaaagcaaggtaaggttccaagaccagggccaaggaacggacgattcgcttcggaacctacaggcggtttaacatcgttgaccgaagaaccaaaaggtccaggattcggaatgcaaacaggcttttag

SEQ ID NO: 99843 - protein, 240 aa, Aedes aegypti
MLTNSFKIIPKVRLLRGISSSAARCSDNLFVHRDTAEDNPSIPFEFTEENKKRVNAILNIYPEGHKRGAMIPLLDLAQRQHGWLPISAMHRVADILGLPNMRVYEVATFYTMFMRKPTGTYHVQVCTTTPCWLRGSDEIMTACKEKLGIGAGETTKDGKFTISEVECLGACVNAPMIAVNDDYYEDLTAKDTIEILSDLKQGKVPRPGPRNGRFASEPTGGLTSLTEEPKGPGFGMQTGF

SEQ ID NO: 99844 - DNA, 2541 bp, Heliobacillus mobilis
  CDS (1)..(2541): transl_table=11
atggaaaggagcgcttctatggaacgactcgatgatctgaataaaatcatcagccagtacaaggatagcccgggccaattgattcgcattttgcagaaagcacaggaactgtatggctacctccccgaagatatcctcggctatatcgccgataaggttggcttgcctctcagtgaagtggccggtgtagtcaccttttacagcctctttacgacgaaaccgaagggtaaacatacaatcagcgtctgcctgggtacagcctgctatgtcaagggcgctcccaatgtgctcgaagcgatcaaaaaggaactggccgtcgacatggatcagacgacggccgatggcctatttacgttgacaaatacacgctgtgtcggtgcttgcggattggcgccggcggtgcttatcgatggggaagtccacggcagggtcaaagcctctgacgtgcctgaactgattcggcaatatcgacagcgtgatcaggagggtggcacaacaacggaagccgatacgggtaccaatactgtaaccgataaaacggacagtttgaaaaatcacctaccgccaagccaagcagaaccgatcataggacccgtgctgtcgctgcaacggttagaacagatccgccacagctatgctgtgcgatacatccagcggatgcaccctgatcaagtaccagattgggtattccaaaaagctgatcataccttggcagcagtgccagcggcgaagtcataccggcaccagatcctcgtctgtgcaggtacgggctgtacgtcgtcccgtagcgcggaaatccagtccaccctgcggcgggaactacaggcgcagagcttagatggggaaattgctgttgtacatacaggttgtttcggcttttgtgaactgggaccgatcctggtcgttcatccggagcgcgtcttttactgccaagtgactcccaacgatgtgccggaaattgtagaacgccacatcgttcagggacagacggtagaacgccttctctataaacacccgcccgaaggagcatctcgaaagaccatcgatgaaaacgagttcttccatcctcagatccgggtcgctctgcgcaactgcggcatcatcgatccggaaaacatcaatgagtatattgccagcggcggttatttcggcctggcgaaagcgctcaccgctatgaagcctacagaagtgatcgagacgatcacctgttccggtcttcgaggccggggaggtgccggctttttaacaggtcgaaaatgggcctatacggctgccgtaaaagaaaccgtaaaatacgtggtatgtaacgccgatgaaggcgacccgggggccttcatggatcggagcatactcgagggcgacccccatgccgtccttgaagcgatgacgatcgccggatatgccatcggtgcccagcagggttttgtctatgttcgggccgagtatcccatcgctgttcaccgccttgaagtcgccatcgatcaagcacaccaggccgggctgctcggtcaaaacatcttgggaacaggattctcctttgatatcgagattcgcctaggtgcgggtgcttttgtctgcggtgaagagacggccttgctgaattcggtaagcggcaaacgaggcgaaccgcgaacccgtccgccctatcccgctgtcagcggcctctggggcaaaccgacgctgctcaacaatgtggagacctatgccaacatccctcaaatcatctgtaagggtgccgattggtacgctgcgatgggtacgagcggcagcaagggaacaaagattttctccttggccgggaaaatcaacaatacgggactcatcgaagtgccgatggggacgtcactgcgtaccatcatctatggcatcggtggtggtattcccaaaggcaaagcgtttaaggctgttcagaccggcggtccttctggcggttgcttaccggctgagtatctcgatattcccatcgactacgacagcttgatgaaaatcggctccatgatgggctccggcgggctcatcgtcatggatgagacggactgtatggttgatatcgcccgtttttatcttgaattcacccaagatgagtcttgtggaaagtgtactccttgccgtatcggcacccgccgtctgttagagattatcacccgtatcaccgagggcaagggaaccatgaaagaccttgagctcttggaagaactcggccacgacatcaaggaagcctccctctgcggtttaggacagacggcaccgaatccagtgttgagcaccctgcgtcatttccgccatgaatacgaagcccacatcaaagaaaaacgctgtcctgccggtgtctgcccagccttaaagccgaaaggcaagtataggatcgacggggagaaatgccgtcgctgcgggctctgtgtgaaagtgtgcccggtaaaggccatctccggcgagattcgcaagacgccctttgctatcgatgcgaagctgtgcattgcttgcggcgcttgcgcccaaaaatgtccggtccatgtgatcgcacaggagggagaacgatga

SEQ ID NO: 99845 - protein, 846 aa, Heliobacillus mobilis
MERSASMERLDDLNKIISQYKDSPGQLIRILQKAQELYGYLPEDILGYIADKVGLPLSEVAGVVTFYSLFTTKPKGKHTISVCLGTACYVKGAPNVLEAIKKELAVDMDQTTADGLFTLTNTRCVGACGLAPAVLIDGEVHGRVKASDVPELIRQYRQRDQEGGTTTEADTGTNTVTDKTDSLKNHLPPSQAEPIIGPVLSLQRLEQIRHSYAVRYIQRMHPDQVPDWVFQKADHTLAAVPAAKSYRHQILVCAGTGCTSSRSAEIQSTLRRELQAQSLDGEIAVVHTGCFGFCELGPILVVHPERVFYCQVTPNDVPEIVERHIVQGQTVERLLYKHPPEGASRKTIDENEFFHPQIRVALRNCGIIDPENINEYIASGGYFGLAKALTAMKPTEVIETITCSGLRGRGGAGFLTGRKWAYTAAVKETVKYVVCNADEGDPGAFMDRSILEGDPHAVLEAMTIAGYAIGAQQGFVYVRAEYPIAVHRLEVAIDQAHQAGLLGQNILGTGFSFDIEIRLGAGAFVCGEETALLNSVSGKRGEPRTRPPYPAVSGLWGKPTLLNNVETYANIPQIICKGADWYAAMGTSGSKGTKIFSLAGKINNTGLIEVPMGTSLRTIIYGIGGGIPKGKAFKAVQTGGPSGGCLPAEYLDIPIDYDSLMKIGSMMGSGGLIVMDETDCMVDIARFYLEFTQDESCGKCTPCRIGTRRLLEIITRITEGKGTMKDLELLEELGHDIKEASLCGLGQTAPNPVLSTLRHFRHEYEAHIKEKRCPAGVCPALKPKGKYRIDGEKCRRCGLCVKVCPVKAISGEIRKTPFAIDAKLCIACGACAQKCPVHVIAQEGER

SEQ ID NO: 99846 - DNA, 495 bp, Candidatus Kuenenia stuttgartiensis
  CDS (1)..(495): transl_table=11
atggctgaaacaaatatacaatccgctgagaatgaagcattatatctttctaagacagaagatgttttagaaaagtataaacacggcaggggctcgctcattcccatcttgcagacgatacagacggcatatggttatttgccggagaaggttgttgattttgtttcggaaagattgaatataagcgtgaatgagataatcggtgttgcgacattttacgcccagtttcatatgagaccacgcggcaggcatatcattaaggcatgcagcggaactgcatgtcatgtaaaaggcgcaaagcaaattattgaaaaactgggcaaaaaactggacattcctgtaggggagacaacaaaagatacaatgtttaccctcgaagaggtggcttgtttgggcgcctgttcgcttgcgccggttataatggtggatgaagatgtttatggccaactgttgcataataccgttgggaatataatagacgagataaagggttag

SEQ ID NO: 99847 - protein, 164 aa, Candidatus Kuenenia stuttgartiensis
MAETNIQSAENEALYLSKTEDVLEKYKHGRGSLIPILQTIQTAYGYLPEKVVDFVSERLNISVNEIIGVATFYAQFHMRPRGRHIIKACSGTACHVKGAKQIIEKLGKKLDIPVGETTKDTMFTLEEVACLGACSLAPVIMVDEDVYGQLLHNTVGNIIDEIKG

SEQ ID NO: 99848 - DNA, 465 bp, Candidatus Kuenenia stuttgartiensis
  CDS (1)..(465): transl_table=11
atgttatcggttgaagaacaaaaagaccttgaagaagaattaaagatcgtaccttataaaaaggctgccactatagaggcgttaaaaattgttcagaaacaccgcggatgggtttcggatgatggtgtaaaagacatcgcagaatttttagaaattactccggatgaagttgacagtgttgccactttttataaccttattttcaggagaaaagtaggtaaacatgttattttagtttgcgacagtgtaagctgctggatactcggctacaatcaaattttagattacctgaataaaaaacttggtattaagtttggcgaaacaacaagcgatggcaaatttacactacttccaatatcatgcctcggcacttgcgatcatgcaccagcacttatgattgataatgatctttacagagatttaacgacggatttacttgatccgattttagaaaaatatagttga

SEQ ID NO: 99849 - protein, 154 aa, Candidatus Kuenenia stuttgartiensis
MLSVEEQKDLEEELKIVPYKKAATIEALKIVQKHRGWVSDDGVKDIAEFLEITPDEVDSVATFYNLIFRRKVGKHVILVCDSVSCWILGYNQILDYLNKKLGIKFGETTSDGKFTLLPISCLGTCDHAPALMIDNDLYRDLTTDLLDPILEKYS

SEQ ID NO: 99850 - DNA, 540 bp, Arthrospira platensis FACHB341
  CDS (1)..(540): transl_table=11
atgcccgattccacagaaaccgccccaaaatctgccaaaagtaaagcagcgtcaaaccatcccagtggcgataaacgtttcaaggtactggatatcaccatgaaacgcagccaatatagtcaggatgccctaatcgaagtgctgcacaaagcccaggaagcatttggctacttagaagaagacgtattaatatacgttgcgcgacaactccaactccccctgagccaagtttacggagtcgccaccttctatcatctattttccctaaaacccagtggcgctcatacctgcgtggtctgtttagggacagcctgctatgttaaaggcagtggagaagtcctagcagccttagaagaaaaaaccggaatcaagtcaggggaaaccacgccagacggccagatatctattgtcaccgcccgctgtatcggagcctgtggtattgctccggcggctgtctttgatgggaaagttgcaggtcagcaaaccccagaaatggcggtagcacgactgcaaaagtggcagggttcagccgaggcctaa

SEQ ID NO: 99851 - protein, 179 aa, Arthrospira platensis FACHB341
MPDSTETAPKSAKSKAASNHPSGDKRFKVLDITMKRSQYSQDALIEVLHKAQEAFGYLEEDVLIYVARQLQLPLSQVYGVATFYHLFSLKPSGAHTCVVCLGTACYVKGSGEVLAALEEKTGIKSGETTPDGQISIVTARCIGACGIAPAAVFDGKVAGQQTPEMAVARLQKWQGSAEA

SEQ ID NO: 99852 - DNA, 813 bp, Aspergillus oryzae
  CDS (1)..(813)
atggcttcgaaattcttccccgccgtccctcgggtcggtcgtcagttcttccagcgcgcccccaagactcaatgcagaccgttctcggctggtccgcaacgttgcagcgactccctttccgtgcaccgcaacaagcctaccaacaacccgagcatcccgttcacgttcaacgagcagaaccaacgattgatcgatgagatcctcaagcgctatcctccccagtacaagaaggccgccgtcatgcctctcctggatctgggccagcgtcagcacggcttcaccagcattagcgtcatgaacgaggtcgcccgcctcctggagatgccccccatgcgtgtctacgaagtcgctactttctataccatgtacaaccgtgagcctgttggcaaatactttgttcagctttgcacaacgacgccatgccagctcggaggctgcggcagcaccaagatccttgaagctatccaggaacacctcggcatcacccccggacacaccaccgaggatggactcttcaccttgcttgaagtcgagtgcttgggcgcctgtgtcaacgcccctatggtccagatcaacgacgattattacgaggatcttactcccgagtccatgaagactctcctcaccgcactcaaggagtccgcgactgccaccgacgccggcaagaccgtccagattcctgcccctggcccaatgagtggaagaaacacctgtgagaacagcgccggactgacaaacctaaagaaccctgtgtgggatccggagacgatgatgagaaaggacggtgctttggaccagcctcagcagcaataa

SEQ ID NO: 99853 - protein, 270 aa, Aspergillus oryzae
MASKFFPAVPRVGRQFFQRAPKTQCRPFSAGPQRCSDSLSVHRNKPTNNPSIPFTFNEQNQRLIDEILKRYPPQYKKAAVMPLLDLGQRQHGFTSISVMNEVARLLEMPPMRVYEVATFYTMYNREPVGKYFVQLCTTTPCQLGGCGSTKILEAIQEHLGITPGHTTEDGLFTLLEVECLGACVNAPMVQINDDYYEDLTPESMKTLLTALKESATATDAGKTVQIPAPGPMSGRNTCENSAGLTNLKNPVWDPETMMRKDGALDQPQQQ

SEQ ID NO: 99854 - DNA, 675 bp, Rhodothermus marinus
  CDS (1)..(675): transl_table=11
atggctgactttgtcaaaaaaccggtcgtccccctgccggagctgcatccggagccgcagattccggccgaccagcttttcttcacggaggaagaaaaggccaaaatcgcccgcttcaaggagcagtacctggagccggccggggccgtgatgaaaacgctctggctggcccaggaaaaattcggctttctgccgccggaggtgcttcagctggtagccgacgaactgggcattccctatgcccaggtttacggcgtggccaccttctacacccagtactacaaggaaaagaaaggcaagtacgtgctggacgtctgcacctgcttcacctgccaggtgtgcggtggctacgacatcctgcactacctcgaagaaaagctgggcatccacaaaggcgagacgacgccggacgggctgttcacgctgcaggaggtggaatgcctgggcgcgtgcggctcggcaccggtcttgcaggtatccaacgggccgtacgtgcacaacctgacgccggaaaaagtcgatcaactgctggaggatctgaaacagggcaaactgccgcccttcgtctcgcttacgttgccccaggacgaggcggagctgggcggcaaccggcgttcggacgccgaagccgtcgagtcgtaccggaccccgccggtcgcccaccacacgcgctga

SEQ ID NO: 99855 - protein, 224 aa, Rhodothermus marinus
MADFVKKPVVPLPELHPEPQIPADQLFFTEEEKAKIARFKEQYLEPAGAVMKTLWLAQEKFGFLPPEVLQLVADELGIPYAQVYGVATFYTQYYKEKKGKYVLDVCTCFTCQVCGGYDILHYLEEKLGIHKGETTPDGLFTLQEVECLGACGSAPVLQVSNGPYVHNLTPEKVDQLLEDLKQGKLPPFVSLTLPQDEAELGGNRRSDAEAVESYRTPPVAHHTR

SEQ ID NO: 99856 - DNA, 543 bp, Aedes aegypti
  CDS (1)..(543)
atgattccgctgttggatttggcacaacgccaacatggttggttgcccatctcggctatgcatagagtggcggatattttaggccttccgaacatgagagtttacgaagtagcaacattttacaccatgtttatgcgaaaacctacaggaacctatcatgtgcaggtatgcactacaactccgtgctggttgcgtggatctgatgaaataatgactgcttgtaaggaaaaactaggcattggagcaggtgaaacaacaaaggacggaaaattcaccatatcagaagtagaatgtttgggcgcgtgtgtgaatgccccaatgatcgcagtcaatgacgattattacgaagatttgacagcaaaggatactatagaaattttgagtgatttaaagcaaggtaaggttccaagaccagggccaaggaacggacgattcgcttcggaacctacaggcggtttaacatcgttgaccgaagaaccaaaaggtccagggattcggaatgcaaacaggcttttagttattcaattgcatattgttcgttag

SEQ ID NO: 99857 - protein, 180 aa, Aedes aegypti
MIPLLDLAQRQHGWLPISAMHRVADILGLPNMRVYEVATFYTMFMRKPTGTYHVQVCTTTPCWLRGSDEIMTACKEKLGIGAGETTKDGKFTISEVECLGACVNAPMIAVNDDYYEDLTAKDTIEILSDLKQGKVPRPGPRNGRFASEPTGGLTSLTEEPKGPGIRNANRLLVIQLHIVR

SEQ ID NO: 99858 - DNA, 462 bp, uncultured archaeon GZfos26D6
  CDS (1)..(462): transl_table=11
atggtagaaatagacctgaagagagtggatgagataatagagcactataaaggcgaagaaggcgttttaattcagttgctgttggacatccagagcgaattcaactggatctcgaaggaagcgatagcgcaaataagcgagcggatgcaaattccgaaaagccagatataccgaatagcgagtttttatgaagcgatgagcctggagccggtaggtcggcatataatacaggtttgtcttggcactgcctgccaggtacgaggtgcgccaaagattctggaccgaatagaggggaatttaaagataaaaggtggagagacaacgtctgacatgcggtttagtttgaagcgagtaaattgccttggttgttgtgccatgggaccggtgatagtggtagatggtatttatcacggcaagattacgccagcaatggtagaggggattttagaaacgtatgagtag

SEQ ID NO: 99859 - protein, 153 aa, uncultured archaeon GZfos26D6
MVEIDLKRVDEIIEHYKGEEGVLIQLLLDIQSEFNWISKEAIAQISERMQIPKSQIYRIASFYEAMSLEPVGRHIIQVCLGTACQVRGAPKILDRIEGNLKIKGGETTSDMRFSLKRVNCLGCCAMGPVIVVDGIYHGKITPAMVEGILETYE

SEQ ID NO: 99860 - DNA, 504 bp, uncultured bacterium 463
  CDS (1)..(504): transl_table=11
atgagtgaagcaaactccatgaacctgatatctgccctgagccaggaagagctacaggccattgatgcagagatcgcgcatgtgccttatcgggatgcagtggccatagacgcactaaaaattgtacaggcgcatcgtggctgggtatcggatgagagcctgagcgcaatcgcagcacacctgcacatgtcggccgatgagctggatggaattgccacgttttacaacctcatttaccgccgcccggtgggcgacaaggtcattctgctttgcaacagtatcagctgctggataaaaggttgcgataacttacagcagcgtattaccgaggaactgggtgtcgagttaggagagaccaccagtgacaatcgctataccctgctgcctgtgacctgcctgggtgcttgcgacaaagcgcccgtaatgatggttggcgatgagctgcatgaagacctctgtgaagaaagcatcataagaattttgggagggagcaccacgccatga

SEQ ID NO: 99861 - protein, 167 aa, uncultured bacterium 463
MSEANSMNLISALSQEELQAIDAEIAHVPYRDAVAIDALKIVQAHRGWVSDESLSAIAAHLHMSADELDGIATFYNLIYRRPVGDKVILLCNSISCWIKGCDNLQQRITEELGVELGETTSDNRYTLLPVTCLGACDKAPVMMVGDELHEDLCEESIIRILGGSTTP

SEQ ID NO: 99862 - DNA, 1465 bp, Chlamydomonas reinhardtii
  CDS (84)..(932)
gtagtctaggtgcataggggcttgcaagagcttgactagtgccggccaaggcgactcaggagaggcaccaatttcgcgacaaaatgctgtctagggccctgctcctcgcagggcgcctcgccgcgactggccagcagcaggcagctagcacctcgtctcgcgctgtccagccgctaggctcgctgctgcagcggtgcaactttgccaccaactcgaccgatatcttcaacattcacaaggacacgccagagaacaatgctgcgaccagctttgagtttagcgaggctactctgaaagttgtcaacgatatcatcgcgcggtacccgccgaactacaagcagagcgccatcattccggtgctggacgtcacgcagcaggagaacggcgggtggctgagcctcgcggccatgaaccgtgtggctaagctgctggacatggcgcccatccgcgtgtatgaagtggccaccttctacaccatgttcaaccgcacgaaaattggcaagtaccacgtgcagatttgcggcaccactccttgcaggctgcagggctcccagaagattgaggaggccatcaccaagcacctcggcatcggcatcggccagaccacgcaggacgggctgttcacactgggcgagatggagtgcatgggcgcttgcgtgaacgcgcccatggtggccatcgccgactacaccaagggtgtgtcgggctttgagtacatctactacgaggacctgacgcccaaggacattgtcaacatcctggacaccatcaagaagggaggcaagcccaagcctgggtctcagtaccgcttgaaggcggagcccgccggcgccgtgcacggcggcgagaagtgggtgcccaaggacggcgagaccacgctgacgggggcaccccgcgcgccctactgccgtgacctgaacgccaccgcgtaatcggccgtgctcgtggcggtggaagatatggcaagcgtgcgggcgtgctgtgggatgcagcgtgtctggaacggcggagggcgggccaaaatggtccatggtgtgggtgtggaggtcgtggtggcggtatgcgacggcagctcttacggatggcagggtgcgctgggcgctcaggtgccacattggcggagtgccgcaggaggtgtggctcttgcagaagggcagtggcttatgtctgactagaatttagcttagaatggacttgaggggtatgtgtgaggagcttttacgtatgtgtggggctttatgtggatacgtgcgtggacgcaagcaggaagaacatgtgactagctttgtacgggcatgccggcgcagggttgccgccttgcaggaaaagcttcgactttgtacgggcatggcggcgcagggctgacgccttgcagaaaaagcttcgacttgaatggaggccacacgatttcctttccgctctggtctacgtacgcattagttccgcaacgcacgtcgacaaaaaa

SEQ ID NO: 99863 - protein, 282 aa, Chlamydomonas reinhardtii
MLSRALLLAGRLAATGQQQAASTSSRAVQPLGSLLQRCNFATNSTDIFNIHKDTPENNAATSFEFSEATLKVVNDIIARYPPNYKQSAIIPVLDVTQQENGGWLSLAAMNRVAKLLDMAPIRVYEVATFYTMFNRTKIGKYHVQICGTTPCRLQGSQKIEEAITKHLGIGIGQTTQDGLFTLGEMECMGACVNAPMVAIADYTKGVSGFEYIYYEDLTPKDIVNILDTIKKGGKPKPGSQYRLKAEPAGAVHGGEKWVPKDGETTLTGAPRAPYCRDLNATA

SEQ ID NO: 99864 - DNA, 474 bp, Eubacterium acidaminophilum
  CDS (1)..(474): transl_table=11
atggcgaaaaatgttttcacagaagagaatttcaaaaaactagaccaagtaatagctgagtacaagggaaagccgggcgctttaatgccggttcttcacgaagctcagaaaatatttggctgcgtagctcttgaagttcaaaagaaaatatctgaaggtcttaacatacctttggcagaaatctatggagttgcaacattctattctcagttttcattagagccaaagggagactatgtagttggagtttgccttggaactgcatgttatgtaaaaggctctcagtcaataattgacagggtttgcaaggatcttgaccttgaagtaggaaagacttctgctgatggcaagttcacagtagttgccacaagatgcgttggagcatgcggactggcgcctgttatgacaataaacgaagatgtatacggcaagatagttgcagatgatgttcctggaatacttgcaaaatattaa

SEQ ID NO: 99865 - protein, 157 aa, Eubacterium acidaminophilum
MAKNVFTEENFKKLDQVIAEYKGKPGALMPVLHEAQKIFGCVALEVQKKISEGLNIPLAEIYGVATFYSQFSLEPKGDYVVGVCLGTACYVKGSQSIIDRVCKDLDLEVGKTSADGKFTVVATRCVGACGLAPVMTINEDVYGKIVADDVPGILAKY

SEQ ID NO: 99866 - DNA, 501 bp, Pseudomonas fluorescens
  CDS (1)..(501): transl_table=11
atgcatgaacagcacgcttatccagacagaccgtttcgcctgagcgaaaccgagcgctcggccatcgagcacgagctgcatcactacgaagacccgcgcgcggcgtcgatcgaagccctgaagatcgtccagaaggaacgtggctgggtgcctgacggcgcgctctacgccatcggcgagatcctcggcatcccggccagcgacgtcgaaggcgtggccaccttctatagccagattttccgccagccagtaggccgtcacatcattcgtgtctgcgacagcatggtctgctacatcggtggccacgaatcggtggtcggcgagatccagaacaagctgggcatcggtctgggccagaccaccgccgacggtcgtttcaccctgctgccagtgtgctgcctgggtaactgcgacaaggcgccagcgctgatgatcgacgacgacaccttcggtgacgtccagcctgacggcgtcgccaaactgctggagggctacgtatga

SEQ ID NO: 99867 - protein, 166 aa, Pseudomonas fluorescens
MHEQHAYPDRPFRLSETERSAIEHELHHYEDPRAASIEALKIVQKERGWVPDGALYAIGEILGIPASDVEGVATFYSQIFRQPVGRHIIRVCDSMVCYIGGHESVVGEIQNKLGIGLGQTTADGRFTLLPVCCLGNCDKAPALMIDDDTFGDVQPDGVAKLLEGYV

SEQ ID NO: 99868 - DNA, 768 bp, Arabidopsis thaliana
  CDS (1)..(768)
atgctggctaggctcgctgcgaagcgtcttctcgagatccgtcaagttttccgtcaaccaacctctcaggtgactcgtagcttatcgacggccttaaactaccatctggattctcctgataacaaacccgatcttccatgggagttttcagaggctaaccaatctaaggttaaggagattctctcttactatccatccaattacaagcagtccgcagttattcctctcctagatcttgcacaacagcagaatggaggctggctccctgtttcagcaatgaatgcggttgctaaagttatagaagttgcccctatccgtgtttatgaggttgcaacattttactcaatgttcaacagagcaaaggttggaaagtatcaccttctagtttgtggcacaacaccttgcatgatccgtggttcacgagacatcgaatcagctttgctagaccatttgggagtgaaacgcggtgaggtcacaaaggatggtttgttctctgttggagagatggagtgcatgggatgttgtgttaatgcacccatgatcactgtggctgactattccaatggatcagaaggatatacatataactatttcgaagatgttacacctgagaaagtcgtagaaattgttgaaaagctgagaaaaggagaaaagccaccgcatggaactcagaacccgaagaggatcaagtgtggaccagaaggagggaataagacactgcttggtgagcctaagccaccacaattccgtgatcttgatgcatgctaa

SEQ ID NO: 99869 - protein, 255 aa, Arabidopsis thaliana
MLARLAAKRLLEIRQVFRQPTSQVTRSLSTALNYHLDSPDNKPDLPWEFSEANQSKVKEILSYYPSNYKQSAVIPLLDLAQQQNGGWLPVSAMNAVAKVIEVAPIRVYEVATFYSMFNRAKVGKYHLLVCGTTPCMIRGSRDIESALLDHLGVKRGEVTKDGLFSVGEMECMGCCVNAPMITVADYSNGSEGYTYNYFEDVTPEKVVEIVEKLRKGEKPPHGTQNPKRIKCGPEGGNKTLLGEPKPPQFRDLDAC

SEQ ID NO: 99870 - DNA, 1055 bp, Neurospora crassa
  CDS (96)..(887)
gaacgtaagctctacgaaaagctccaacctctcgaacgagtaatcgcaagtcgccaattcgggcctcatcgccaccgttcgcgtatcaagcagccatggcgaccaagctaactcccttcctcatgcggacggccgtccgggcggcgacccggctgtccaccaagccttcgacaattgcgcccgtctcccgcgcatgcctctccatttcggcgcggaggcccagcgacaccctcatggtgcaccgcaacacccccgacaacaaccccgacatccccttcaagttctcggccgacaatgaaaaggtcatcgaagagattatcaagcgctacccgccgcagtacaagaaggcggccgttatgcccctgctcgatcttggccagcgccagcacggtttctgcagcatcagcgtcatgaatgaggtggcccgtctgcttgagatgccgcccatgcgcgtctacgaggtcgcctctttttacaccatgtacaaccgcaccccggttggcaagttccacgttcaggcttgcactaccaccccttgccaactaggtggctgcggctccgacgtgatcgtcaaggccatcaaggagcatcttggcatcaagcaaggcgagaccactcccgacggccttttcacttttatcgaggttgagtgcctgggcgcgtgcgccaacgcgcccatggtccagatcaacgatgactactttgaagatttgaccccggagaccattaagcaggtgttgtcggcgctcaaggagagcgtcacggatgtgtccaaggcgcctcagccgggcccacagagcgggagacagacgtgtgagaacgccgccggcctaacaagtttgacgagcgagccatacggaccggaggtcacgcgatcggatctttaaatccaggggcttaatattgggttaagtgagcggttatggggcagaggtggaattacgattgacagaaactgtcacatagacaggacatggaccaacaggacagtgatgacagcaaatgcattagaccggagatgtattaatttccctcaggttatacggtacaatatc

SEQ ID NO: 99871 - protein, 263 aa, Neurospora crassa
MATKLTPFLMRTAVRAATRLSTKPSTIAPVSRACLSISARRPSDTLMVHRNTPDNNPDIPFKFSADNEKVIEEIIKRYPPQYKKAAVMPLLDLGQRQHGFCSISVMNEVARLLEMPPMRVYEVASFYTMYNRTPVGKFHVQACTTTPCQLGGCGSDVIVKAIKEHLGIKQGETTPDGLFTFIEVECLGACANAPMVQINDDYFEDLTPETIKQVLSALKESVTDVSKAPQPGPQSGRQTCENAAGLTSLTSEPYGPEVTRSDL

SEQ ID NO: 99872 - DNA, 720 bp, Paracoccus denitrificans
  CDS (1)..(720): transl_table=11
atgctgcgccgtctgtcccccatccagccggactccttcgagttcacgcccgccaacctcgaatgggcccgtgcccagatgaccaaatacccggaaggccgccagcaatcggcgatcatcccggtcctgtggcgcgcgcaggaacaagagggctggctgagccgccccgccatcgaatattgtgccgaccttctgggcatgccctatatccgggcgctggaggtcgcgaccttctatttcatgttccagctgcagccggtcggctcggtcgcgcatatccagatctgcggcaccacgacctgcatgatctgcggcgccgaggatctgatccgggtctgcaaggaaaagatcgcgcccgagccgcatgcgctgtcggcggacggccggttcagctgggaagaggtcgaatgccttggcgcctgcaccaacgcgcccatggcccagatcggcaaggatttctacgaggacctgacggtcgagaagctcgcggcgctgatcgaccgctttgcggcgggcgaggttccggtgccgggtccgcagaacggccggttctctgccgaggccctgggcggcccgacggcgctggccgatctgaagggcggcgaggcgcataacgccagcgtggcgcgcgccctgcggctgggcgactcgatcaagcgcatcgacggcaccgaggtgccgatcacgacgccttggcttgccacgcagaacggcgtctaa

SEQ ID NO: 99873 - protein, 239 aa, Paracoccus denitrificans
MLRRLSPIQPDSFEFTPANLEWARAQMTKYPEGRQQSAIIPVLWRAQEQEGWLSRPAIEYCADLLGMPYIRALEVATFYFMFQLQPVGSVAHIQICGTTTCMICGAEDLIRVCKEKIAPEPHALSADGRFSWEEVECLGACTNAPMAQIGKDFYEDLTVEKLAALIDRFAAGEVPVPGPQNGRFSAEALGGPTALADLKGGEAHNASVARALRLGDSIKRIDGTEVPITTPWLATQNGV

SEQ ID NO: 99874 - DNA, 507 bp, Rhizobium meliloti
  CDS (1)..(507): transl_table=11
atgacgatgcgcgaagagatcgaggcggcggcggcacgataccccgaccggcggtcggcgatcatgcccgcgctcatgatcgcgcagaaggagcatggtcatctgcccggcccggttctcgaagaggtcgcccaaatcctcggcgtcgagcgcgtttgggtctatgaactggcgaccttctacacgctcttccataccgaaccgatcggcaggttccacctgcaactctgcgacaacgtctcctgcatgctgtgcggatccgaggcgctgctgacgcatctggaaacgacactggggatcaggaagggcgagaccacgccggacggtgcgttcacgctttcgaccgtcgaatgtctcggggcctgcgaaatggctccggttatgcaggtcggcgacgattaccacggcaaccttgatgccgcgcggctcgatgcgctgctggagagcttccgcgcggcggagcgggtgacgagcgtcgagcgcgctgctgcggcgccaggagagtaa

SEQ ID NO: 99875 - protein, 168 aa, Rhizobium meliloti
MTMREEIEAAAARYPDRRSAIMPALMIAQKEHGHLPGPVLEEVAQILGVERVWVYELATFYTLFHTEPIGRFHLQLCDNVSCMLCGSEALLTHLETTLGIRKGETTPDGAFTLSTVECLGACEMAPVMQVGDDYHGNLDAARLDALLESFRAAERVTSVERAAAAPGE

SEQ ID NO: 99876 - DNA, 483 bp, Aquifex aeolicus
  CDS (1)..(483): transl_table=11
atgtttaaaacggagtttgaatttcccgaagagctgaaaactaagctccaggaacacataaattactttcccaaaaagagacaggctatacttctgtgtcttcacgaaatacaaaattactacggatacatacctcccgagagcctaaagcccttggcggacatgctggaacttcccctaaaccacgtggaaggagttgttgccttttacgatatgtttgacagggaggacaaggcaaagtacaggataagggtttgcgtgagcatagtgtgccaccttatgggaacgaataaacttttgaaagctcttgagaatatcctcggtataaaaccaggggaagttacccccgacggtaagtttaagatagttcccgttcagtgtctgggagcttgctcggaagctcccgtgtttatggtaaacgatgatgagtataaatttgaaagcgaggtgcagttaaatgagatcctatcccgctatacctag

SEQ ID NO: 99877 - protein, 160 aa, Aquifex aeolicus
MFKTEFEFPEELKTKLQEHINYFPKKRQAILLCLHEIQNYYGYIPPESLKPLADMLELPLNHVEGVVAFYDMFDREDKAKYRIRVCVSIVCHLMGTNKLLKALENILGIKPGEVTPDGKFKIVPVQCLGACSEAPVFMVNDDEYKFESEVQLNEILSRYT

SEQ ID NO: 99878 - DNA, 489 bp, Buchnera aphidicola subsp
  CDS (1)..(489)
atgcaagaaatttctataaaatttaaattaactaatgaagaaataaatgcaatagaaaatcaaaaaaaatactatgaagattttcgtgctatttctatagaagcgttaaaaattgttcaaaaaaaacgaggttgggtttctgatcaagctatttatgctattgcagaaattctgcatattaaccccagtgatgttgaaggagtcgctactttttatagtcaaatttttcgtaaacctgtgggtcgtaatattattcgttattgtgatagtgtagtttgttttttgacaggttataaaaggattcaaatagctctagaaaattatttaaaaataaagataggagaaacaactaaagacgatagatttactttattaccagtttgttgtttaggaaattgtgataaaggtccaaccatcatgattaatgaagatacatattctgttttaactccagaatccataccaagtttactggaatcatataaatga

SEQ ID NO: 99879 - protein, 162 aa, Buchnera aphidicola subsp
MQEISIKFKLTNEEINAIENQKKYYEDFRAISIEALKIVQKKRGWVSDQAIYAIAEILHINPSDVEGVATFYSQIFRKPVGRNIIRYCDSVVCFLTGYKRIQIALENYLKIKIGETTKDDRFTLLPVCCLGNCDKGPTIMINEDTYSVLTPESIPSLLESYK

SEQ ID NO: 99880 - DNA, 501 bp, Pseudomonas aeruginosa
  CDS (1)..(501): transl_table=11
atgagccagagcaacctgattcagaccgaccgtttcgtcctcagcgaaaccgagcgctcgtccatcgagcatgaaatgcatcactacgaggacccgcgcgcggcgtccatcgaagccctgaagatcgtccagaaacagcgcggctgggtgccggacggcgccatcccggcgatcggcgaggtgctggggatcccggccagcgacgtcgaaggcgtcgccaccttctatagtcagatattccgccagccggtgggccgccacatcatccgcgtctgcgacagcatggtctgctacatcggcggccacgagtcggtggtcggcgagatccagaagcaactcggcatcggtctcggccagactaccgccgacggacgcttcaccctgctcccggtctgctgcctgggcaactgcgacaaggccccggcgctgatgatcgacgacgacacccatggcgacgtgcgtcccgacggtgtcgccaaactgctggaggcctacgtatga

SEQ ID NO: 99881 - protein, 166 aa, Pseudomonas aeruginosa
MSQSNLIQTDRFVLSETERSSIEHEMHHYEDPRAASIEALKIVQKQRGWVPDGAIPAIGEVLGIPASDVEGVATFYSQIFRQPVGRHIIRVCDSMVCYIGGHESVVGEIQKQLGIGLGQTTADGRFTLLPVCCLGNCDKAPALMIDDDTHGDVRPDGVAKLLEAYV

SEQ ID NO: 99882 - DNA, 504 bp, Rickettsia felis
  CDS (1)..(504): transl_table=11
atgagtacaaattttacatttgataagaaaaatttaaatctagcagaagatattatcaaaaaatatccaccgcatggaaaaagaagtgctatattgccgctgcttgatttagcacaacgtcaaaatggcggttggctacccgtgcctgctatcgagtatgtcgcaaatatgctagaaatgccttatatgcgggcttatgaggttgcaactttttatagcatgttcaacttaaagcgagttggtaaatatcatattcaagtatgtactactaccccttgctggctgcatggtagtgatgatatcatgaaaatttgtgaaaagaaattaggtataaaactcaaagaaaccactgaagatcaaaaatttactttaagtgagatagaatgtttaggagcatgcgttaacgctccggtcgtacaaatcaatgatgattattatgaagatctaactgaagaaaaaatggaaaaactaatagatgagtactcaaatgattttaagaattga

SEQ ID NO: 99883 - protein, 167 aa, Rickettsia felis
MSTNFTFDKKNLNLAEDIIKKYPPHGKRSAILPLLDLAQRQNGGWLPVPAIEYVANMLEMPYMRAYEVATFYSMFNLKRVGKYHIQVCTTTPCWLHGSDDIMKICEKKLGIKLKETTEDQKFTLSEIECLGACVNAPVVQINDDYYEDLTEEKMEKLIDEYSNDFKN

SEQ ID NO: 99884 - DNA, 825 bp, Oryza sativa
  CDS (1)..(825)
atgctgccgccggccgcccgcctcgcggcccgccgcctcctagggctcgcgacctcctccgcctcggaatcggccgcggcgcgacgcttgtcccgttctccgatctcctacgccgccgcgggctgctcctccaggctgttctccacggcgcttaactaccacctcgattcgccggaaaacaaccccgacatgccgtgggagttcacggaggccaacatgaagaaggttaatgagatattgtctcactatccaagcaactacaagcagtctggtattattccaatgcttgatcttgcccagcagcagcatggtggatgggtgccagttgcagcaatgaatgctattgctaagatcgttgaagttgcaccaatcagagtatatgaagttgctacattttacacaatgtttaaccggactaaggtgggtaaatatcaccttttggtgtgtggaaccacaccttgcatgattcgtggttcacgtgaaattgaagaagccttgttagaacatcttggagttaaacggaatgaggtgaccagtgatggtttattttctgttggagaaatggagtgcatgggctgctgtgtgaatgctcccatgattgctgtggccgattattctaaaggttcagagggttacacatacaactattatgaggacctcactcctaaacgagttgttgagatcgtcgagatgctgaaaagaggagaaacccctcctcgcggcacacaacacccagagcggaaaaactgtggccctgctggagggaataccaccttgcacggtgagccgaaacctcctccgtgcagggatctagatgcttgctag

SEQ ID NO: 99885 - protein, 274 aa, Oryza sativa
MLPPAARLAARRLLGLATSSASESAAARRLSRSPISYAAAGCSSRLFSTALNYHLDSPENNPDMPWEFTEANMKKVNEILSHYPSNYKQSGIIPMLDLAQQQHGGWVPVAAMNAIAKIVEVAPIRVYEVATFYTMFNRTKVGKYHLLVCGTTPCMIRGSREIEEALLEHLGVKRNEVTSDGLFSVGEMECMGCCVNAPMIAVADYSKGSEGYTYNYYEDLTPKRVVEIVEMLKRGETPPRGTQHPERKNCGPAGGNTTLHGEPKPPPCRDLDAC

SEQ ID NO: 99886 - DNA, 768 bp, Brassica napus
  CDS (1)..(768)
atgttgggtaggctcgctgcgaagcgtcttctcgagatccgtcaagttttccgtcaagcaccctctcaggcgtctcgtagcttttcaacagccttaaactaccacctggattctcctgataacaaaccggatcttccatgggagttttctgaggccaacaaatccaaggttaaggagatactctcttactacccatcaaactacaagcagtctgctgtgattcctcttcttgatcttgcccaacaacagcatggaggctggctccctgtttcagcaatgaatgcggttgctaaagttatagaagttgctcctatccgtgtttatgaggttgcaaccttctactcaatgttcaacagggcaaaggtcggaaagtaccacctgctagtttgtggcacaacaccttgcatgatccgtggttcacgagagatcgaatcagctttgctagaccatttgggagtgaagcgcggtgaagtcacaaaggatggtttgttctctgttggagagatggaatgcatgggatgctgtgtgaatgcgcccatgatcactgtggcagattattccaatggatcagaaggatatacatataactatttcgaagatgttacacctgagaaagttgtagagatcgttgaaaagctgagaaaaggagaaaagccaccgcatggaactcaaaacccgaagaggatcaagtgcggacctgaaggaggaaacaagacactgctaggcgaaccaaagccaccacagttccgtgatcttgacgcttgctaa

SEQ ID NO: 99887 - protein, 255 aa, Brassica napus
MLGRLAAKRLLEIRQVFRQAPSQASRSFSTALNYHLDSPDNKPDLPWEFSEANKSKVKEILSYYPSNYKQSAVIPLLDLAQQQHGGWLPVSAMNAVAKVIEVAPIRVYEVATFYSMFNRAKVGKYHLLVCGTTPCMIRGSREIESALLDHLGVKRGEVTKDGLFSVGEMECMGCCVNAPMITVADYSNGSEGYTYNYFEDVTPEKVVEIVEKLRKGEKPPHGTQNPKRIKCGPEGGNKTLLGEPKPPQFRDLDAC

SEQ ID NO: 99888 - DNA, 768 bp, Brassica napus
  CDS (1)..(768)
atgctggctagactcgctgcgaagcgtctcctcgagatccgccaagctttccgtcaagcaccatctcaggcgtctcgtagcttctcaacagccttaaactaccacctggattctcctgacaacaaaccggatcttccatgggagttttctgaggctaacaaatccaaggttaaggagatactctcttactatccatcaaactacaagcagtctgcggtgattccccttcttgatcttgcccaacaacagcatggaggctggctccctgtttcagctatgaatgcggttgctaaagttatagaagttgctcctattcgtgtttatgaggttgcaactttttactccatgttcaacagggcaaaggtcggaaagtaccacctgctagtttgtggcacaacaccttgcatgatccgtggctcacgagagatcgaatcagctttgctagaccatttgggagtgaagcgcggcgaagtcacaaaggatggtttgttctctgttggagagatggaatgcatgggatgctgtgttaatgcgccaatgatcactgtggcagattattccaatggatcagaaggatatacctacaactacttcgaagatgttacacctgagaaagttgtagagatcgttgaaaagctgagaaaaggagaaaagccaccgcatggaactcaaaacccgaagaggatcaagtgcggacctgaaggtggaaacaagacactgctaggcgaaccaaagccaccacaattccgtgatcttgacgcttgctaa

SEQ ID NO: 99889 - protein, 255 aa, Brassica napus
MLARLAAKRLLEIRQAFRQAPSQASRSFSTALNYHLDSPDNKPDLPWEFSEANKSKVKEILSYYPSNYKQSAVIPLLDLAQQQHGGWLPVSAMNAVAKVIEVAPIRVYEVATFYSMFNRAKVGKYHLLVCGTTPCMIRGSREIESALLDHLGVKRGEVTKDGLFSVGEMECMGCCVNAPMITVADYSNGSEGYTYNYFEDVTPEKVVEIVEKLRKGEKPPHGTQNPKRIKCGPEGGNKTLLGEPKPPQFRDLDAC

SEQ ID NO: 99890 - DNA, 756 bp, Glycine max
  CDS (1)..(756)
atgctggcacgcctcgccgcgagtcgcttcaacgagatccgtcagattttccgtcagccttctagggctttctcaaccgctctgaactaccaccttgacacaccggacaacaaccctaaacttccatgggaattcaccgaggccaatcaagcaaaggttaaggagattttgtctcactatccatccaactataagcaatctgctacaattcctcttttggatcttgcccagcagcagcatggtggctggctccctgtttctgcaatggatgcggtagctaagattgtagaggttcctcccatacgggtctatgaggttgccacattttactccatgttcaatcgagctaaggttgggaagtaccatctgttggtttgtggaacaacaccttgtatgataagaggttcacgaggaattgaagaagccttattgaaacacttgggagtgaagcgcaatgaagtaacaccagatggtttgttttctgttggagaaatggaatgcatgggatgctgtgtgaatgctcctatgattacagtggctgattattcaaatggatcagagggatatacttataattactttgaagatgtaaccccagagaaagtagttgagatagtagaaaagctgagaaagggtgagaagccaccgcacggcacccaaaatccccgccgaattaagagtggacctgaaggagggaacactactttgttaagtgagcccaagcctcctccctgccgtgacctggattcctgctga

SEQ ID NO: 99891 - protein, 251 aa, Glycine max
MLARLAASRFNEIRQIFRQPSRAFSTALNYHLDTPDNNPKLPWEFTEANQAKVKEILSHYPSNYKQSATIPLLDLAQQQHGGWLPVSAMDAVAKIVEVPPIRVYEVATFYSMFNRAKVGKYHLLVCGTTPCMIRGSRGIEEALLKHLGVKRNEVTPDGLFSVGEMECMGCCVNAPMITVADYSNGSEGYTYNYFEDVTPEKVVEIVEKLRKGEKPPHGTQNPRRIKSGPEGGNTTLLSEPKPPPCRDLDSC

SEQ ID NO: 99892 - DNA, 846 bp, Zea mays
  CDS (1)..(846)
atgctgccaccggccgcgcgccttgcggcccgccgcctcctcggcctcgcctccgcatctgcgtcggaagccgccggccgccgggtagcttcctctccgatcgcttccgcaggctactccgccgccgcgtccaggggctccgtctccagcaccaggcccttctccacggctcttaactaccaccttgattccccggagaacaagccggacatgaaatgggagttctcacaggcgaatatgaagaaggtcaatgagattctgtctcactatccaagcaactacaagcaatctggtattattccgctgcttgatcttgcacagcagcagcatggtggatgggtgccagttgcagcaatggatgctattgctaaaatcgtcgaagttgcaccaatcagggtttatgaagttgcaaccttttataccatgtttaacaggactaaggttggtaaataccaccttctggtgtgtggaactacaccttgtatgattcgtggttcacgtgaaatcgaagagacgttgttggagcaccttggagttaaacgaaatgaggtgaccagtgatggtttattttctgttggagaaatggagtgcatgggttgctgtgtgaatgctcctatgattgctgtggctgactactcgaaaggctcagagggttacacatataactactatgaggacctcactccaaaacgagttgttgagattgttgagatgcttagaagaggtgaaacaccccctcgaggtacacagcacccagagcgaaaaaactgtggccctgccggggggaacaccaccttgcagggagagccgaaacctcctccatgcagggatctggatgcctgctag

SEQ ID NO: 99893 - protein, 281 aa, Zea mays
MLPPAARLAARRLLGLASASASEAAGRRVASSPIASAGYSAAASRGSVSSTRPFSTALNYHLDSPENKPDMKWEFSQANMKKVNEILSHYPSNYKQSGIIPLLDLAQQQHGGWVPVAAMDAIAKIVEVAPIRVYEVATFYTMFNRTKVGKYHLLVCGTTPCMIRGSREIEETLLEHLGVKRNEVTSDGLFSVGEMECMGCCVNAPMIAVADYSKGSEGYTYNYYEDLTPKRVVEIVEMLRRGETPPRGTQHPERKNCGPAGGNTTLQGEPKPPPCRDLDAC

SEQ ID NO: 99894 - DNA, 24 bp, Artificial sequence
  primer
atgcacgagaatcaacaaccacaa

SEQ ID NO: 99895 - DNA, 26 bp, Artificial sequence
  primer
ttatttataccgctccagcagttcag

SEQ ID NO: 99896 - protein, 123 aa, Artificial sequence
  consensus sequence
  Variant (2)..(5): Xaa in position 2 to 5 is any amino acid
  Variant (7)..(9): Xaa in position 7 to 9 is any amino acid
  Variant (11)..(13): Xaa in position 11 to 13 is any amino acid
  Variant (14)..(22): Xaa in position 14 to 22 is any or no amino acid
  Variant (24)..(33): Xaa in position 24 to 33 is any amino acid
  Variant (35)..(36): Xaa in position 35 to 36 is any amino acid
  Variant (38)..(46): Xaa in position 38 to 46 is any amino acid
  Variant (47)..(48): Xaa in position 47 to 48 is any or no amino acid
  Variant (54)..(59): Xaa in position 54 to 59 is any amino acid
  Variant (61)..(61): Xaa in position 61 is any amino acid
  Variant (63)..(68): Xaa in position 63 to 68 is any amino acid
  Variant (69)..(69): Xaa in position 69 is any or no amino acid
  Variant (71)..(74): Xaa in position 71 to 74 is any amino acid
  Variant (76)..(78): Xaa in position 76 to 78 is any amino acid
  Variant (80)..(90): Xaa in position 80 to 90 is any amino acid
  Variant (91)..(93): Xaa in position 91 to 93 is any or no amino acid
  Variant (95)..(100): Xaa in position 95 to 100 is any amino acid
  Variant (101)..(101): Xaa in position 101 is any or no amino acid
  Variant (103)..(103): Xaa in position 103 is any amino acid
  Variant (105)..(112): Xaa in position 105 to 112 is any amino acid
  Variant (113)..(114): Xaa in position 113 to 114 is any or no amino acid
  Variant (116)..(116): Xaa in position 116 is any amino acid
  Variant (118)..(118): Xaa in position 118 is any amino acid
  Variant (120)..(121): Xaa in position 120 to 121 is any amino acid
AXXXXLXXXQXXXXXXXXXXXXGXXXXXXXXXXAXXLXXXXXXXXXXXVATFYXXXXXXPXGXXXXXXXCXXXXCXXXGXXXXXXXXXXXXXXLXXXXXXXTXDXXXXXXXXXXCXGXCXXAP

SEQ ID NO: 99897 - protein, 19 aa, Artificial sequence
  protein pattern
  Variant (2)..(2): Xaa in position 2 is Ala, Gly, Asn, Gln or Thr
  Variant (3)..(10): Xaa in position 3 to 10 is any amino acid
  Variant (12)..(12): Xaa in position 12 is Ile, Leu, Met or Val
  Variant (14)..(14): Xaa in position 14 is any amino acid
  Variant (16)..(17): Xaa in position 16 to 17 is any amino acid
  Variant (18)..(18): Xaa in position 18 is Ala, Gly or Ser
DXXXXXXXXXCXGXCXXXP

SEQ ID NO: 99898 - DNA, 999 bp, Escherichia coli
  CDS (1)..(999): transl_table=11
atgtctgcttcgtcattaccattgccgcagggcaagagcgtctcgctcaaacaatttgtcagtcgccatattaatgagatcggtttgctggtggtgattgccattctttatctggtcttctccctgaacgcgcctggctttatctcattgaataaccagatgaacgtgctgcgcgatgccgccaccattgggattgccgcctgggcgatgacgctgattattatctccggtgaaattgatgtcagcgttgggccgatggtggcttttgtctcggtgtgcctggcatttttgctgcaatttgaagttccgctggcggtggcgtgcctgctggtgttgctgttaggcgcgctgatgggaacgctggccggggtgctgcgcggcgtgtttaatgtaccaagtttcgttgccacactggggctgtggagcgccctgcgcggaatggggctgtttatgacgaacgcactgccagtgccgattgatgaaaacgaggtgctggactggctgggcggacaatttctcggtgtgccggtatccgcgctgatcatgattgtgttgtttgcgctgtttgtgttcatcagccgcaaaaccgccttcgggcgctcggtttttgccgttggcggtaatgctacggcggcgcagttgtgcggcatcaacgttcgtcgggtgcgcattcttatctttaccctttcgggattattagcggcggtgaccggcattttgttggcggcgcgcctcggttctggtaacgcaggtgccgcaaacggtctggagtttgacgtcatcgccgcggtcgtggtcggcggtacggcactttccggcggtcgcggttccctgttcggtacattgcttggtgtgctggtgattacgctaatcggtaacggtctggtgctgctcggtattaactcctttttccagcaggtggtacgcggcgtcatcatcgtggtggcggtgctggcgaatatcttgctgacccagcgaagcagtaaagcgaaacgctaa

SEQ ID NO: 99899 - protein, 332 aa, Escherichia coli
MSASSLPLPQGKSVSLKQFVSRHINEIGLLVVIAILYLVFSLNAPGFISLNNQMNVLRDAATIGIAAWAMTLIIISGEIDVSVGPMVAFVSVCLAFLLQFEVPLAVACLLVLLLGALMGTLAGVLRGVFNVPSFVATLGLWSALRGMGLFMTNALPVPIDENEVLDWLGGQFLGVPVSALIMIVLFALFVFISRKTAFGRSVFAVGGNATAAQLCGINVRRVRILIFTLSGLLAAVTGILLAARLGSGNAGAANGLEFDVIAAVVVGGTALSGGRGSLFGTLLGVLVITLIGNGLVLLGINSFFQQVVRGVIIVVAVLANILLTQRSSKAKR

SEQ ID NO: 99900 - DNA, 1083 bp, Agrobacterium tumefaciens
  CDS (1)..(1083): transl_table=11
atgcgtgaattgctattgcggcctgaattcacagccgttggcgctgcaattgtggtgatcaccgtattcagcatcatgtcgccgttgtttctgacaatccctacgttggcgtcggtcagcagcgttgcagccgaattgggtatcgttagcatcggcatgacaatccttttgattgcaggccactttgacctctcggtcggagcgattctaggattgacttctttttttgtcgtcacgctcatgaacaattttggactgtcaccggtctttgcaattttcttcgccatcgccggcgcatgcgctctcggtctcgtcaatggcctgctccagacgaagactggcatccattccttcatcatcacgttgggaacgtcgctcgtctacaggggcatgcttctcgcgttcactgggggctttccaaagtcagttgatatgcctcgtgaagtgtccaatgtgattgccggcccgatattgtttggcgggatgaggatgtcgctcgtctggtttatcctgatcaccgttctcgcgacgatcctcttgcttagaacgcgccttggcaactggatacaagctgttggtcagaatgcgaaggccgcccataatctaggggtcaatgtaaacaggacgaccatccttgcttttacgctctccgggggtcttgcagggattgtcggcgtcatgcaggccgcgagattcgccagtgtcgatgccatgcgtgggacagggattgaacttcaggcggttgcggtttccgttatcggaggaacgctcctgtccggggggtatggttctgcaatcggagccatgatgggcgcaatcgtgcttgcatccatccagaccggccttgtgctcgtttctgcgccgggatttctttacacgacgatcatgggtgtgattgtcgtcggcgctgttctggtcaacaactggttcagtacgctcatatcgcgcattgctccaatgacagtggaagaaccggaaggagacgcgaggcagcttataccgccattgcagctcataccccctggtgcgatcgagagcgaagcttccgttacatcgcaggtgaagcaggaggcgcagaaatga

SEQ ID NO: 99901 - protein, 360 aa, Agrobacterium tumefaciens
MRELLLRPEFTAVGAAIVVITVFSIMSPLFLTIPTLASVSSVAAELGIVSIGMTILLIAGHFDLSVGAILGLTSFFVVTLMNNFGLSPVFAIFFAIAGACALGLVNGLLQTKTGIHSFIITLGTSLVYRGMLLAFTGGFPKSVDMPREVSNVIAGPILFGGMRMSLVWFILITVLATILLLRTRLGNWIQAVGQNAKAAHNLGVNVNRTTILAFTLSGGLAGIVGVMQAARFASVDAMRGTGIELQAVAVSVIGGTLLSGGYGSAIGAMMGAIVLASIQTGLVLVSAPGFLYTTIMGVIVVGAVLVNNWFSTLISRIAPMTVEEPEGDARQLIPPLQLIPPGAIESEASVTSQVKQEAQK

SEQ ID NO: 99902 - DNA, 1014 bp, Mesorhizobium loti MAFF303099
  CDS (1)..(1014): transl_table=11
atgaacgtcacctccgccggtgttggcgcctcgcagcccaaacgcgcccacaacagcacctggaaggatgtggcgacagccaatggcagcgtcgtctccatcgcgctgttcttcatcgtcgtctgcgtggtcttctcgctggtcaccggttccttcctgacgacgcccaatctgctcaacatcgtgcgccaatcagcgccgctgctgatcgttgcggcggcgatgaccttcgtcatcaccaccggaggcatcgatctttcggtggggtccgtgctggcgctgacggcgacactttcggccgttgcgctgcaggccggcctgccatggccgctggtcgttgtcggcatgctggcgcttggcgcggcgatcggcgccttgcagggtttcttcatcgcctatgagcgcatcccggcctttatcgtcacgcttgccgggctctcggtcatccgcggcgtggcactgctgatcaccggcggctattcgatcccggtcgagccgacgagcttcttcgtcaacatcggcagggcctggttcctcggtgtgccggtacccgcattgctcgcccttgtcgtcctggccatcgcctatctcgccttcaaccagacgccgttcggccgctatgtgaccggcatcggggccaacgccgaggctgtgcgccgcgccggtgtcgatacgcgcttcatgacactcttcgtctatgtcctgtcgggcatggcggcagcgtcggccggtgtcattctggccgcgcggctgggctccggctcgtccaattccggccagggtttcgagctcgatgtcatcgccgccgtggtgcttggcggcaccagcctgttcggcgggcgcggtacgatcatcggcaccgtgctcggcgcattgaccgtcgcggtcatcggcaacggcctgatcctggcgcacatgtcgcccttcctgacgccgatcgtcaccggcactatcatcctcgttgccatctggctgaatttccgcctgttcaagggcgcgacgcggagccgctga

SEQ ID NO: 99903 - protein, 337 aa, Mesorhizobium loti MAFF303099
MNVTSAGVGASQPKRAHNSTWKDVATANGSVVSIALFFIVVCVVFSLVTGSFLTTPNLLNIVRQSAPLLIVAAAMTFVITTGGIDLSVGSVLALTATLSAVALQAGLPWPLVVVGMLALGAAIGALQGFFIAYERIPAFIVTLAGLSVIRGVALLITGGYSIPVEPTSFFVNIGRAWFLGVPVPALLALVVLAIAYLAFNQTPFGRYVTGIGANAEAVRRAGVDTRFMTLFVYVLSGMAAASAGVILAARLGSGSSNSGQGFELDVIAAVVLGGTSLFGGRGTIIGTVLGALTVAVIGNGLILAHMSPFLTPIVTGTIILVAIWLNFRLFKGATRSR

SEQ ID NO: 99904 - DNA, 996 bp, Thermotoga maritima MSB8
  CDS (1)..(996): transl_table=11
atgcaggtcgagagatccagagcgaagatttcgtggtatcaaaggatatctcgctatcagtcgattttcatacttcttggtcttatcgtcttgttcagttttctgtccaatcgatttctcactcttgaaaatttctggatcattctcagacaaacagctgttaacctctgtatagctgtgggtatgacgtttgtcattctcacgggaggaatagatctatctgttggttctatccttggattctcgggggctgtaaccgcaaaacttttgaagtatggtctgatactaagtgcgtttggtgtcgtgctcaagttcaatcctcttggtgcatcaataattggagtcttggctggttttgcaataggattgttcaatgggtttattatcacaagattcaatattcccccatttgtggccacactgggaacaatgacagcagttagaggattcatcatgcttctgactaaaggacatcctataacgcgattgggtgatagttttgacttcataggttctgggtggtttttagggattccaatgccagtctggatagccgctatagccacaggagtaggcatttttattctcagaaaaactcagtttggaagatatgtatatgctgttggaggtaatgaaaaagcagcagttctctctggtgtgaattcaaaactgacgaaactctgggtgtacgcgatatcgggtatcctctcggctgttgcaggtctaatagttaccgcccgtttagattcagcccagccaaatgctggtttgatgtacgagctagatgcaatagccgcaacagttattggaggagcctctctttcaggtggaaaaggaactctcataggaactgttgtaggtgcattgataattggtgttttgaacgatgggttggtactcgttggtgtttctcctttctggcaacaggttgcaaagggattcataataatagctgctgtgatagcagaaaaactcggtagaggggaaaaggagtga

SEQ ID NO: 99905 - protein, 331 aa, Thermotoga maritima MSB8
MQVERSRAKISWYQRISRYQSIFILLGLIVLFSFLSNRFLTLENFWIILRQTAVNLCIAVGMTFVILTGGIDLSVGSILGFSGAVTAKLLKYGLILSAFGVVLKFNPLGASIIGVLAGFAIGLFNGFIITRFNIPPFVATLGTMTAVRGFIMLLTKGHPITRLGDSFDFIGSGWFLGIPMPVWIAAIATGVGIFILRKTQFGRYVYAVGGNEKAAVLSGVNSKLTKLWVYAISGILSAVAGLIVTARLDSAQPNAGLMYELDAIAATVIGGASLSGGKGTLIGTVVGALIIGVLNDGLVLVGVSPFWQQVAKGFIIIAAVIAEKLGRGEKE

SEQ ID NO: 99906 - DNA, 999 bp, Vibrio cholerae O1 biovar eltor str. N16961
  CDS (1)..(999): transl_table=11
atgaaacaaggatacagcatgagtacccgaaccatgactaatacgacatctgataaccgtaaaaaactgctcagcaaagagtggttgattgaacaaaaatcgctgatcgcactgctgtttttagtggttgtcgtctctttcttaaacccgaattttttcacggttgataacttactgaatattctgcgccaaacttcggtcaacgcgatcatcgcggtgggtatgaccttggtcatcttaaccgcagggattgatttgagcgttggctcagtattagcactgtgtggcgcttttgcggccaccttagtggcgatggaagttcctgttctggtagctgtgcctacggctttgctggctggtgctgcgcttggcgcaatcagcggcatcatcattgccaaaggcaaagtgcaggcctttatcgcgacgttagtgacgatgactctgctgcgcggtgtcactatggtgtacaccgatgggcgtccgatttcgaccggattcactgatacggcggacacctttgcatggtttggtacaggctacacattgggcattccggttccggtatggctgatggtcgtggtatttgccggcgcttggtacttgctcaatcacactcgctttggccgctatgtgtatgcagtgggcggcaacgaatcagcaactcgcctttcaggtatcaacgtagatcgcgtcaaaatcggcgtgtatgccatctgtggtttactggctgcgctagcaggcatcatcgtcacatctcgcctttcttctgcgcaacctactgcgggtatgggctatgagttggatgcgattgcggctgtggtgctagggggcaccagtttgatgggcggtaaaggtcgcatcatgggcacgctgatcggcgctctcatcatcggatttttaaacaacgcattgaacttgctcgatgtttcctcctactaccaaatgattgcgaaagctgtggttattttgctggcggtcttggtagacaacaaaaaataa

SEQ ID NO: 99907 - protein, 332 aa, Vibrio cholerae O1 biovar eltor str. N16961
MKQGYSMSTRTMTNTTSDNRKKLLSKEWLIEQKSLIALLFLVVVVSFLNPNFFTVDNLLNILRQTSVNAIIAVGMTLVILTAGIDLSVGSVLALCGAFAATLVAMEVPVLVAVPTALLAGAALGAISGIIIAKGKVQAFIATLVTMTLLRGVTMVYTDGRPISTGFTDTADTFAWFGTGYTLGIPVPVWLMVVVFAGAWYLLNHTRFGRYVYAVGGNESATRLSGINVDRVKIGVYAICGLLAALAGIIVTSRLSSAQPTAGMGYELDAIAAVVLGGTSLMGGKGRIMGTLIGALIIGFLNNALNLLDVSSYYQMIAKAVVILLAVLVDNKK

SEQ ID NO: 99908 - DNA, 945 bp, Bacillus halodurans C-125
  CDS (1)..(945): transl_table=11
atgtccgacaataaacaaataaagtcgctgcttactactattggaccgtttataggattgttttttatcgttttgatcattagtttcttaaaccctgatttcctctcattatcaaatattatgaacgtcttacggcaagtgtcgatcaacgccttaattgccttcgggatgacctttgttattttaacaggcgggattgatttatccgttggggccattctcgctctgtccagtgctgtcacagcatggttaatggtcaacagcgtcgatccgatcttagccgttctgatcggtctattggccggtactctctttggtgcgattaacggattggtgatttccaaagggaaggtagccccttttattgccacattggcgacgatgacgatttatcgaggactcacactcgtgtttaccgatggtcgtccgatttcaggatttgagtcgtcgacgatgtttgaaatgctcggcagaggatatttcttcggaattccggttcctgccgtgacaatgatcattagcttcatcattctttacctcattttaaagaaaacgacgttcggtcgtcgcgtgtatgctgttggtggtaaccaagaagcggcgatcttatcagggattaaagtagaccgaatcaaaatttatgtctactcattaaccggttttttatcggcccttgccggtatgattttaacctcccgtttatattcggctcagcctactgctggaagcatgtatgagcttgatgcgattgctgccgttgtccttggtgggacgagcttaacgggaggccgaggttggatcgtcggtaccttaatcggtgccttgatcataggagtcctaaacaatggactgaacttgttgggcgtaagctcatttttccagcaagttgtcaaagggagtgtcattttactcgcggtcttattggatcgtagaaaatcagcgtaa

SEQ ID NO: 99909 - protein, 314 aa, Bacillus halodurans C-125
MSDNKQIKSLLTTIGPFIGLFFIVLIISFLNPDFLSLSNIMNVLRQVSINALIAFGMTFVILTGGIDLSVGAILALSSAVTAWLMVNSVDPILAVLIGLLAGTLFGAINGLVISKGKVAPFIATLATMTIYRGLTLVFTDGRPISGFESSTMFEMLGRGYFFGIPVPAVTMIISFIILYLILKKTTFGRRVYAVGGNQEAAILSGIKVDRIKIYVYSLTGFLSALAGMILTSRLYSAQPTAGSMYELDAIAAVVLGGTSLTGGRGWIVGTLIGALIIGVLNNGLNLLGVSSFFQQVVKGSVILLAVLLDRRKSA

SEQ ID NO: 99910 - DNA, 969 bp, Pasteurella multocida subsp. multocida str. Pm70
  CDS (1)..(969): transl_table=11
atgacaactcaagcaaaaccattccaattcggtaaattcttaattgaacaacgttccatcattgccttactggtgctgattgcgatcgtctcaatgatcaatcctgactttttcagtgtggataatattctcaatattttacgccaaacttcagtcaacgcaattattgccgtcgggatgacatttgtgatcttgattgccgggatcgatctttcggtcggttcggtacttgcattaacgggggctattgccgcctcgatggtcagtactgagttaccaatactgctcgtcattccagtcacactcttgattggtacattactgggcgggatcagcggtgttattgtcgcgaaagggaaagtacaagccttcattgctactctcgtaaccatgaccttattacgtggtgtgaccatggtttataccgatggacgcccaattagtacaggcttttcggaaggtgcggatacgttttcgctgttaggcacgggttatgtattcggtatccctgtcccaatttggattatggcatttgtctttgctgcctcttggtatgtattaaaacatacacgtattgggcgttatatttatgcacttggggggaatgaagccgccacccaattatctggcattaacgtcaataaaattaaaatctttgtttttgccgtcagtggcttcttatctgcccttgccggtctgattgtcacttcacgtttatcctctgctcaaccgactgccggtgtgtcatatgagcttgatgcgattgccgcggttgtagtcggcggaacaagcttaatgggcggaaaaggacgcgtcatgggcactttaattggcgcattgattattggtttcttaaataacgcgctgaatttactggatatttcctcttactatcaaatgattgcaaaagcattagttatcttagtcgcggttttagcggataactatttaggcaccaaaaaagtttaa

SEQ ID NO: 99911 - protein, 322 aa, Pasteurella multocida subsp. multocida str. Pm70
MTTQAKPFQFGKFLIEQRSIIALLVLIAIVSMINPDFFSVDNILNILRQTSVNAIIAVGMTFVILIAGIDLSVGSVLALTGAIAASMVSTELPILLVIPVTLLIGTLLGGISGVIVAKGKVQAFIATLVTMTLLRGVTMVYTDGRPISTGFSEGADTFSLLGTGYVFGIPVPIWIMAFVFAASWYVLKHTRIGRYIYALGGNEAATQLSGINVNKIKIFVFAVSGFLSALAGLIVTSRLSSAQPTAGVSYELDAIAAVVVGGTSLMGGKGRVMGTLIGALIIGFLNNALNLLDISSYYQMIAKALVILVAVLADNYLGTKKV

SEQ ID NO: 99912 - DNA, 942 bp, Lactococcus lactis subsp. lactis Il1403
  CDS (1)..(942): transl_table=11
gtgaaagctctatctcaaaaattcagttctttaacgacaatgattgctctgattgttttgatgattatcattacatgtatcaatcccaactttatgacggcaaataatttgctaaatttactcttacaagtcacggctaatggatttattgcctttgggatgaccttcgtaattctaacttcaggaattgacctgtcagttggcgcaattttagccctttcaagtgcagtgtccgcaggttttatagcccaaggaatgcctttaccgctagcagtagtctgtgcgttaatcattggtgcttttcttggagcgatcaatggtgcacttattgcctatgggaaattggcccctttcattgtaactttagctactcaaatggtttaccgcggagcaacccttgtttttactgatggtaatccaattactaaacacatggatggctatttcttagcctatattggacaaggttatttactgggtattcctttccctgttattttaatgattcttgttttcattgttttatggattttacttcataaaacagcctttggtaaatcagtttatgctttgggtggtaatgaaaaagctgcttatatttcaggaattaaactaaataaagtaaaaattgccatttacactttatctggagcaatgtccgcaatttctggtttaatcatcagttctcgtttgtcatcagcaacgccacaagcaggttctggctacgaaatgtatgcaatcgctgccgttgtccttgggggaacctctctaatgggaggaaaagggcgtatgtttggaactatgattggggtattaatcattggtgttctaaataatggtttaaatataattggtgtgtcagccttttggcaacaagtcatccaaggattagttattctcgttgcagttcttatcgatgtcattcgtagcaaacggaaatag

SEQ ID NO: 99913 - protein, 313 aa, Lactococcus lactis subsp. lactis Il1403
MKALSQKFSSLTTMIALIVLMIIITCINPNFMTANNLLNLLLQVTANGFIAFGMTFVILTSGIDLSVGAILALSSAVSAGFIAQGMPLPLAVVCALIIGAFLGAINGALIAYGKLAPFIVTLATQMVYRGATLVFTDGNPITKHMDGYFLAYIGQGYLLGIPFPVILMILVFIVLWILLHKTAFGKSVYALGGNEKAAYISGIKLNKVKIAIYTLSGAMSAISGLIISSRLSSATPQAGSGYEMYAIAAVVLGGTSLMGGKGRMFGTMIGVLIIGVLNNGLNIIGVSAFWQQVIQGLVILVAVLIDVIRSKRK

SEQ ID NO: 99914 - DNA, 966 bp, Escherichia coli O157:H7 EDL933; identical to SEQ ID NO: 38781
  CDS (1)..(966): transl_table=11
  misc_feature (601)..(601): s is g or c

SEQ ID NO: 99915 - protein, 321 aa, Escherichia coli O157:H7 EDL933; identical to SEQ ID NO: 38782
  misc_feature (201)..(201): The Xaa at location 201 stands for Ala, or Pro.

SEQ ID NO: 99916 - DNA, 975 bp, Escherichia coli O157:H7 EDL933
  CDS (1)..(975): transl_table=11
atgacgacctctgcaaaaacctctgccaaaaaaatgctgatgagcgatctgatgcaaacggtcggcatcttgcccattttgattctgatcgtggcggtatttggctttatcacgccaaacttttttaccgaaagcaacctgctgaatattacccgccaggcatcgatcaacattgttctggcggcggggatgaccttcatcattttgaccggcgggatcgatctttccgtgggttcgatcctcggcaccacagcggtggcggcgatggtcgtctcccttagccctgagttcgccatgctgtcgatcccggcagcgctgatgctcggcctgctgctggggctgttcaacggcgcgctggtggcctttgccggattgccaccgtttatcgttacgcttggcacctatacggcgctgcgcggggcggcgtatctgctggcggacggcaccacggttatcaactccaacattaatttcgagtggataggcaacaactatctcgggccggtcccatggctggtggtgattgcgctggcggtgatcgtggtgtgctggtttattctgcgccgcaccacgcttggcgttcatatctacgccgtcggcggcaatatgcaggcggcgcgtcttaccggcattaaggtctggctggtgctgctgtttgtttatggcatgagcggcctgctttctgggcttggtgggattatgagcgcctcacggctgtacagcgccaacggcaacttaggcatgggttacgaactggatgccattgcagcggtgatcctcggcggcaccagttttgtcggcggcatcggcaccatcaccggcacgctggtcggcgcgctaattatcgccacgctcaacaatggcatgaccttaatgggcgtctcttacttctggcaactggtgatcaaaggggcgatgatcatcattgcggtgctgatcgacaaataccgtacccgacaccatcaaagtgcataa

SEQ ID NO: 99917 - protein, 324 aa, Escherichia coli O157:H7 EDL933
MTTSAKTSAKKMLMSDLMQTVGILPILILIVAVFGFITPNFFTESNLLNITRQASINIVLAAGMTFIILTGGIDLSVGSILGTTAVAAMVVSLSPEFAMLSIPAALMLGLLLGLFNGALVAFAGLPPFIVTLGTYTALRGAAYLLADGTTVINSNINFEWIGNNYLGPVPWLVVIALAVIVVCWFILRRTTLGVHIYAVGGNMQAARLTGIKVWLVLLFVYGMSGLLSGLGGIMSASRLYSANGNLGMGYELDAIAAVILGGTSFVGGIGTITGTLVGALIIATLNNGMTLMGVSYFWQLVIKGAMIIIAVLIDKYRTRHHQSA

SEQ ID NO: 99918 - DNA, 981 bp, Agrobacterium tumefaciens str. C58; identical to SEQ ID NO: 38803
  CDS (1)..(981): transl_table=11

SEQ ID NO: 99919 - protein, 326 aa, Agrobacterium tumefaciens str. C58; identical to SEQ ID NO: 38804

SEQ ID NO: 99920 - DNA, 1197 bp, Agrobacterium tumefaciens str. C58; identical to SEQ ID NO: 38805
  CDS (1)..(1197): transl_table=11

SEQ ID NO: 99921 - protein, 398 aa, Agrobacterium tumefaciens str. C58; identical to SEQ ID NO: 38806

SEQ ID NO: 99922 - DNA, 1035 bp, Agrobacterium tumefaciens str. C58
  CDS (1)..(1035): transl_table=11
gtgaggaacgacatggccaatattgcagaacccaagaagggcttcgccgtcagcgatcgtcagaaggacatcatccagaaatttgcggcgctcggcagcctctttgcgctggtcgcggtcttctccgcgaccagtaacgccttcttcaccgtcaataatggcatgacgatcgcgctgcaggtgacttctattgcgctgctcggcattggtgccacctgtgtcatcatcaccggcggcatcgatctttccgtcggttcggtgcttgcgcttgccggcgtcgttgccgcccttgcggtgaaggaactcggcatgccggtgcccatcggcatgttgctcggcattctgacggggtcgctttgtggcctcatcaacggtcttctggtgacgcgcttcaagctgccgcccttcatcgccactcttggcatgatgctgattgcccgcggtgtggccctgcagatcaccggtgcgcgcgccgtatccggccttggcgaatccttcggtgaactcggcaatggcgcactcttccgtatcgtcactatcggtgacgatggctttccgaatgtcgtgtttcccggcattccctatccggtcatcctgatggtggtgattgcgcttgcggtttccttcatgcttaaccgctccatcctcggccgccacatctatgccgtgggttccaatgcggatgctgcccgcctttccggcgtcaacgtcgctcgcgtcaccaatttcacctacatcctgtccggcacgctcgccgggctgacgggctgcgtgctgatgtcgcgtctcgttaccgcccagccgaacgaaggcgtgatgtatgagctggatgccattgccagtgcggtcatcggcggcacatcgctgatcggcggcgtgggcacgatttccggcacggccatcggcgcctttgtcatcggcattttgcgtaacggtctcaatatgaacggcgtttccgccttcacgcaacagatcatcattggccttgtcattctggtcaccgtctggatcgaccagctgcgcaaccgccgctga

SEQ ID NO: 99923 - protein, 344 aa, Agrobacterium tumefaciens str. C58
MRNDMANIAEPKKGFAVSDRQKDIIQKFAALGSLFALVAVFSATSNAFFTVNNGMTIALQVTSIALLGIGATCVIITGGIDLSVGSVLALAGVVAALAVKELGMPVPIGMLLGILTGSLCGLINGLLVTRFKLPPFIATLGMMLIARGVALQITGARAVSGLGESFGELGNGALFRIVTIGDDGFPNVVFPGIPYPVILMVVIALAVSFMLNRSILGRHIYAVGSNADAARLSGVNVARVTNFTYILSGTLAGLTGCVLMSRLVTAQPNEGVMYELDAIASAVIGGTSLIGGVGTISGTAIGAFVIGILRNGLNMNGVSAFTQQIIIGLVILVTVWIDQLRNRR

SEQ ID NO: 99924 - DNA, 984 bp, Agrobacterium tumefaciens str. C58
  CDS (1)..(984): transl_table=11
ttgaacatgtcgcttgatgcaaacaccggcgttgccgcgaaaacgggcggtttcagtttcagtgccatgctgcgctcgccgctcgccctgccgctggcgggtctcatcgtcgtatccatcctcatgggtcttgcgagcgacaatttcttcagcgtcaacaacatcatgaacgtgctgcggcaggtttccgtcgttggcattctcgctgttggcatgaccttcgtcatcctgaccggcggcatcgatctttcggtcggtgcggtcatggcgctggtcggcacgctgtcggccggcctgatggtgaatacgggcctgtctcccgcgattgccctgccggccggcctcttcatcgggctcggcattggcatcttcaacggggcgctggtcgcttggggcaggatgccggccatcatcgtcacgctcgccaccatgggcatggcccgtggcctcggcctcatctattccggcggctacccggtcagcggcattccgagctggatttcctggttcggcgttggccgcgtcggcatcgttccggtgcccgtcatcatcatggtggtgatctatgcggtggcctgggtgctgttgcagcgcacagccttcggccgccacgtctatgcgcttggcggtaacgaactggcggcccgtctttcgggtgtgaagacccggcgcgtcaagcttgccgtctatggcatctcgggtgtcacggcagctttcgccgccctcatactgaccggtcgcctgatgagcggccagcccaatgccggcgtcggcttcgaactggacgccattgcggcggtcgttctgggcggcacggcgattgccggcggcaggggcctcatcctcggcacgctcatcggcgcggtgctgcttggcatcctcaataacggcctcaacctgatgggcatcaacccctatcttcaggatgtcatcaagggcggcatcattctgttggccatctatatcgggcgcgaatggcgctga

SEQ ID NO: 99925 - protein, 327 aa, Agrobacterium tumefaciens str. C58
MNMSLDANTGVAAKTGGFSFSAMLRSPLALPLAGLIVVSILMGLASDNFFSVNNIMNVLRQVSVVGILAVGMTFVILTGGIDLSVGAVMALVGTLSAGLMVNTGLSPAIALPAGLFIGLGIGIFNGALVAWGRMPAIIVTLATMGMARGLGLIYSGGYPVSGIPSWISWFGVGRVGIVPVPVIIMVVIYAVAWVLLQRTAFGRHVYALGGNELAARLSGVKTRRVKLAVYGISGVTAAFAALILTGRLMSGQPNAGVGFELDAIAAVVLGGTAIAGGRGLILGTLIGAVLLGILNNGLNLMGINPYLQDVIKGGIILLAIYIGREWR

SEQ ID NO: 99926 - DNA, 1005 bp, Agrobacterium tumefaciens str. C58
  CDS (1)..(1005): transl_table=11
ttgaccgtctataccgaacgcgccaaaggctcgccgctctcggatttcttcgccgagaatgcacaggtgctttccatcgcagccttttttgccctctgcatggtgttcttctccgtgaccacggatacgtttctgacggccggcaatcttctgaacgtcgtccgtcaggccgcaccgatcctgatcgtctccgtcgcgatgacattcgtcatcatcacgggcggtatcgatctgtctgtcggctcgatggtcgccctgatcaacgccgttggcgccatcctgctcgcggccggttacccctggccgctggttgtcgttgccatgctggtgctcggcggcgggcttggcctggtgcagggctggttcattgcctatcaaggtattccggccttcatcgtcacgcttgccggtctctccatcctgcgcggtgtcgccctctacatcacacagggatattccgttccgataccggatgcgccggggttcttttacctcggcaggggtgattttctcggtatgcccgtccctgccctgatcggcgtcgtcgttaccgtgatcgcctatatcgttctttcgagcacccgctatggtcgtcgtgtcgtcgcggtcggctccaatccggaagcggcgcgccgcgtgggaatgcccgccaaatggattctcgcctcggtctatctggccgcaggcgtggcttcagccattgccgggctcatgattgcggcgcggctggggtcaggatcgtcgaatgcggcagtcgggttcgagcttcaggtggtggcggccgtggttctgggcggcacgtcgctgatgggcggacgcggcaccattcttggcacggtactgggcaccatgaccatcgccgttatcggcaacggtcttatcctcatgcacatctctcccttcttcacccagatcgtgacgggcgccatcatccttgccgcaatctggctcaacacacgcatcttcaccgcgaacttccgccttggcgtgaagagaaagggctga

SEQ ID NO: 99927 - protein, 334 aa, Agrobacterium tumefaciens str. C58
MTVYTERAKGSPLSDFFAENAQVLSIAAFFALCMVFFSVTTDTFLTAGNLLNVVRQAAPILIVSVAMTFVIITGGIDLSVGSMVALINAVGAILLAAGYPWPLVVVAMLVLGGGLGLVQGWFIAYQGIPAFIVTLAGLSILRGVALYITQGYSVPIPDAPGFFYLGRGDFLGMPVPALIGVVVTVIAYIVLSSTRYGRRVVAVGSNPEAARRVGMPAKWILASVYLAAGVASAIAGLMIAARLGSGSSNAAVGFELQVVAAVVLGGTSLMGGRGTILGTVLGTMTIAVIGNGLILMHISPFFTQIVTGAIILAAIWLNTRIFTANFRLGVKRKG

SEQ ID NO: 99928 - DNA, 1050 bp, Sinorhizobium meliloti 1021
  CDS (1)..(1050): transl_table=11
atggatatgcgtgcggaaaagaacccggacatcccggccggtggggctggtgcccgcaagacgaagttgaaggcggtcgtctttcaggctggtccgctgatcgccctggtcctgctcatggcctatctcgcctttgccacatccaacttcctgacgctcgacaacctttccaacgtggcgcggcagtccgcattcgtcgccattctcgcggtcgggcagacattcgtcatcctgacgggcggcatagatctttcggtcgcggccatcgcggcgctttccgcctcgataaccgccgtcctactcacgcagccgctcgtgctgttcggtatcgatttcggcttcgtgccgccgccggtggcgatcctcatcgggattctcatcggcatggccgccggtgcgctcaacggctggctcatctccaagttcaagatcccggacttcatcgcgacgctcggcacgatgacggcgttccgcggcgcggcgctgctggtcaccgacggcctgcctgtcccctccttcaatgccggccggcaacttcccgaaagcctgatctgggtcggcggcggccagctcttcggggtgccggtgagcgcgctcatcgctctgctctgcgcggctgccggctggtacgtgctccgctacaccgcgctcgggcgagcgatctacgctgtcggcggcaaccgtgcggccgcccattcgtccggcatcagcatttcgcgcaccaagatcatgacctatgccatttccggccttctggccgcgatcgcgggcatcatcctggtcgggcgcctcaactccgccaatgcgcttatggcggatggcgaggagctgcgttccatcgcctccgtcgtcatcggcggcaccaatctcttcggcggcgaaggcggtgtatggggatcgatcatcggcgcggccatcatcggcgtgctcggcaacggcctcaacctgctcgatgtcagcccgttctggcagcgcatcgcgcagggcgtcgtcatcgtggtcgtcgtgatcttcgaccaatggcgccgtcgcagcatgacgcgcgtttga

SEQ ID NO: 99929 - protein, 349 aa, Sinorhizobium meliloti 1021
MDMRAEKNPDIPAGGAGARKTKLKAVVFQAGPLIALVLLMAYLAFATSNFLTLDNLSNVARQSAFVAILAVGQTFVILTGGIDLSVAAIAALSASITAVLLTQPLVLFGIDFGFVPPPVAILIGILIGMAAGALNGWLISKFKIPDFIATLGTMTAFRGAALLVTDGLPVPSFNAGRQLPESLIWVGGGQLFGVPVSALIALLCAAAGWYVLRYTALGRAIYAVGGNRAAAHSSGISISRTKIMTYAISGLLAAIAGIILVGRLNSANALMADGEELRSIASVVIGGTNLFGGEGGVWGSIIGAAIIGVLGNGLNLLDVSPFWQRIAQGVVIVVVVIFDQWRRRSMTRV

SEQ ID NO: 99930 - DNA, 1035 bp, Agrobacterium tumefaciens str. C58
  CDS (1)..(1035): transl_table=11
atgatcccgaagcagattagtgaaattgaagttccgcaggcaacgggcaaaatagaaacctggaaggcgcgtgttgcaacggccatcgtttcgcgcgaacaccgggcgacctggctgccagcatcggcgcttctcattcttattggctacttcgctttccagcagcccgcattcttgtcgccgctcaacctgacggtcatgggagcccaggccgggccactgctcttgatctcgctcggcgcgaccttcatcgtgctaatgggcagcatcgacctctccgttgctgctgtcgcagcgctcgcctccgcgatcagcgccgttctcctgcagaaatttggcacgggttacacaacggccctcctcgccgtgctcggtttcggcatcgctgccggcctgctcaattccgttctttcgacagtcctgcggctgccgtcgttcattgcaactcttgcgtccagttccatctttacgggcatcatgctgcacgtgcttgatggcactgccctgttcgtcaacgacgacgacttttcgatgctcgccaacgggcagataatcccgcgggtgcccaacgtccttctcctttcgctgctgctttggctcgtgctgagcctgacaacgtcccatacccggttcggccggtacatcgtcgcgataggggctggcgagcgtgtcgcgaaactgagcggcatcgctatcaaccgctacaagacctatgcgtttgtgctttcaagcacactcgctgcgatcggtgggttctttctgttgtcgcgtttgggttccgctaccccctcaatcggggacgggtatcttctcgacacagtcgctgcaatcgtcgttggcggcacggcacttacaggcggggtcggcggcgcacagcgcaccctgctcggggtcgcgcttatcactatcctgagcaacggcctgaacgtttctggcgtcagcacgttcacccaggaaatcgtcaagggcgttgttattgtgattgccgtgctcacgacgatcgaccgcgtcagccttcaagacatcgtgaaatga

SEQ ID NO: 99931 - protein, 344 aa, Agrobacterium tumefaciens str. C58
MIPKQISEIEVPQATGKIETWKARVATAIVSREHRATWLPASALLILIGYFAFQQPAFLSPLNLTVMGAQAGPLLLISLGATFIVLMGSIDLSVAAVAALASAISAVLLQKFGTGYTTALLAVLGFGIAAGLLNSVLSTVLRLPSFIATLASSSIFTGIMLHVLDGTALFVNDDDFSMLANGQIIPRVPNVLLLSLLLWLVLSLTTSHTRFGRYIVAIGAGERVAKLSGIAINRYKTYAFVLSSTLAAIGGFFLLSRLGSATPSIGDGYLLDTVAAIVVGGTALTGGVGGAQRTLLGVALITILSNGLNVSGVSTFTQEIVKGVVIVIAVLTTIDRVSLQDIVK

SEQ ID NO: 99932 - DNA, 1185 bp, Yersinia pestis CO92
  CDS (1)..(1185): transl_table=11
atgtcacaagctaatcaatctgaatttaactcaccagaaaatggggataaaaagccattttttcggcttaaatccttaaatttacaagtttttgtcatgctggccgcgatcgccattattatgttgttcttcaccttcacgacagaaggggcctatctcagcgccagaaatatctctaacttgctgcgccagacggcgatcaccggcatcttggcggtcggtatggtgtttgtcattatctccgccgaaattgacttgtctgttggctcaatgatggggttattgggtggcatagcggccatttttgatgtctggctcggctggccgttgccgctgaccattgtcgttacgctggcgctggggctggtattaggggcatggaacggttggtgggtcgcgtatcgcaaagtgccttcgtttattgttacgctcgcgggcatgttggcttttcgtggcattttaattggtatcaccaatggcacgacggtttcgccgaccagtaatgcgatgtcgcagattggccagagctatctgccaagtggcattggttttggcatcggtgctattggcctgatgttgtttgtggcctggcaatggcgtcggcgtaatcaccgcatccgcttggggttaccggttgccgccccgcaaggggatgtgactcgccaaactattaccgcagttatcgttctgggtgccatatatttattgaatgattatcgtggtgtacctacgccggtactaatccttactgcattaatgctggcgggggtatttatggctactcgcaccgcttttggtcgccggatctacgctattggcggcaatattgatgcggcgcgcctgtctggaattaatgtagagcgcactaaactggcagtattcgcgattaacggactgatggtggcgatggctggtttgatcctcagttcacgtttaggcgcaggttcgccttctgcgggcaatatcgctgaactggatgcgattgcggcgtgtgtcattggcggtaccagcctggccggaggcgttggcagtgtggcgggggccgtaatgggcgcatttattatggcttctctcgataatgggatgagcatgctagatgtgccgacgttctggcagtacattgtcaaaggcgcaattttgctgctggccgtgtggatggattccgccaccaaacggcgggtgtga

SEQ ID NO: 99933 - protein, 394 aa, Yersinia pestis CO92
MSQANQSEFNSPENGDKKPFFRLKSLNLQVFVMLAAIAIIMLFFTFTTEGAYLSARNISNLLRQTAITGILAVGMVFVIISAEIDLSVGSMMGLLGGIAAIFDVWLGWPLPLTIVVTLALGLVLGAWNGWWVAYRKVPSFIVTLAGMLAFRGILIGITNGTTVSPTSNAMSQIGQSYLPSGIGFGIGAIGLMLFVAWQWRRRNHRIRLGLPVAAPQGDVTRQTITAVIVLGAIYLLNDYRGVPTPVLILTALMLAGVFMATRTAFGRRIYAIGGNIDAARLSGINVERTKLAVFAINGLMVAMAGLILSSRLGAGSPSAGNIAELDAIAACVIGGTSLAGGVGSVAGAVMGAFIMASLDNGMSMLDVPTFWQYIVKGAILLLAVWMDSATKRRV

SEQ ID NO: 99934 - DNA, 999 bp, Caulobacter crescentus CB15; identical to SEQ ID NO: 38789
  CDS (1)..(999): transl_table=11

SEQ ID NO: 99935 - protein, 332 aa, Caulobacter crescentus CB15; identical to SEQ ID NO: 38790

SEQ ID NO: 99936 - DNA, 963 bp, Sinorhizobium meliloti 1021; identical to SEQ ID NO: 38793
  CDS (1)..(963): transl_table=11

SEQ ID NO: 99937 - protein, 320 aa, Sinorhizobium meliloti 1021; identical to SEQ ID NO: 38794

SEQ ID NO: 99938 - DNA, 1197 bp, Ralstonia solanacearum GMI1000
  CDS (1)..(1197): transl_table=11
atgtcgaaccttctgcataccgaactcgcccgcaacggcggcagcggcccgcgcctcgatggccgcaccatccagcaactcttcgtgcgctacaaggtgctggccttgctgctggccgtggcgctgatctggatcttcttctggagccagaccaacggcaccttcctgcggccgaacagcatttccaacctgttcctgcagatgtccgtcacgggcatgctggcctgcggcatggtgttcgtcatcatcgccggggagatcgacctgtcggtcggctcgctgctcggcctgctgggcgggctggtcgccatcctgacggtcaaccacggctggaacacctgggtctcggtgggcgtggtgctggcggcgggcgcggccatcggcgcggccaacggcttcatcaccaccaagctgcgcgtgccctcgttcatcgtcggcctgggcggcatgctggccttccgcggcctgctgcaatggagcaccgacagcgtgacgatcgcaccggtgcccgacgacctgggcaacatcgcgcagagcttcgtgccggcctggctcgcgtggagcctggccaccgccatcgtcgcgctgtcggtggtgctgacgctgcgccggcgtgccgagcgcgcgcgcctgtcgctgtcgctgccgccgatgtgggccgacgcgctcaagctgctggccatcgcggccgcctcgttcggcttcgttgcggtgctcaatcaggccaacggcgtgccgctgccggtgctgatcctgctggtgatgctgggcgtgttctcctacgtcgccacgcagaccgtgttcggccgccacgtctacgcggtgggcggcaacatggaagcgacccgcctgtcgggcgtgaacgtggcgcgcgtcaagctgctggtgttcgtcctgatgggcctgatgtgcgccttcgcgggcatcgtcaccacggcgcgctcggcggctggctcgccctccgcgggcgtgggcggcgagctcgatgccatctccgcctgcttcatcggcggcacctcgatgcgcggcggctcgggcacggtctacggtgcgctgatcggcgcgctggtgatggccagcctcgacaacggcatgcagcagatgaacgtcgatgcctcgtggcagatgatcgtcaagggcgtcgtgctggtgctggcggtgtggatcgacgtgctgtccggctccaaccgcggctga

SEQ ID NO: 99939 - protein, 398 aa, Ralstonia solanacearum GMI1000
MSNLLHTELARNGGSGPRLDGRTIQQLFVRYKVLALLLAVALIWIFFWSQTNGTFLRPNSISNLFLQMSVTGMLACGMVFVIIAGEIDLSVGSLLGLLGGLVAILTVNHGWNTWVSVGVVLAAGAAIGAANGFITTKLRVPSFIVGLGGMLAFRGLLQWSTDSVTIAPVPDDLGNIAQSFVPAWLAWSLATAIVALSVVLTLRRRAERARLSLSLPPMWADALKLLAIAAASFGFVAVLNQANGVPLPVLILLVMLGVFSYVATQTVFGRHVYAVGGNMEATRLSGVNVARVKLLVFVLMGLMCAFAGIVTTARSAAGSPSAGVGGELDAISACFIGGTSMRGGSGTVYGALIGALVMASLDNGMQQMNVDASWQMIVKGVVLVLAVWIDVLSGSNRG

SEQ ID NO: 99940 - DNA, 1023 bp, Agrobacterium tumefaciens str. C58
  CDS (1)..(1023): transl_table=11
atggccaatattgcagaacccaagaagggcttcgccgtcagcgatcgtcagaaggacatcatccagaaatttgcggcgctcggcagcctctttgcgctggtcgcggtcttctccgcgaccagtaacgccttcttcaccgtcaataatggcatgacgatcgcgctgcaggtgacttctattgcgctgctcggcattggtgccacctgtgtcatcatcaccggcggcatcgatctttccgtcggttcggtgcttgcgcttgccggcgtcgttgccgcccttgcggtgaaggaactcggcatgccggtgcccatcggcatgttgctcggcattctgacggggtcgctttgtggcctcatcaacggtcttctggtgacgcgcttcaagctgccgcccttcatcgccactcttggcatgatgctgattgcccgcggtgtggccctgcagatcaccggtgcgcgcgccgtatccggccttggcgaatccttcggtgaactcggcaatggcgcactcttccgtatcgtcactatcggtgacgatggctttccgaatgtcgtgtttcccggcattccctatccggtcatcctgatggtggtgattgcgcttgcggtttccttcatgcttaaccgctccatcctcggccgccacatctatgccgtgggttccaatgcggatgctgcccgcctttccggcgtcaacgtcgctcgcgtcaccaatttcacctacatcctgtccggcacgctcgccgggctgacgggctgcgtgctgatgtcgcgtctcgttaccgcccagccgaacgaaggcgtgatgtatgagctggatgccattgccagtgcggtcatcggcggcacatcgctgatcggcggcgtgggcacgatttccggcacggccatcggcgcctttgtcatcggcattttgcgtaacggtctcaatatgaacggcgtttccgccttcacgcaacagatcatcattggccttgtcattctggtcaccgtctggatcgaccagctgcgcaaccgccgctga

SEQ ID NO: 99941 - protein, 340 aa, Agrobacterium tumefaciens str. C58
MANIAEPKKGFAVSDRQKDIIQKFAALGSLFALVAVFSATSNAFFTVNNGMTIALQVTSIALLGIGATCVIITGGIDLSVGSVLALAGVVAALAVKELGMPVPIGMLLGILTGSLCGLINGLLVTRFKLPPFIATLGMMLIARGVALQITGARAVSGLGESFGELGNGALFRIVTIGDDGFPNVVFPGIPYPVILMVVIALAVSFMLNRSILGRHIYAVGSNADAARLSGVNVARVTNFTYILSGTLAGLTGCVLMSRLVTAQPNEGVMYELDAIASAVIGGTSLIGGVGTISGTAIGAFVIGILRNGLNMNGVSAFTQQIIIGLVILVTVWIDQLRNRR

SEQ ID NO: 99942 - DNA, 1041 bp, Brucella melitensis 16M
  CDS (1)..(1041): transl_table=11
atgtcagtcacgagcaccaacaaggaaacagcggctccgaccggcgcgaagcggaagaccagcctcgtgcatctgctgctcgagggtcgcgcattctttgcgctgatcgcgatcatcgccgtcttctcgttcctttcgccctattactttacggtcgataatttcctcatcatgtcgtcgcatgtggccattttcggccttctggcgattggtatgctgctcgtcatcctcaatggcggcatcgacctttcggtcggctccacgctggggctggccggtgtggtcgcgggcttcctgatgcagggcgtgaccttgcaggaattcggcatcatcctttatttcccggtctgggccgtggtgctcatcacctgcgcgctcggcgccttcgtcggcgcggtcaatggtgtgttgatcgcttatctgcgcgttccggccttcgtggcgacgcttggcgttctttattgcgcgcgtggcgtagcgcttttgatgaccaacggtctcacctacaacaatctcggcggtcgccccgaacttggcaatacgggctttgactggctcggcttcaacaagcttttcggcgtgccgatcggtgtgctggtgctggcaattctcgccatcatctgcgccattgttttgaaccgcactgcattcggccgctggctctatgcctcgggcggcaatgaacgggcggcggaactttccggtgttccggtcaagcgggtcaaggtgtcggtctatgtcatttccggcatctgcgctgccattgcggggctggttctttcctcgcagctcacctctgctgggccgacggctggcaccacctacgaactgacggcaatcgctgccgtggtgatcggtggcgctgcgctcactggggggcgcggtacgatacagggcacacttctcggtgctttcgtgatcggtttcctttccgacggcctcgtgattatcggcgtgtcctcttactggcagaccgtctttaccggcgcggtgatcgtgctcgcggttctgctcaacagcattcaatattcccggcgatga

SEQ ID NO: 99943 - protein, 346 aa, Brucella melitensis 16M
MSVTSTNKETAAPTGAKRKTSLVHLLLEGRAFFALIAIIAVFSFLSPYYFTVDNFLIMSSHVAIFGLLAIGMLLVILNGGIDLSVGSTLGLAGVVAGFLMQGVTLQEFGIILYFPVWAVVLITCALGAFVGAVNGVLIAYLRVPAFVATLGVLYCARGVALLMTNGLTYNNLGGRPELGNTGFDWLGFNKLFGVPIGVLVLAILAIICAIVLNRTAFGRWLYASGGNERAAELSGVPVKRVKVSVYVISGICAAIAGLVLSSQLTSAGPTAGTTYELTAIAAVVIGGAALTGGRGTIQGTLLGAFVIGFLSDGLVIIGVSSYWQTVFTGAVIVLAVLLNSIQYSRR

SEQ ID NO: 99944 - DNA, 957 bp, Thermoanaerobacter tengcongensis MB4; identical to SEQ ID NO: 38809
  CDS (1)..(957): transl_table=11

SEQ ID NO: 99945 - protein, 318 aa, Thermoanaerobacter tengcongensis MB4; identical to SEQ ID NO: 38810

SEQ ID NO: 99946 - DNA, 1245 bp, Streptomyces coelicolor A3(2)
  CDS (1)..(1245): transl_table=11
atgagcacggacgtgaccgccaagaccccggcaccggcgccgcccggcagagagggctcggcctccggcggcgggctgctgcagctgatgctcgacggcatgcgccgcaacatgcgccagtacggcatgctgatggccctcggtctgatcgtggtgctgttcgcggtgtggtcggacggcgacctgctgctgccgcgcaacgtctccaacctggtgctgcagaacagctacatcctgatcctcgcgatcggcatgatgctcgtcatcatcgcgggccacatcgacctgtcggtgggttcgctgaccgccttcgtcggcgcgaccgccgccgtcctgatggtcaaccacgacctgccctggccggtggcggtgatcctctgcctggccatcggcgccgccgccggtgccgtgcagggcttcttcatcgcctatctcggcataccgtcgttcatcgtgaccctcgcgggcatgctgctcttccgcggtctgacggagatcttcctcaagggccagaccctcggcccgttccccaaggaccttcagaagatcgccaacggcttcctgcccgaggtcggcccgaacaccaactaccacaacctcaccctgctgctgggcttcgccctgatcgccttcgtggtgtaccaggaggtccgcgaccgcaagcggcagctggagttctccctcgacgtgccgccgctcaagctgttcctgctcaagctggtcgcgctggtcgccgcggtcctcgtggtcacgctgctgctggccagctacaagggcgcgccgatcgtgctgctcatcctgggcgtgctggtggtcggcttcggctatctgatgcgcaacgcgatcatcggccgccacatctacgccatcggcggcaacctgcccgcggccaagctgtcgggcgtgaaggacaagaaggtcaccttcctggtcttcctgaacatgggcatgctcgcggccctggcgggtctggtcttcgccgcccgcttcaacgcggcctcgcccaaggcgggcctcaacttcgagctggaggccatcgccgcctcgttcatcggcggcgcgtcgatgagcggcggcgtcggcacggtcctcggcgcgatcatcggcggtctggtcctgggtgtgctcaacaacggcatgaacctcgtcggcatcggcaccgactggcagcaggtcatcaagggcgcggtgctgctggcggcggtcgggttcgacgtgtggaacaagcgcagggtcggttcgtaa

SEQ ID NO: 99947 - protein, 414 aa, Streptomyces coelicolor A3(2)
MSTDVTAKTPAPAPPGREGSASGGGLLQLMLDGMRRNMRQYGMLMALGLIVVLFAVWSDGDLLLPRNVSNLVLQNSYILILAIGMMLVIIAGHIDLSVGSLTAFVGATAAVLMVNHDLPWPVAVILCLAIGAAAGAVQGFFIAYLGIPSFIVTLAGMLLFRGLTEIFLKGQTLGPFPKDLQKIANGFLPEVGPNTNYHNLTLLLGFALIAFVVYQEVRDRKRQLEFSLDVPPLKLFLLKLVALVAAVLVVTLLLASYKGAPIVLLILGVLVVGFGYLMRNAIIGRHIYAIGGNLPAAKLSGVKDKKVTFLVFLNMGMLAALAGLVFAARFNAASPKAGLNFELEAIAASFIGGASMSGGVGTVLGAIIGGLVLGVLNNGMNLVGIGTDWQQVIKGAVLLAAVGFDVWNKRRVGS

SEQ ID NO: 99948 - DNA, 1956 bp, Streptomyces coelicolor A3(2); identical to SEQ ID NO: 38811
  CDS (1)..(1956): transl_table=11

SEQ ID NO: 99949 - protein, 651 aa, Streptomyces coelicolor A3(2); identical to SEQ ID NO: 38812

SEQ ID NO: 99950 - DNA, 1293 bp, Streptomyces coelicolor A3(2)
  CDS (1)..(1293): transl_table=11
gtgagcatcgacaagacctccaccccggccgaggaccacgcggtggagaaccccgccgcggccgccggcgccgccgccgcggtcgacccgcggctgctggtgcgcgagcagggcttcgcgggctatctgagcgagttcaagcggaagatgaaggccggtgacctcgggtccatcccggtcgtcgtcggtctgctgatcatctgggccatcttcaccagcctgaactccaacttcctcaccgccggcaacttctccgacatgtcggtcgccatggtcggcaccggcatgatcgccgtcggtatcgtcttcgtcctgctgctcggcgagatcgacctgtcggtcggctcggtcagcggtgtcgcgggcgccaccttcgcggtgctgagcgtcacgcacgggatgaacgagtggctcgccctgctgctgtccgtcctcaccggcaccgtggccggtgccatccacggcttcgtcttcgcccgcatcggcgtgccggccttcgccgtgacgctggccggactgctgttctggcagggcttcatgctgcagatcctgggcagcaacggcacgatcaacctcgactccgagggcatcgtcgtcaagatgaccagctactacttcagcgacgtggccgccgcctacggcctggcggtcgtcgtgaccgcggggtacttcctcagcgcgttcttcgacagccggcgccgcgaggccgccggggtgccctcgcggccgctgaacgagatcatcgtgcgcacggtgctgctggcgatcctggcgttcgtcgtggcgatcgtcttcaaccagtacaagggcctgccgctggccgtggtgatcttcctggcgttcctgctgctcacggacttcgtcctgcgccgcaccgcctacggtcgcaagatcttcgccctcggtggcagcgtcgaggcgtcccgccgcgccggcatcaacgtggagctgatccggatctcggtcttcgcgatcgccggcggcttcgccgcgataggcggcctcttcgtggcctcgaagatcgccgccgccaaccagggcgcgggcaccggtgagttcctgatgaacgtcatcgccgcggccgtgatcggcggcacgtccctcttcggcggccgcggccgcacctgggacgcgctgctcggtgtcatggtcatcgtctcgatccagtacggcctcgccctggagggcatcgcctcgccggtccagtacatgatcaccggtggcgtgctgctggcgaccgtcgtcatcgacgcgatcacccgcaagacgcagaagacggccggccgcgcgtag

SEQ ID NO: 99951 - protein, 430 aa, Streptomyces coelicolor A3(2)
MSIDKTSTPAEDHAVENPAAAAGAAAAVDPRLLVREQGFAGYLSEFKRKMKAGDLGSIPVVVGLLIIWAIFTSLNSNFLTAGNFSDMSVAMVGTGMIAVGIVFVLLLGEIDLSVGSVSGVAGATFAVLSVTHGMNEWLALLLSVLTGTVAGAIHGFVFARIGVPAFAVTLAGLLFWQGFMLQILGSNGTINLDSEGIVVKMTSYYFSDVAAAYGLAVVVTAGYFLSAFFDSRRREAAGVPSRPLNEIIVRTVLLAILAFVVAIVFNQYKGLPLAVVIFLAFLLLTDFVLRRTAYGRKIFALGGSVEASRRAGINVELIRISVFAIAGGFAAIGGLFVASKIAAANQGAGTGEFLMNVIAAAVIGGTSLFGGRGRTWDALLGVMVIVSIQYGLALEGIASPVQYMITGGVLLATVVIDAITRKTQKTAGRA

SEQ ID NO: 99952 - DNA, 1020 bp, Streptomyces coelicolor A3(2)
  CDS (1)..(1020): transl_table=11
atgacgcagcacgtgtccccgccacggggcagcaccgacaaggcggcacccgtggagggtccgcccgcctggcgggtccggttgggccgcgccgacgtccgcaccctcaccctgctcggcgtgctcgccgcactggtcctcatcggcggcatcacccagcccgacgcgttcctcgacacccgcaacctgcaactggtgctcacccaggcgtccgtgatcggcatcgtcaccgtcggcgtcaccttcgtgatcatctccgggggcatcgacctgtcggtcggcgccatcgtcgccctctcctcggtgtgggcgaccacggtggccacccaggagtacggcttcgccggcatcctcttcacggcgatcgtggtcggtgtcggctgcggcctggtcaacggcctgctcatctccttcggcgggatggtccccttcatcgccaccctggccatgctggcctcggcgcgcggactcgcgctccagatcaccgacggccgcacccaggtcgtcaccgtcccgagcgtcctcgacctcgccgagcgcgactcgtacgtgctcggcataccgccgctggtgctggtcttcgcggccgtcaccgtcgtcggctggctggtcctgaaccggaccaccttcggccgccgcaccgtcgccgtcggcggcaacgccgaggccgcccggctggccggcatcgacgtccgccgccagcggctctacctctacctgctgtccgggctgtgctgcggcatcgccgccttcctgctggtggccctcgccggctccggccagaacaccaacggcaacctctacgaactcgacgccatcgccgccgcgatcatcggcggaacgctgctgaccggcggccggggccacatcctcggttccgtgctcggcgtcctgatcttcaccacgatcaccaacatcttcgccctgaacaacctgcagagcgacgtccagcagatcgccaagggcgcgatcatcgtcgccgccgtgctggtccagcgccgtaccgcaagcacgcattga

SEQ ID NO: 99953 - protein, 339 aa, Streptomyces coelicolor A3(2)
MTQHVSPPRGSTDKAAPVEGPPAWRVRLGRADVRTLTLLGVLAALVLIGGITQPDAFLDTRNLQLVLTQASVIGIVTVGVTFVIISGGIDLSVGAIVALSSVWATTVATQEYGFAGILFTAIVVGVGCGLVNGLLISFGGMVPFIATLAMLASARGLALQITDGRTQVVTVPSVLDLAERDSYVLGIPPLVLVFAAVTVVGWLVLNRTTFGRRTVAVGGNAEAARLAGIDVRRQRLYLYLLSGLCCGIAAFLLVALAGSGQNTNGNLYELDAIAAAIIGGTLLTGGRGHILGSVLGVLIFTTITNIFALNNLQSDVQQIAKGAIIVAAVLVQRRTASTH

SEQ ID NO: 99954 - DNA, 1020 bp, Rhizobium etli
  CDS (1)..(1020): transl_table=11
atggtcgcgacagttatgaattccgaaatcaaatcggctcagaagtctaacccgctcaaggctcatcggagcatcgtcattggctttgttcttctggcctctctcttagcactcggtgcattgctggtccccggcttcgtatcatcccaaaacgcgcgttcaatccttcttctcgcagcgtttctggggcttgcctccattggccagaccctgtgcgctctggtcggtgcgctcgatctttcgataccatatattattggaggcgcgaacatcctccttcccagccttatggtcgcaggtattcccgctcccctcgcgatgctggttgtcatgctcctcggtgcgcttgtcggggccgccaatggcgccctgagcttccgtctccaagggcaagcgctgatcatgtcgctcggagttggcttcgcggccgtcggtgcggtccagatctacacctcactcggctcggcgtttggtggtacagtgtttgctccggtacccgaatggctgaggaacatttcggcgttcaacggaaagtttttcggcctgtcgctgcctccggtcatcgtgatctgggctatcgtcgccatcgcgcttggatggttcatgtacaacacctggtttggccgcagcatttacgccgtcggcggaagccggacggcggccgcccgcctcggaatctccgaattcaaggtctggaccgtcatccatagcgtcagcggtgccatgtctgcaatcacgggcatgctgctactagggttttccggtggtggcttcgtcggcgtgggcgacccttatcttttcaccaccgtagcagcggtggtgattggagggacgtcgcttcttggtggggcgggcggctatggcgcgacagtgctcggtgttcttgtcctgactgtactgacctcgcttctagttggcctcggactgaactttccggcgcagcaggctgtcgtcggtctgctcatcgttccgatggtcgcgatatacgcacggtcaccacacattcgaaatcagatatga

SEQ ID NO: 99955 - protein, 339 aa, Rhizobium etli
MVATVMNSEIKSAQKSNPLKAHRSIVIGFVLLASLLALGALLVPGFVSSQNARSILLLAAFLGLASIGQTLCALVGALDLSIPYIIGGANILLPSLMVAGIPAPLAMLVVMLLGALVGAANGALSFRLQGQALIMSLGVGFAAVGAVQIYTSLGSAFGGTVFAPVPEWLRNISAFNGKFFGLSLPPVIVIWAIVAIALGWFMYNTWFGRSIYAVGGSRTAAARLGISEFKVWTVIHSVSGAMSAITGMLLLGFSGGGFVGVGDPYLFTTVAAVVIGGTSLLGGAGGYGATVLGVLVLTVLTSLLVGLGLNFPAQQAVVGLLIVPMVAIYARSPHIRNQI

SEQ ID NO: 99956 - DNA, 1011 bp, Yersinia pestis KIM
  CDS (1)..(1011): transl_table=11
ttggtaatgtctctgacacggaccagtaaattcaggaaggccattcatcaatacgggatcatacttgcctttgttggcttgtgtgcggtcattgctctggctggtgaatttgcagtaaacagcgggacatggagcgagaattattttttatcacgggataatacactcattattctgcgccaggtctcgatcaacggcatcctggccattgggatgacgttcgttattatcaccgcgggtgttgatctctccgttggcgcggttttaggcttggccggtattgtcgccgcgcgttttgcgacgaataacagtgccatcgccttaggggggaccgattggccactgttagtacccatcgtgattgccattggcatcggtttagtctgcggcgctatcaatggctttatcttaggcaaatatcgtctgcaaccctttattgtcacaatggggatgttatctgtcgcccgtggcctgacattactgactactggcggaaacccggtatcacaattaaccgatgaattccgttggttaggtaacggttatattttgggtattcccgtaccggtgttgatctttattattctgttcgccattgcctggtttgtcttgaataagatgacgtttggccgttacgtctacgcggtgggcgggaatgaaaaaagtgcccgcacatccgggatcaacgtattacgtattaaagtggcggtatataccctttgcggtattttggcggcgatcgcgggtttaattttaaccgcacgtactggctcggcacaaactggcgctggcgtatcctatgaattggatgctatcgcggcggtcgttattggcggcaccagtatggctggcggtattggaactctgcgcggaaccttatttggtgtgctgataataggtgtgatgaacaatgggcttgatttactcggcgtacaatcctattaccagcaaattatcaaaggtgttctgattgtctttgctgtcatgcttgacccatcccgtaagcaataa

SEQ ID NO: 99957 - protein, 336 aa, Yersinia pestis KIM
MVMSLTRTSKFRKAIHQYGIILAFVGLCAVIALAGEFAVNSGTWSENYFLSRDNTLIILRQVSINGILAIGMTFVIITAGVDLSVGAVLGLAGIVAARFATNNSAIALGGTDWPLLVPIVIAIGIGLVCGAINGFILGKYRLQPFIVTMGMLSVARGLTLLTTGGNPVSQLTDEFRWLGNGYILGIPVPVLIFIILFAIAWFVLNKMTFGRYVYAVGGNEKSARTSGINVLRIKVAVYTLCGILAAIAGLILTARTGSAQTGAGVSYELDAIAAVVIGGTSMAGGIGTLRGTLFGVLIIGVMNNGLDLLGVQSYYQQIIKGVLIVFAVMLDPSRKQ

SEQ ID NO: 99958 - DNA, 939 bp, Oceanobacillus iheyensis HTE831
  CDS (1)..(939): transl_table=11
atgaataataataaaatggcttcgatgtggcaaaaagtaatcccgttaatagctttagtattgctaataatcactgttacgatcatgaacccggcatttttagatccagctaatattatgaatctactaagacaaatttccattaatggattaattgcttttggtatgacttttgtaattctaacaggtggaattgatttatcggtaggatctattcttgcattgtctagtgctttagctgcaataatgatgacatcgggcattgatccaattttagcagtaattataggtgtattattaggtgcagtatttggtgcattgaatggtattttggtttcaaaaggtaacttagcaccgtttatcgttacattagcaacaatgacgatatttagagggttaacattagtatttacagatggaaaaccgataactggattaggagactcctatgcttttcaattatttggtaaaggatactttttaggaataccagtaccagcagtaacgatgatcattgcatttgtaattctttggtttttacttcataaaatgtcatttgggcgtaaaacatatgcaatcggcggaaatgagaaggcggcaaaaatttcaggtataaaagtagatcgtgtcaaaatctttatttattctattagtggaatgatggcagctctagcaggaatgattcttacttcccgccttaattctgctcaaccaactgcaggtacttcttatgaaatggatgctattgcggcagtagttctaggtggtacaagccttgctggcgggaaaggtcgtatagcaggtacgtttatcggagtattaattatcggtattttaaataatggaatgaacttacttggaatttcctctttctatcaacaagtagtaaaaggtgttgttatcttaatcgcagtgctactagatcgtaaaaaatcctaa

SEQ ID NO: 99959 - protein, 312 aa, Oceanobacillus iheyensis HTE831
MNNNKMASMWQKVIPLIALVLLIITVTIMNPAFLDPANIMNLLRQISINGLIAFGMTFVILTGGIDLSVGSILALSSALAAIMMTSGIDPILAVIIGVLLGAVFGALNGILVSKGNLAPFIVTLATMTIFRGLTLVFTDGKPITGLGDSYAFQLFGKGYFLGIPVPAVTMIIAFVILWFLLHKMSFGRKTYAIGGNEKAAKISGIKVDRVKIFIYSISGMMAALAGMILTSRLNSAQPTAGTSYEMDAIAAVVLGGTSLAGGKGRIAGTFIGVLIIGILNNGMNLLGISSFYQQVVKGVVILIAVLLDRKKS

SEQ ID NO: 99960 - DNA, 1023 bp, Bifidobacterium longum NCC2705
  CDS (1)..(1023): transl_table=11
atgacaacagctacggcaaacaaagtgaaggctcccaagaagggcttcaagctcgatcgtcagatgatcccgaccctcgcggccgtggtgatcttcatcctgatgatcatcatgggtcaggcgttgttcggcacctacattcgactgggcttcatctcctccctgttcattgaccacgcctacctgattattctggctgtggccatgaccctgccgattctgaccggtggtatcgatttgtctgtcggtgctatcgtggccatcaccgcagtcgtcggcctgaagctggcgaacgccggcgtgcccgccttcctggtcatgatcatcatgctgctcatcggcgctgtgttcggcctgctggccggcaccttgatcgaggaattcaacatgcagccgttcatcgcgaccctgtcgacgatgttcctggcccgtggtcttgcctccatcatctccaccgactcgctgaccttcccgcagggcaatgacttctcgttcatctccaacgtgatcaagatcatcgacaatccgaagatctccaacgatctgtccttcaacgtcggcgtgatcatcgcactggtggttgtggtcttcggctacgtcttcctgcaccatacccgcaccggacgcaccatctacgccatcggcggctcccgttcctccgcggaactcatgggtctgccggtcaagcgcacgcagtacatcatctacttgacctctgcgactctcgccgccctggcctcgatcgtgtacaccgcaaacatcggctctgccaagaacaccgtgggtgttggctgggagctcgacgccgttgcctccgtggtcatcggcggtacgatcatcaccggtggcttcggctacgtgctcggctccgtgctcggctctctggtccgctccatcctcgatccgctcacctctgacttcggtgtgccggccgaatggaccaccatcgttatcggtctcatgatcctcgtcttcgttgtgcttcagcgcgcggtgatggcggtcggcggagataaaaaatag

SEQ ID NO: 99961 - protein, 340 aa, Bifidobacterium longum NCC2705
MTTATANKVKAPKKGFKLDRQMIPTLAAVVIFILMIIMGQALFGTYIRLGFISSLFIDHAYLIILAVAMTLPILTGGIDLSVGAIVAITAVVGLKLANAGVPAFLVMIIMLLIGAVFGLLAGTLIEEFNMQPFIATLSTMFLARGLASIISTDSLTFPQGNDFSFISNVIKIIDNPKISNDLSFNVGVIIALVVVVFGYVFLHHTRTGRTIYAIGGSRSSAELMGLPVKRTQYIIYLTSATLAALASIVYTANIGSAKNTVGVGWELDAVASVVIGGTIITGGFGYVLGSVLGSLVRSILDPLTSDFGVPAEWTTIVIGLMILVFVVLQRAVMAVGGDKK

SEQ ID NO: 99962 - DNA, 1041 bp, Brucella suis 1330
  CDS (1)..(1041): transl_table=11
atgtcagtcacgagcaccaacaaggaaatagcggctccgaccggcgcgaagcggaagaccagcctcgtgcatctgctgctcgagggtcgcgcattctttgcgctgatcgcgatcatcgccgtcttctcgttcctttcgccctattactttacggtcgataatttcctcatcatgtcgtcgcatgtggccattttcggccttctggcgattggtatgctgctcgtcatcctcaatggcggcatcgacctttcggtcggctccacgctggggctggccggtgtggtcgcgggcttcctgatgcagggcgtgaccttgcaggaattcggcatcatcctttatttcccggtctgggccgtggtgctcatcacctgcgcgctcggcgccttcgtcggcgcggtcaatggtgtgttgatcgcttatctgcgcgttccggccttcgtggcgacgcttggcgttctttattgcgcgcgtggcgtagcgcttttgatgaccaacggtctcacctacaacaatctcggcggtcgccccgaacttggcaatacgggctttgactggctcggcttcaacaagcttttcggcgtgccgatcggtgtgctggtgctggcaattctcgccatcatctgcgccattgttttgaaccgcactgcattcggccgctggctctatgcctcgggcggcaatgaacgggcggcggaactttccggtgttccggtcaagcgggtcaaggtgtcggtctatgtcatttccggcatctgcgctgccattgcggggctggttcttttctcgcagctcacctctgctgggccgacggctggcaccacctacgaactgacggcaatcgctgccgtggtgatcggtggcgctgcgctcactggagggcgcggtacgatacagggcacacttctcggtgctttcgtgatcggtttcctttccgacggcctcgtgattatcggcgtgtcctcttactggcagaccgtctttaccggcgcggtgatcgtgctcgcggttctgctcaacagcattcaatattcccggcgatga

SEQ ID NO: 99963 - protein, 346 aa, Brucella suis 1330
MSVTSTNKEIAAPTGAKRKTSLVHLLLEGRAFFALIAIIAVFSFLSPYYFTVDNFLIMSSHVAIFGLLAIGMLLVILNGGIDLSVGSTLGLAGVVAGFLMQGVTLQEFGIILYFPVWAVVLITCALGAFVGAVNGVLIAYLRVPAFVATLGVLYCARGVALLMTNGLTYNNLGGRPELGNTGFDWLGFNKLFGVPIGVLVLAILAIICAIVLNRTAFGRWLYASGGNERAAELSGVPVKRVKVSVYVISGICAAIAGLVLFSQLTSAGPTAGTTYELTAIAAVVIGGAALTGGRGTIQGTLLGAFVIGFLSDGLVIIGVSSYWQTVFTGAVIVLAVLLNSIQYSRR

SEQ ID NO: 99964 - DNA, 999 bp, Shigella flexneri 2a str. 301
  CDS (1)..(999): transl_table=11
atgtatgcttcgtcattaccattgccgcagggcaagagcgtctcgctcaaacaatttgtcagtcgccatattaatgagatcggtttgctggtggtgattgccattctttatctggtcttctccctgaacgcgcctggctttatctcattgaataaccagatgaacgtgctgcgcgatgccgccaccattgggattgccgcctgggcgatgacgctgattattatctccggtgaaattgatgtcagcgttgggccgatggtggcttttgtctcggtgtgcctggcatttttgctgcaatttgaagttccgttggcgattgcttgtctgctggtgttgctgttaggcgcgctgatgggaacgctcgccggggtgctgcgcggcgtgtttaacgtaccaagtttcgttgccacactggggctgtggagcgctctgcgcggaatggggctgtttatgaccaacgcactgccagtgccgattgacgaaaacgaggtgctggactggctgggcggacaatttctcggtgtgccagtatccgcgctgatcatgatggtgttgtttgcgctgtttgtgttcattagccgaaaaaccgccttcgggcgctcggtttttgccgttggcggtaatgccacggcggcgcagttgtgcggtattaacgttcgtcgagtgcgcattcttatctttaccctttcgggattattagcggcggtgaccggcattttgttggcggcacgcctcggttccggtaacgcaggtgccgcaaacggtctggagtttgacgtcatcgccgcggtcgtggtcggcggtacggcactttccggcggtcgcggttccctgttcggtacattgcttggtgtgctggtgattacgctaatcggtaacggtctggtgctgctcggtattaactcctttttccagcaggtggtacgcggcgtcatcatcgtggtggcggtgctggcgaatatcttgctgacccagcgaagcagtaaagcgaaacgctaa

SEQ ID NO: 99965 - protein, 332 aa, Shigella flexneri 2a str. 301
MYASSLPLPQGKSVSLKQFVSRHINEIGLLVVIAILYLVFSLNAPGFISLNNQMNVLRDAATIGIAAWAMTLIIISGEIDVSVGPMVAFVSVCLAFLLQFEVPLAIACLLVLLLGALMGTLAGVLRGVFNVPSFVATLGLWSALRGMGLFMTNALPVPIDENEVLDWLGGQFLGVPVSALIMMVLFALFVFISRKTAFGRSVFAVGGNATAAQLCGINVRRVRILIFTLSGLLAAVTGILLAARLGSGNAGAANGLEFDVIAAVVVGGTALSGGRGSLFGTLLGVLVITLIGNGLVLLGINSFFQQVVRGVIIVVAVLANILLTQRSSKAKR

SEQ ID NO: 99966 - DNA, 966 bp, Shigella flexneri 2a str. 301
  CDS (1)..(966): transl_table=11
atgataacccagactgtctctggtcgccgttatttcacgaaagcgtggctgatggagcagaaatcgcttatcgctctgctggtgctgatcgcgattgtctcgacgttaagcccgaactttttcaccatcaataacttattcaatattctccagcaaacttcggtgaacgccattatggcggtcgggatgacgctggtgatcctgacgtcgggcatagacttgtcggtaggttctctgttggcgctaaccggcgcagttgctgcatctatcgtcggcattgaagtcaatgcgctggtggctgtcgctgctgctctcacgttaggtgccgcaattggtgcggtaaccggggtgattgtagcgaaaggtcgcgtccaggcgtttatcgctacgctggttatgatgcttttactgcgcggcgtgaccatggtttataccaacggtagcccagtgaataccggctttactgagaacgccgatctgtttggctggtttggtattggtcgtccgctgggcgtaccgacgccagtctggatcatggggattgtcttcctcgcggcctggtacatgctgcatcacacgcgtctggggcgttacatctacgcgctgggcggcaacgaagcggcaacgcgtctttctggtatcaacgtcaataaaatcaaaatcatcgtctattctctttgtggtctgctggcatcgctggccgggatcattgaagtggcgcgtctctcctctgcacaacccacggcggggactggctatgagctggatgctattgctgcggtggttctgggcggtacgagtctggcgggcggaaaaggtcgcattgttgggacgttgatcggcgcattaattcttggcttccttaataatggattgaatttgttaggtgtttcctcctattaccagatgatcgtcaaagcggtggtgattttgctggcggtgctggtagacaacaaaaagcagtaa

SEQ ID NO: 99967 - protein, 321 aa, Shigella flexneri 2a str. 301
MITQTVSGRRYFTKAWLMEQKSLIALLVLIAIVSTLSPNFFTINNLFNILQQTSVNAIMAVGMTLVILTSGIDLSVGSLLALTGAVAASIVGIEVNALVAVAAALTLGAAIGAVTGVIVAKGRVQAFIATLVMMLLLRGVTMVYTNGSPVNTGFTENADLFGWFGIGRPLGVPTPVWIMGIVFLAAWYMLHHTRLGRYIYALGGNEAATRLSGINVNKIKIIVYSLCGLLASLAGIIEVARLSSAQPTAGTGYELDAIAAVVLGGTSLAGGKGRIVGTLIGALILGFLNNGLNLLGVSSYYQMIVKAVVILLAVLVDNKKQ

SEQ ID NO: 99968 - DNA, 1086 bp, Bradyrhizobium japonicum USDA 110
  CDS (1)..(1086): transl_table=11
gtgatggccatgcccctggaatccccgatcaccttctcgaatgtcggcaagatcaagtggtggcagcgcggcatcttcgcctcccagaccggctacgtgctgctcgcgctggccgtgctgctggtgatcatgcatttcgccagcccgtatttcttcacccagggcaacatgcagaacgtggcgaagaacttttccttcatcgccatcgccaccctcggcgtcaccttcgtgatcatcaccggcggcatcgatctctcggtcggctcgatgatgtgcttctcggccatgatcacctcgatggtcatgaccgagctgtcgacgccgggcgggctcggcgcctcgctcttcgtgcacatggcggccgacggcaagacggtgctggccaatgtccccggcctgatcctgctgatctccgtcgtcgcgggccttggcgtcgcgctgatcgccggtctcgtcaacggcttctgcatcgcggtgctgggcctgtcgccgttcgtgaccacgctcggcatgctctcgatcgtgcgcgggctcggctatgtcgtctccaacgggcgcggcagctttcctggcgggccggacgccgattacttctacgcgctcacctcgggcgacgtgctcggcgtgcccgtaccgttcatctatctcgtgatccttgcgctggcgatggcggtggtgctgcaccacacctcgttcggccgccacgtcttcgcgctcggcggcaacgagaaggcggccgaactgaccggcatcccggtcgtgcgcgtgaagatcgaggtctatgtgctctgcgcgctcgccgctggcctccagggcatcatcatctccggctggctcggatcggcacccgccaacatggcgacctcctacgagctcaacgtgatcgcggcggccgtcatcggcggtgccaaccttgccggcggcatcggcgggccgctgggggccattgtcggctgcgtgctgctggaggtgatccgcaacggtctcgtgctggcacaggtcagctcctactggcagcagacgctggtgggcgtgatcatcatcctggccgtgctggtcgatcgtgtgcgctcgcggatgatctga

SEQ ID NO: 99969 - protein, 361 aa, Bradyrhizobium japonicum USDA 110
MMAMPLESPITFSNVGKIKWWQRGIFASQTGYVLLALAVLLVIMHFASPYFFTQGNMQNVAKNFSFIAIATLGVTFVIITGGIDLSVGSMMCFSAMITSMVMTELSTPGGLGASLFVHMAADGKTVLANVPGLILLISVVAGLGVALIAGLVNGFCIAVLGLSPFVTTLGMLSIVRGLGYVVSNGRGSFPGGPDADYFYALTSGDVLGVPVPFIYLVILALAMAVVLHHTSFGRHVFALGGNEKAAELTGIPVVRVKIEVYVLCALAAGLQGIIISGWLGSAPANMATSYELNVIAAAVIGGANLAGGIGGPLGAIVGCVLLEVIRNGLVLAQVSSYWQQTLVGVIIILAVLVDRVRSRMI

SEQ ID NO: 99970 - DNA, 987 bp, Clostridium tetani E88
  CDS (1)..(987): transl_table=11
gtgataggaggaaaaaatatgactgaattaagcagagaaaataataaagttagtaaaaaggatattatacaaaagtttagtacagttttgattttagtaatgctgatgattgctctaacagttatgaaacctgtttttatgactagaaataatattatgacaatcttacttcaaacagctgttattgcggttatagctataggtgaaactttagtaataataacatctggtatagatctttctgtaggatctttagttgcaatctcaggtgttgctagtgctatttttatgagagatggtatgaatatgatcctagcttgcatgcttggtatacttataagtacagcttgtggattaattaatggatttatagtagctaaaggaaatattccagagtttatagtaacacttggtatgatgagtatagttagaggtgcttcattagttgttacacaaggcttacctgtttcaggattaccagatggctttcaagtattaggtactggaaaattatttggggttattccagttccagcagtgataatgattattttagccatgatttttaccctgatattaagaaaaacacttataggaagatatacttatgctataggaagtaatgaagaagctacaaagctttcaggaataaatacagatagagttaaaattacggtttatggattaagtggattattagcaggaatagctggtatattacttacagcaagacttatatctgcacaaccaacagctgggacaggctatgaattagatgctatagctgcggctgttattggaggagctagtcttgcaggtggagaaggaactataacaggaactataataggggctttaataatgggtgtattaagaaatggacttaaccttttaaatgtttcagcattttggcaacaaatagttataggagctataattatagctgctgtatatggagataagttgaaaaataaaaaattaaattag

SEQ ID NO: 99971 - protein, 328 aa, Clostridium tetani E88
MIGGKNMTELSRENNKVSKKDIIQKFSTVLILVMLMIALTVMKPVFMTRNNIMTILLQTAVIAVIAIGETLVIITSGIDLSVGSLVAISGVASAIFMRDGMNMILACMLGILISTACGLINGFIVAKGNIPEFIVTLGMMSIVRGASLVVTQGLPVSGLPDGFQVLGTGKLFGVIPVPAVIMIILAMIFTLILRKTLIGRYTYAIGSNEEATKLSGINTDRVKITVYGLSGLLAGIAGILLTARLISAQPTAGTGYELDAIAAAVIGGASLAGGEGTITGTIIGALIMGVLRNGLNLLNVSAFWQQIVIGAIIIAAVYGDKLKNKKLN

SEQ ID NO: 99972 - DNA, 1137 bp, Pseudomonas syringae pv. tomato str. DC3000
  CDS (1)..(1137): transl_table=11
atgaatcaggtcaaacagttcttcacccgctacaaaatgctcgcgctggtgattgccattgccgttatctggctgtttttcagctggcagacggagggcggatttctgaccccgcgcaacctctccaacctgctgcgacagatgtccatcaccggcattctggcgtgtggcatggtgctggtcatcatcagtggcgagatcgacctgtcggtgggctcgatgctcggcctgctcggcggcctggcggcaattctcgatgtcgtttaccacgtaccgctgctggcaaacctgagcctggttgcgctgtgcgggctgatgatcggcctggccaatggttacatgactgcctacctgcgcattccgtccttcattgtcgggctgggcggcatgctggcctttcgcggcattctgctggggattaccggtggcacgaccatcgctccggtgtcgccttcgctggtctacgtcggccaagggtatttgccgcattctgtcggtacagggcttggcgtactgctgctggcgctgacgctgtttctgacctggaaacaacggcgcaacagagccctccacgggctaacggcccattcgatggttcgcgatgtgttacgcgtggtattgatcggcgcggtgctgggcgggtttgtctacatcctcaacagctacgacgggattccggttccggtgttgctgctgctggttttgctcggtgtgttcagttacgtcaccagccagacagtattcggacggcgcgtctatgccgtgggcagcaacatggaagccacgcggttatccggcatcaacgtacaggcggtgaagctttggatcttcggcatcatgggcgtgatgtgcgccttcgccgggctggtcaacaccgcgcgcctggccgcaggctcgccctcggccggcaacatgggcgaactggacgccattgccgcctgtttcatcggcggcacgtccatgcgcggcggctccggcaccgtgtatggcgccctgcttggcgcactggtgattaccagcctggacaacggcatgtcgatgctcgacgtcgacagttactggcagatgatcgtcaagggcggcatcctcgtgctggcggtgtgggtggacgtcagtacacgggccgggcgccggtga

SEQ ID NO: 99973 - protein, 378 aa, Pseudomonas syringae pv. tomato str. DC3000
MNQVKQFFTRYKMLALVIAIAVIWLFFSWQTEGGFLTPRNLSNLLRQMSITGILACGMVLVIISGEIDLSVGSMLGLLGGLAAILDVVYHVPLLANLSLVALCGLMIGLANGYMTAYLRIPSFIVGLGGMLAFRGILLGITGGTTIAPVSPSLVYVGQGYLPHSVGTGLGVLLLALTLFLTWKQRRNRALHGLTAHSMVRDVLRVVLIGAVLGGFVYILNSYDGIPVPVLLLLVLLGVFSYVTSQTVFGRRVYAVGSNMEATRLSGINVQAVKLWIFGIMGVMCAFAGLVNTARLAAGSPSAGNMGELDAIAACFIGGTSMRGGSGTVYGALLGALVITSLDNGMSMLDVDSYWQMIVKGGILVLAVWVDVSTRAGRR

SEQ ID NO: 99974 - DNA, 966 bp, Salmonella enterica subsp. enterica serovar Typhi Ty2
  CDS (1)..(966): transl_table=11
atgacaacccaggctgtttctggtcgccgttatttcactaaagcgtggcttcttgagcagaagtcgctcattgccctgctggtgttgatcgcgattgtttcgacgttgagccccaacttttttaccgttaataatctgttcaatattcttcaacagacctccgtcaacgccattatggcggtggggatgacgttggtgattctgacatcggggatcgatctgtccgtcggttccctgctggcactcaccggtgcggttgccgcttcaatcgtcggcgttgaagtgaatgcgctggtcgcggttgccgccgcgctggcgctgggcgctgcgattggcgccgtcactggcgttatcgtcgcgaagggccgcgtacaggcgtttatcgctacgctggtgatgatgctgctactgcgtggcgtgacgatggtttacaccgacggtagcccggtcaacaccggctttaccgataacgccgatctgtttggctggttcggtatcggtcgtccgctgggcgttcctacgccggtctggatcatggctatcgtctttatcgccgcctggtatatgctgcatcacacccgtctgggacgctatatctacgcgctgggcggtaacgaagcggcgacgcgtctgtctggcattagcgtgagcaaagtgaaaattatcgtctattcactttgcggcctgacagcatcgctggcgggcatcattgaagtggcgcgcctctcttccgcgcagccgacggcgggtaccggctatgagctggatgctattgccgccgtggtgctgggcggcaccagccttgcaggtggtaaagggcgcattgttgggacattgatcggcgcattgattctcggcttccttaataatggtttgaatttgttaggtgtttcctcctattaccagatgatcgtcaaagcggtggtgattttgctggcggtactggtagacaacaaaaagcagtaa

SEQ ID NO: 99975 - protein, 321 aa, Salmonella enterica subsp. enterica serovar Typhi Ty2; identical to SEQ ID NO: 38800

SEQ ID NO: 99976 - DNA, 999 bp, Streptomyces avermitilis MA-4680
  CDS (1)..(999): transl_table=11
atgtccgcatccggtgtcgaggccggcagggggagcggcgtcgtccgcggcgagcggctcagcgccctggcccagcagcacggtgcgctggtggccctcctggtactggcacttgtcgcctcgttctccttcgactccttcgccaccggcgacaacatcgagaacctggccatgacgtcgtcgttcctggccgtggtcgcactcggcatgaccttcgtcatcgtcaccggaggcatcgacctgtccgtcgggtcggtcttcgccctcggtggcgtactcgccgcctggggctcgcggtacggcgccctggtcgccctgctgctgccgctcgcggtctgcggtctgatcggatgcgtcaacggtctgctcatcgccaggacccggctcgcccccttcatcgtcacgctcgccgcgatgctcgccgcacggggtctcatgctcaacatcaccgacgaaggcgccaccacgtatctggtcgacaaggaaacggtcttcgtccacctcggccagggcagactgctgggcgtcggcgcgccggtgtggatcaccggcgcgctgttcctggcgggtgccgtcgccctgcgccgcactcgcttcggccagaacgtctacgccgtcgggggcaacgaggacgccgccgctctcatgggagctccggtcgcccgcaccaagatcacggtgtacacgctttccgcgctgctcgccggattggcaggtgccctgaacgcggcctggctcgcctccggcgtcacgatcctcggttacggcatggagctggacgccatcgccgccgtcgtcatcggcggcacgctgctctccggtggcctcggcttcgtcagcggatccctggtgggtgtgctgctgctgaagacgatccagaacatcatcaaccagatcggctcactcgactccgcctaccagcaggtggtcagcggtggcttcctcgtggtggtcatcatcgcccagacctggctggccaggcggcgccgggtcgcctga

SEQ ID NO: 99977 - protein, 332 aa, Streptomyces avermitilis MA-4680
MSASGVEAGRGSGVVRGERLSALAQQHGALVALLVLALVASFSFDSFATGDNIENLAMTSSFLAVVALGMTFVIVTGGIDLSVGSVFALGGVLAAWGSRYGALVALLLPLAVCGLIGCVNGLLIARTRLAPFIVTLAAMLAARGLMLNITDEGATTYLVDKETVFVHLGQGRLLGVGAPVWITGALFLAGAVALRRTRFGQNVYAVGGNEDAAALMGAPVARTKITVYTLSALLAGLAGALNAAWLASGVTILGYGMELDAIAAVVIGGTLLSGGLGFVSGSLVGVLLLKTIQNIINQIGSLDSAYQQVVSGGFLVVVIIAQTWLARRRRVA

SEQ ID NO: 99978 - DNA, 1947 bp, Streptomyces avermitilis MA-4680
  CDS (1)..(1947): transl_table=11
gtggccactgacacgctcaagagcacaacgggcgcgagtggcgcctcggcggtccgccggctcctgctcgacaacggggcgctcaccgcgctcatcgtcctcgtcgtcgcgatgtcggcgctgtccggcgacttcctgacgacggacaacctgctcaacatcggcgtccaggcggccgtgaccgccatcctcgccttcggtgtgaccttcgtgatcgtctcggcgggcatcgacctgtcggtcggttcggtcgcggcgctctcggccaccgtccttgcctggacggcgacttcgcacggcctgccggtcgtggtcgccgtggccctcgcggtcgccaccggcgtagcgtgcggtctcgtcaacggcttcctgatctcgtacgggaaactaccgccgttcatcgcgacgctcgccatgctgtcggtgggccgcggtctgtcgctggtgatctcgcagggcagcccgatccccttccccgactcggtctcgcacctcggtgacacgctcggcggctggctgccggtgcccgtcctggtgatgatcgtgatgggtctgatcaccgccctgatcctcggccgtacgtacatcgggcgctccatgtacgcgatcggcggcaacgaggaggccgcgcgcctgtcgggcctgcgggtgaagaagcagaagctcgcgatctacgcgctgtcgggtctgttcgcggccgccgcgggcatcgtgctcgcctcccggctctcctccgcgcagccgcaggccgcacaggggtacgagctggacgcgatcgccgcggtcgtcatcggcggcgcctcgctcgcgggcggtacgggcaaggcgtccgggacgctgatcggcgcgctgatcctggcggtgctgcgcaacgggctgaatctgctgtccgtgtccgcgttctggcagcaggtcgtcatcggtgtcgtgatcgcgctggcggtgctcctcgacacgctgcgccgcaaggccggggcgactccggtggccggtgcctcgagtggcggcaagggcaagcaggcgatgacgtatgtgatcgcggccgtggtcgcggcggccgtcgtgggggcgatgtccttcctgcacaacggctcgtcggcttcgccgacgcagaagatgggcctgtccctctcgaccctcaacaaccccttcttcgtacagatcaagacgggtgcgcaggaggaggcgaagaagcagggcgccgacctgacggtcacggacgcgcagaacgacgcctcgcagcaggccaaccaggtgcagaacttcaccagctcgggcgtcggttcgatcatcgtcaacccggtggactcggacgcggcgggcccggcggtgcgctccgccaacaaggccgacattcccgtcgtgggcgtcgaccggggcgtcaacaaggcggacacggccgcgctggtcgcctccgacaacgtcgcgggcggcaggctgggcgccaaggcgctggccgagaagctgggcggcaagggcaggatcgtgatcctccagggtctggccggcacctccgccagccgtgagcgcggggcgggcttcgccgagggcctgaaggcctaccccggcatcaaggtcgtcgcccggcagcccgcggacttcgaccgcaccaaggggctcgacgtcatgacgaacctgctccaggcgcacccggacgtccagggcgtcttcgccgagaacgacgagatggcgctcggcgcgatcaaggcgctgggtgccaaggccggaaagtcggtctcggtcgtgggcttcgacggcacgccggatgggctgacggcggtcaagtcgggcacgctgtacgcgtccgtggcgcagcagccgaaggagctgggccggatcgcggtgcagaacgcgctgcgggcggccgagggcaagaaggtcgacaagacggtgaaggtgccggtgaaggtggtcacggcgaagaacgtggcggccttcggcggctga

SEQ ID NO: 99979 - protein, 648 aa, Streptomyces avermitilis MA-4680
MATDTLKSTTGASGASAVRRLLLDNGALTALIVLVVAMSALSGDFLTTDNLLNIGVQAAVTAILAFGVTFVIVSAGIDLSVGSVAALSATVLAWTATSHGLPVVVAVALAVATGVACGLVNGFLISYGKLPPFIATLAMLSVGRGLSLVISQGSPIPFPDSVSHLGDTLGGWLPVPVLVMIVMGLITALILGRTYIGRSMYAIGGNEEAARLSGLRVKKQKLAIYALSGLFAAAAGIVLASRLSSAQPQAAQGYELDAIAAVVIGGASLAGGTGKASGTLIGALILAVLRNGLNLLSVSAFWQQVVIGVVIALAVLLDTLRRKAGATPVAGASSGGKGKQAMTYVIAAVVAAAVVGAMSFLHNGSSASPTQKMGLSLSTLNNPFFVQIKTGAQEEAKKQGADLTVTDAQNDASQQANQVQNFTSSGVGSIIVNPVDSDAAGPAVRSANKADIPVVGVDRGVNKADTAALVASDNVAGGRLGAKALAEKLGGKGRIVILQGLAGTSASRERGAGFAEGLKAYPGIKVVARQPADFDRTKGLDVMTNLLQAHPDVQGVFAENDEMALGAIKALGAKAGKSVSVVGFDGTPDGLTAVKSGTLYASVAQQPKELGRIAVQNALRAAEGKKVDKTVKVPVKVVTAKNVAAFGG

SEQ ID NO: 99980 - DNA, 936 bp, Bacillus cereus ATCC 14579
  CDS (1)..(936): transl_table=11
atggctaagaaggggaatgtattacaacaactcggttctttaatcggtttagtattaattatcgtcgtaattacagctttaaatccagcgttcattgaaattccaaatttatttaatatactgcgtcaagtatcgattaatgcgcttattgcatttggaatgaccttcgtaattttaacagggggtattgacttatcggtaggttctattttagcattatcaagtgcacttgttgctggaatgatggcaagtggcatggatccgttccttgcaatggcagttggactattagcaggtcttgtaatgggaattgtaaacggtatcatcattgcgaaaggaaaagtagctccatttattgcaactttagcaacaatgactatttttcgtgggttgacgcttgtttatatggacggacgtccgatcactggtcttggtgatcatttaatgttccaaatgtttggccgcggttattttcttggtattccggtaccagctgttacaatgatgatcgctttcgcagtactgtacttcattttgaagaaaacgacatttggtcgccgtacatttgcaattggtggaaatgaagaagcagcagcactatcaggtattaatgttacgagaattaaagtaatgatttacggtctttccggaattttggcagcgcttgcaggtattgtcttaacgtcacgattagattctgcacagccgactgcaggtacttcttatgaattagatgcaattgcagcagttgtattaggtggaacaagtctttctgggggaagaggatggattgttggtacattcatcggtgtacttattatcggtgtactaaataacggtttaaatttattaggtgtatcttctttcttccaacaagttgtaaaaggacttgtaatcttattagctgtattaattgatcgtagaaaagaagcgtaa

SEQ ID NO: 99981 - protein, 311 aa, Bacillus cereus ATCC 14579
MAKKGNVLQQLGSLIGLVLIIVVITALNPAFIEIPNLFNILRQVSINALIAFGMTFVILTGGIDLSVGSILALSSALVAGMMASGMDPFLAMAVGLLAGLVMGIVNGIIIAKGKVAPFIATLATMTIFRGLTLVYMDGRPITGLGDHLMFQMFGRGYFLGIPVPAVTMMIAFAVLYFILKKTTFGRRTFAIGGNEEAAALSGINVTRIKVMIYGLSGILAALAGIVLTSRLDSAQPTAGTSYELDAIAAVVLGGTSLSGGRGWIVGTFIGVLIIGVLNNGLNLLGVSSFFQQVVKGLVILLAVLIDRRKEA

SEQ ID NO: 99982 - DNA, 936 bp, Bacillus anthracis str. Ames
  CDS (1)..(936): transl_table=11
atggctaagaaggggaatgtattacaacaacttgggtctttaattggactagcgctaattattgtagtaattacggctttaaatccagcgtttattgaaattccaaatttatttaatatactgcgtcaagtatcgattaatgcgcttattgcattcggaatgacctttgtaattttaacagggggtattgacttatcggtaggttctattttagcattatcaagtgcacttgttgctggaatgatggcaagtggcatggacccgttccttgcgatggcagttggattattagctggtcttgtaatgggaattgtaaacggtatcatcatagcgaagggaaaagtagctccgtttattgcgactttagcaacaatgactatttttcgcgggttgacgcttgtttatatggacggacgtccgatcactggtcttggtgatcatttaatgttccaaatgtttggccgcggttattttctcggtattccagtaccagctgttacaatgatgatcgctttcgcagtactgtacttcattttgaagaaaacgacatttggtcgccgtacatttgcaattggtggaaatgaagaagcagcagcattatcaggtattaatgttacgaaaattaaagtaatgatttacggtctttccggaattttggcagcgtttgcaggtattgtcttaacatcacgactagattctgcacagccgactgcaggtacttcttacgaattagatgcaattgcagcagttgtattaggtggaacaagtctttctgggggaagaggatggattgttggtacattcatcggtgtacttattatcggtgtactaaataacggtttaaatttattaggtgtatcttctttcttccaacaagttgtaaaaggacttgtaatcttactagctgtattaattgatcgtcgaaaagaagcgtaa

SEQ ID NO: 99983 - protein, 311 aa, Bacillus anthracis str. Ames
MAKKGNVLQQLGSLIGLALIIVVITALNPAFIEIPNLFNILRQVSINALIAFGMTFVILTGGIDLSVGSILALSSALVAGMMASGMDPFLAMAVGLLAGLVMGIVNGIIIAKGKVAPFIATLATMTIFRGLTLVYMDGRPITGLGDHLMFQMFGRGYFLGIPVPAVTMMIAFAVLYFILKKTTFGRRTFAIGGNEEAAALSGINVTKIKVMIYGLSGILAAFAGIVLTSRLDSAQPTAGTSYELDAIAAVVLGGTSLSGGRGWIVGTFIGVLIIGVLNNGLNLLGVSSFFQQVVKGLVILLAVLIDRRKEA

SEQ ID NO: 99984 - DNA, 972 bp, Rhodopirellula baltica SH 1; identical to SEQ ID NO: 38823
  CDS (1)..(972): transl_table=11

SEQ ID NO: 99985 - protein, 323 aa, Rhodopirellula baltica SH 1; identical to SEQ ID NO: 38824

SEQ ID NO: 99986 - DNA, 939 bp, Chromobacterium violaceum ATCC 12472
  CDS (1)..(939): transl_table=11
atgaccccgcaacagaaagccaatttgcaacgcctcggccccttcatcgccctggtgctggtggccgtcggcctgtccgtgatgagtccggacttcctcaccgtcaacaacctgctgaacgtgatgcgccaggtgtcgatcaacgcgctgatcgccttcggcatgacgctggtgatcctgctgggcggcattgacctgtcggtcggctccatcctggcgctgtcctcggtgctgaccgccaccctgttgcgcgcaggcgtggatccgatgctggcgacgctgctgggcatcctggccggcgcggcgatgggcctgttcaacggcctggtggtcagcaagggcaaggtggcgccgttcatcgccacgctggcgtcgatgaccatcctgcgcggcctggcgctggtgttttccaacggcagcccgatcaccggcttcgacagcgagctgttctccatgctgggcggcggctatgtcgccggcctggtcccggtgccggtggtgtggatgctgatcctgttcgccggcttctggttcctgctgaagaagacggtgttcggccgccacctgtacgccaccggcggcaacgaggaggcggcgcggctgtccggcgtcaaggtggacagcgtcaagctgtgggtgtacaccacctccggcgcgatggcggcgatggccggcgtggtgctgacctcgcgcctcaattcggcgcagccgactgccggcaccggctacgagctggacgcgatcgccgcggtggtgctgggcggcaccagcctcagcggcggccgcggctggattttcggcactctgatcggcgcgctgctgatcggcgtgctcaacaacggcttgaacctgctgggcgtgtcctcgttctaccagcaggtgatcaagggcgcggtgatcctgctggcggtactgctggatcgcagcaacaagaagtga

SEQ ID NO: 99987 - protein, 312 aa, Chromobacterium violaceum ATCC 12472
MTPQQKANLQRLGPFIALVLVAVGLSVMSPDFLTVNNLLNVMRQVSINALIAFGMTLVILLGGIDLSVGSILALSSVLTATLLRAGVDPMLATLLGILAGAAMGLFNGLVVSKGKVAPFIATLASMTILRGLALVFSNGSPITGFDSELFSMLGGGYVAGLVPVPVVWMLILFAGFWFLLKKTVFGRHLYATGGNEEAARLSGVKVDSVKLWVYTTSGAMAAMAGVVLTSRLNSAQPTAGTGYELDAIAAVVLGGTSLSGGRGWIFGTLIGALLIGVLNNGLNLLGVSSFYQQVIKGAVILLAVLLDRSNKK

SEQ ID NO: 99988 - DNA, 981 bp, Gloeobacter violaceus PCC 7421; identical to SEQ ID NO: 38827
  CDS (1)..(981): transl_table=11

SEQ ID NO: 99989 - protein, 326 aa, Gloeobacter violaceus PCC 7421; identical to SEQ ID NO: 38828

SEQ ID NO: 99990 - DNA, 972 bp, Photorhabdus luminescens subsp. laumondii TTO1; identical to SEQ ID NO: 38829
  CDS (1)..(972): transl_table=11

SEQ ID NO: 99991 - protein, 323 aa, Photorhabdus luminescens subsp. laumondii TTO1; identical to SEQ ID NO: 38830

SEQ ID NO: 99992 - DNA, 999 bp, Clostridium difficile 630
  CDS (1)..(999): transl_table=11
atgagttcaataactaagcataaagaagaaaaatcttctccattattgacaaaattaacaagtgtatttagagaccaagggagtgcagctgtaggacttgtaataatttttataataatgagtgtagcttcatctaactttttaactttagataatttaattaatgttggaagacaaatatcaataaatgcaatacttgcagtaggtatgacatttgtaataattacaggaggaatagatttaagtgtaggagcagtaattgctttagtaggtacattttgggctacaacagtagtgaattataatgcacctatatgggtaggtatgatacttgcattaacaatagggacaatattaggagtcataaaaggtgcaattatttcaacacaaaaactacctccattcattgtaactttagccatgttaacgataataagtggggcaagctttgtatttacaggaggaagacctatatcagtaaatacagatgcatttaagatgctcggtagaggatatattggaccaataccaataccagttataattatgattatagttgtaatagcaggacattttctattaaaaagaactaattttggacgtcctgtacatgcagtaggtggaaatgaagaggccgctagattatgtggagtaaaagtaaataaagttatagtaaaagtatacgcactagctggactactaacagcattagctgggataatactatcatcacgtttggcatcaggttcaccaactgttggagatggagcagaattggatgctatagcagccgttgtgcttggtggcactaatatgatgggtggttctggttctatagtaggtacatgtataggtgtcggaataataggaatattaggaaatggattaaacttattaagtgtatcttcatataatcaaatgattataaaaggtttggtaatgttatttgctatatggataaataatataaaattaaaaaaatcagctaaatctaaatag

SEQ ID NO: 99993 - protein, 332 aa, Clostridium difficile 630
MSSITKHKEEKSSPLLTKLTSVFRDQGSAAVGLVIIFIIMSVASSNFLTLDNLINVGRQISINAILAVGMTFVIITGGIDLSVGAVIALVGTFWATTVVNYNAPIWVGMILALTIGTILGVIKGAIISTQKLPPFIVTLAMLTIISGASFVFTGGRPISVNTDAFKMLGRGYIGPIPIPVIIMIIVVIAGHFLLKRTNFGRPVHAVGGNEEAARLCGVKVNKVIVKVYALAGLLTALAGIILSSRLASGSPTVGDGAELDAIAAVVLGGTNMMGGSGSIVGTCIGVGIIGILGNGLNLLSVSSYNQMIIKGLVMLFAIWINNIKLKKSAKSK

SEQ ID NO: 99994 - DNA, 1200 bp, Burkholderia vietnamiensis G4
  CDS (1)..(1200): transl_table=11
atgaataccgaactttcctcctcttccgccgtgccgccggacgccgacgcgcgccgcctgcgcggccatccgctgcggcagatcttcgtgcgctacaaggtgctcgcgctgctgttcgcggtcgtcgcgatctgggcgttcttctcggtgctgaccgacggcgcgttcgtcacgccgcgcaacgtgtcgaacctgctgcggcagatgtcgatcaccggcatgctcgcgtgcgggatggtgttcgtcatcatcgccggcgagatcgacctgtcggtcggctcgctgctcgggctgctcggcggcgtcgcggcgatcctcgacgtcaaccgccactggccggtggccgcgacggtgccggcggtgctcgcgctcggcgtgctggtcgggctgttcaatggctggtggtcgacctatcggcgcgtgccgtcgttcatcgtcgggctcggcgggatgctcgcattccgcgggatcctgctcggcgtgaccggcggctcgacgatcgcgccggtgtccgacggcttcgtgttcctcggccagggctatctgccgcgcgcggtgggcgacggcctcgcggtgctgttgttcgcgctcgtcgcgctgctggtcgtgcggcagcgcggcacgcggcgccgctaccggctcgcggtcgtgccgccgtggcaggacgtcgcgaaggtcgtcggcgccggcgccgtgctgttcgcgttcgtcgcgacgctcgatcgctacggcggcattccggtgccggtgctgctgctgctcgcgctgctcggcgtgttctcgtggatcgcgacgcagacggtgttcggccggcgcatctatgcggtcggctcgaacctggaggccacgcgcctgtccggcgtcgataccgatcgcgtgaagctcgcgatcttcgcgctgatggggctgatgtgcgcgtttgccggcatcgtcaacaccgcgcggctcgcggccggctcgccgtcggccggcacgatgggcgagctcgacgcgatcgccgcgtgcttcatcggcggcacgtcgatgcgcggcgggtcgggcaccgtgtacggcgcgctgatcggcgcgctcgtgatggcgagcctcgacaacgggatgtcgatgctcgacgtcgacgcgtactggcagatgatcgtgaagggcgcggtgctggtgctggccgtgtggatcgacgtggtgtcgcgctcgaaccggcgctga

SEQ ID NO: 99995 - protein, 399 aa, Burkholderia vietnamiensis G4
MNTELSSSSAVPPDADARRLRGHPLRQIFVRYKVLALLFAVVAIWAFFSVLTDGAFVTPRNVSNLLRQMSITGMLACGMVFVIIAGEIDLSVGSLLGLLGGVAAILDVNRHWPVAATVPAVLALGVLVGLFNGWWSTYRRVPSFIVGLGGMLAFRGILLGVTGGSTIAPVSDGFVFLGQGYLPRAVGDGLAVLLFALVALLVVRQRGTRRRYRLAVVPPWQDVAKVVGAGAVLFAFVATLDRYGGIPVPVLLLLALLGVFSWIATQTVFGRRIYAVGSNLEATRLSGVDTDRVKLAIFALMGLMCAFAGIVNTARLAAGSPSAGTMGELDAIAACFIGGTSMRGGSGTVYGALIGALVMASLDNGMSMLDVDAYWQMIVKGAVLVLAVWIDVVSRSNRR

SEQ ID NO: 99996 - DNA, 1098 bp, Bradyrhizobium sp. ORS278
  CDS (1)..(1098): transl_table=11
atgtccgttccatccgagaccagccccgcgagccccgacgtcaccttcaccaatgtcggcgccgcacgctggtggcaccgcggcgtgttcgcctcgcagaccgcctatgtgacgctggcgctggtcgcgctcatcatcgtgatgagcttcgccagcccttatttcctcaccgaaggcaacctgcagaacgtcgccaagaacttctccttcatcgcgatcgcgacgctcggcatcaccttcgtcatcatcaccgggggcatcgacctgtcggtcggctcgatgatgtgcctcgccgcgatgatcacctcgatggtgatggtgacgctgtcgacgcccggcacgccgctggccgcgctgttcgtgcatctcgccgccgacggcaagaccgtggtcgccaacgtgcccgggcttatcctgctggtgtcggtgctggcagggcttgccgtgtcggtgctggtcggcctcatcaacgggatgtgcatcgccattctcggcctgtcgccgtttgtgaccacgctcggcatgctctcgatcgtgcgcggcctctgctacgtcatctccaacggccgcggcagctttcccggcggtccggatgccgactatttctatgcgctgacctcgggcgacgtctatggcgtgccggcgccgttcatctacctgatggtgctggcgctggcgatggcgctggttctgcatcacagcgcgttcggccgccacgtcttcgcgatcggcggcaacgagaaggcggccgagctgaccggcatctcggtgacgcgggtcaagatcgaggtctatgtgatcggcgcggtggctgcggggctgcagggcatcatcatctccggctggctgggctcggcgccggccaacatggcgacgtcctacgagctcaacgtgatcgccgccgccgtgatcggcggtgccaatctcgccggcggtctcggcggtccgctcggcgccatcgtcggctgcgtgctgctcgaggtgatcaggaacgggctggtgctggcgcaggtcaattcgtactggcagcagacgctggtcggcgtgatcatcatcgccgccgtactggtcgatcgcatccgctcgcggctgctgtag

SEQ ID NO: 99997 - protein, 365 aa, Bradyrhizobium sp. ORS278
MSVPSETSPASPDVTFTNVGAARWWHRGVFASQTAYVTLALVALIIVMSFASPYFLTEGNLQNVAKNFSFIAIATLGITFVIITGGIDLSVGSMMCLAAMITSMVMVTLSTPGTPLAALFVHLAADGKTVVANVPGLILLVSVLAGLAVSVLVGLINGMCIAILGLSPFVTTLGMLSIVRGLCYVISNGRGSFPGGPDADYFYALTSGDVYGVPAPFIYLMVLALAMALVLHHSAFGRHVFAIGGNEKAAELTGISVTRVKIEVYVIGAVAAGLQGIIISGWLGSAPANMATSYELNVIAAAVIGGANLAGGLGGPLGAIVGCVLLEVIRNGLVLAQVNSYWQQTLVGVIIIAAVLVDRIRSRLL

SEQ ID NO: 99998 - DNA, 936 bp, Bacillus thuringiensis serovar konkukian str. 97-27
  CDS (1)..(936): transl_table=11
atggctaagaaggggaatgtattacaacaacttgggtctttaattggactagcgctaattattgtagtaattacggctttaaatccagcgtttattgaaattccaaatttatttaatatactgcgtcaagtatcgattaatgcgcttattgcattcggaatgacctttgtaattttaacagggggtattgacttatcggtaggttctattttagcattatcaagtgcacttgttgctggaatgatggcaagtggcatggacccgttccttgcgatggcagttggattattagctggtcttgtaatgggaattgtaaacggtatcatcatagcgaagggaaaagtagctccgtttattgcgactttagcaacaatgactatttttcgcgggttgacgcttgtttatatggacggacgtccgatcactggtcttggtgatcatttaatgttccaaatgtttggccgcggttattttctcggtattccagtaccagctgttacaatgatgatcgctttcgcagtactgtacttcattttgaagaaaacgacatttggtcgccgtacatttgcaattggtggaaatgaagaagcagcagcattatcaggtattaatgttacgagaattaaagtaatgatttacggtctttccggaattttggcagcgcttgcaggtgttgtcttaacatcacgactagattctgcacagccgactgcaggtacttcttacgaattagatgcaattgcagcagttgtattaggtggaacaagtctttctgggggaagaggatggattgttggtacattcatcggtgtacttattatcggtgtactaaataacggtttaaatttattaggtgtatcttctttcttccaacaagttgtaaaaggacttgtaatcttactagctgtattaattgatcgtcgaaaagaagcgtaa

SEQ ID NO: 99999 - protein, 311 aa, Bacillus thuringiensis serovar konkukian str. 97-27
MAKKGNVLQQLGSLIGLALIIVVITALNPAFIEIPNLFNILRQVSINALIAFGMTFVILTGGIDLSVGSILALSSALVAGMMASGMDPFLAMAVGLLAGLVMGIVNGIIIAKGKVAPFIATLATMTIFRGLTLVYMDGRPITGLGDHLMFQMFGRGYFLGIPVPAVTMMIAFAVLYFILKKTTFGRRTFAIGGNEEAAALSGINVTRIKVMIYGLSGILAALAGVVLTSRLDSAQPTAGTSYELDAIAAVVLGGTSLSGGRGWIVGTFIGVLIIGVLNNGLNLLGVSSFFQQVVKGLVILLAVLIDRRKEA

SEQ ID NO: 100000 - DNA, 969 bp, Erwinia carotovora subsp. atroseptica SCRI1043
  CDS (1)..(969): transl_table=11
atgagttctcaatctatcgcggcaaaacgctggtttagcaaagagtggttactggagcagaaatcgctgatcgcgctcctgatcctgattgcagttgtttccgccctgagccctaactttttcaccctgaataacctgttcaatattcttcagcagacgtcggtgaatgccattatggccgtcggcatgacgctggtgatactgacctcgggaattgatttgtcggtgggttcactgctggcgctgacgggggctgtagcggcatccatcgttgggcttgaagtgaatgcgctggtggctgtgtttggcgcactggcggtgggtgcgctgattggcgcgggcaccggtgtcatcgtttctaaaggtaaagtacaggcgtttatcgccacgctggtcatgatgctgctactgcgcggcgtgacgatggtctataccaacggtagcccggtgaatactggcttctccgacgttgcagatgcttttggttggttcggcattggtcgtccgctgggtattccgacgccaatctggattatggctatcgtattcgctgcggcctggtacatgctgcaccatacgcgcctgggtcgctatatctatgcgttgggcggtaacgaatccgcaacccgtttatccggcatcagcgttgataaaatcaagattattgtttattccctgtgtgggctgctgtctgccctggcgggaattattgaagtcgcacgtttgtcctctgcacagcctacggcgggtacagggtatgagctggatgctatcgcggctgtggtattgggcggcaccagtctggctgggggtaaagggcgtatcgttggcacgttgatcggcgcacttatccttggtttcctcaacaacggactgaatttattaggtgtttcttcttactaccaaatgatcgtcaaagcagtcgtcattttgctggcggttctggtagataacaaaagcagtaaataa

SEQ ID NO: 100001 - protein, 322 aa, Erwinia carotovora subsp. atroseptica SCRI1043
MSSQSIAAKRWFSKEWLLEQKSLIALLILIAVVSALSPNFFTLNNLFNILQQTSVNAIMAVGMTLVILTSGIDLSVGSLLALTGAVAASIVGLEVNALVAVFGALAVGALIGAGTGVIVSKGKVQAFIATLVMMLLLRGVTMVYTNGSPVNTGFSDVADAFGWFGIGRPLGIPTPIWIMAIVFAAAWYMLHHTRLGRYIYALGGNESATRLSGISVDKIKIIVYSLCGLLSALAGIIEVARLSSAQPTAGTGYELDAIAAVVLGGTSLAGGKGRIVGTLIGALILGFLNNGLNLLGVSSYYQMIVKAVVILLAVLVDNKSSK

SEQ ID NO: 100002 - DNA, 1062 bp, Yersinia pseudotuberculosis IP 32953
  CDS (1)..(1062): transl_table=11
atgaacgagagaacccaaatgctgcatacggcacgctctacaccggccaaaagcgctgataagccgcgttatctgaagctttcgcgcttattactggaagggcgcgccttctttgcattattggtcattattgccgtgttttcactcctctcacccaactacttttctggcgcaaatttcctgacgatggcctcacatgtggcgatatttggcctcccggcgattggaatgctactggttattcttaatggtggaatcgatctttctgttggttcgacattgggtctgtctggcgtattcgcgggttttttaatgcaaggcatcagcattgagtcacttggcgtagtgctttatttgccggtctgggcggtggtaattatgaccctggcgctgggcgcattggttgggcttatcaatggcatcttgatcgccatttttcgggtacctgcttttgtggcaacactcggttcactctatgtagcacgtggcgcggcactgctgatgaccaatggcttaacctacaacaaactcgcgggtagccccgagctaggtaataccggttttgactggttgggatttaatcgcctctttaatattccgattggcgtgctggctctgggcgtcgtggcactggcctgtggatttttactgatgcgtaccgcatttggtcgctggttgtatgcctcgggaggcaatgagcgtgccgcggatctctcgggtgttccggttaaattcgtcaaaatcagcgtttatgttctctccggggtttgtgcggcactggccgggttggtgctctcttcgcagttaacctccgcaggcccgacagcgggcaccacgtatgagttgaccgccattgcggcggtggtgattggcggtgcggcgctgaccggagggcgtggcaacgttcgaggcacactacttggggcttttgttattggctttctttccgatggcttggtgattattggcgtatccgcctattggcagaccgtatttactggtgcggtgattgttatggcggtattgctcaatacgttgcagtacggccgacgaagtaaataa

SEQ ID NO: 100003 - protein, 353 aa, Yersinia pseudotuberculosis IP 32953
MNERTQMLHTARSTPAKSADKPRYLKLSRLLLEGRAFFALLVIIAVFSLLSPNYFSGANFLTMASHVAIFGLPAIGMLLVILNGGIDLSVGSTLGLSGVFAGFLMQGISIESLGVVLYLPVWAVVIMTLALGALVGLINGILIAIFRVPAFVATLGSLYVARGAALLMTNGLTYNKLAGSPELGNTGFDWLGFNRLFNIPIGVLALGVVALACGFLLMRTAFGRWLYASGGNERAADLSGVPVKFVKISVYVLSGVCAALAGLVLSSQLTSAGPTAGTTYELTAIAAVVIGGAALTGGRGNVRGTLLGAFVIGFLSDGLVIIGVSAYWQTVFTGAVIVMAVLLNTLQYGRRSK

SEQ ID NO: 100004 - DNA, 936 bp, Bacillus cereus E33L
  CDS (1)..(936): transl_table=11
atggctaagaaggggaatgtattacaacaacttgggtctttaattggactagcgctaattattgtagtaattacggctttaaatccagcgtttattgaaattccaaatttatttaatatactgcgtcaagtatcgattaatgcccttattgcattcggaatgacctttgtaattttaacagggggtattgacttatcggtaggttctattttagcattatcaagtgcacttgttgctggaatgatggcaagtggcatggacccgttccttgcgatggcagttggattattagctggtcttgtaatgggaattgtaaacggtatcatcatagcgaagggaaaagtagctccatttattgcgactttagcaacaatgactatttttcgcgggttgacgcttgtttatatggacggacgtccgatcactggtcttggtgatcatttaatgttccaaatgtttggccgcggttattttctcggtattccagtaccagctgttacaatgatgatcgctttcgcagtactttacttcattttgaagaaaacgacatttggtcgccgtacatttgcaattggtggaaatgaagaagcagcagcattatcaggtattaatgttacgagaattaaagtaatgatttacggtctttccggaattttggcagcgcttgcaggtattgtcttaacatcacgactagattctgcacagccgactgcaggtacttcttacgaattagatgcaattgcagcagttgtattaggtggaacaagtctttctgggggaagaggatggattgttggtacattcatcggtgtacttattatcggtgtactaaataacggtttaaatttattaggtgtatcttctttcttccaacaagttgtaaaaggacttgtaatcttactagctgtattaattgatcgtcgaaaagaagcgtaa

SEQ ID NO: 100005 - protein, 311 aa, Bacillus cereus E33L
MAKKGNVLQQLGSLIGLALIIVVITALNPAFIEIPNLFNILRQVSINALIAFGMTFVILTGGIDLSVGSILALSSALVAGMMASGMDPFLAMAVGLLAGLVMGIVNGIIIAKGKVAPFIATLATMTIFRGLTLVYMDGRPITGLGDHLMFQMFGRGYFLGIPVPAVTMMIAFAVLYFILKKTTFGRRTFAIGGNEEAAALSGINVTRIKVMIYGLSGILAALAGIVLTSRLDSAQPTAGTSYELDAIAAVVLGGTSLSGGRGWIVGTFIGVLIIGVLNNGLNLLGVSSFFQQVVKGLVILLAVLIDRRKEA

SEQ ID NO: 100006 - DNA, 933 bp, Mannheimia succiniciproducens MBEL55E
  CDS (1)..(933): transl_table=11
atgtcagcaattaaattaaatgtgcgggacgcaggtactcttgtcgggttagtgattatttttgtggttttctcatttttatcccccgtatttttcaccgtaccgaatctattaaatattctgcaacaatcatcactgaacgcagcaattgcacttggtatgactttagtgattatttccgcaggaattgatttatccgtcggtcccaccgcggcattgtccgcagtgcttggcgccagtttaatggtctccggcgttcccgttccgattgcggttttaggcgccctttgtatcgggtctttaggcgggcttttcaatggcgttttaatagcctatgccggtttgcagcctttcattgttacattaggcagtctttctctttatcgagcattatctttgatttatactggcggcaatcccatatttggtatcccggcggaatttagagcgtttatgaacggttctttattcggtattccaagctccattttaattgttgcaagtattgcattgattctatgggtagtattaaataaaaccccgttgggcgaatatatttttgctgtcggcggtaatgaggaagcggctcgggtttgtagcgttcctgtggcaaaaaccaaagttgcggtttatatgatttccggttttttggcttcggttgcaggtttagtactcgttggccgtcttggtgcggcagatcctaccctgggtaatttatgggagcttgatgctattgccgccgccgcaatcggcggagcatcactgatggggggaaaaggaagcattataggtaccatactgggtgcggttattctcggcgcattacgtaatggtctaacgctgttaaatattcaggcattctatcaattactcgcaacaggtttaattattattgtggccatgttaattgatagagcaacaagaggtaaataa

SEQ ID NO: 100007 - protein, 310 aa, Mannheimia succiniciproducens MBEL55E
MSAIKLNVRDAGTLVGLVIIFVVFSFLSPVFFTVPNLLNILQQSSLNAAIALGMTLVIISAGIDLSVGPTAALSAVLGASLMVSGVPVPIAVLGALCIGSLGGLFNGVLIAYAGLQPFIVTLGSLSLYRALSLIYTGGNPIFGIPAEFRAFMNGSLFGIPSSILIVASIALILWVVLNKTPLGEYIFAVGGNEEAARVCSVPVAKTKVAVYMISGFLASVAGLVLVGRLGAADPTLGNLWELDAIAAAAIGGASLMGGKGSIIGTILGAVILGALRNGLTLLNIQAFYQLLATGLIIIVAMLIDRATRGK

SEQ ID NO: 100008 - DNA, 963 bp, Bacillus licheniformis ATCC 14580
  CDS (1)..(963): transl_table=11
atgaaaactcaaccggctgtgaaaaaaagccttaatgttgattctgtaatgcaaaagctcggtccgtttctcggcctgatcattctcgtcgtcatcgtatcattgttaaatccgagctttttagaaccgttaaatattttaaacttgttaagacaagtcgccattaatgcgctgatcgcgtttggcatgacctttgtcattttaaccggcggcatcgatctttccgtcggagcgattttggcgctgtcaagcgcattgatcgccggaatgatcgccggcggcatcgatcctgttttcgccgtcatcatcggctgcctgatcggagccctgctcggcttggtcaacgggctgttaatcacgaaaggtaaaatggccccgttcatcgcaacacttgccacaatgacgattttccgcggattgacgatggtttatacagacggcaatccgattacagggctcggcaaccactacggcttccagcttttcggacgcggttactttttaggcatccccgtccctgcgattacaatggcagccgcctttatcatcctctgggtgatccttcacaaaacgcctttcggccgccgcacatatgcaatcggcggaaatgaaaaagcggccttgatctcgggcattaaagttccgcgcgtcaaaatgatgatttattctcttgcaggcctattatccgcgttggctggagccatcttgacgtcacggctaaactcagcccagccgacggcaggcacttcctatgaactcgacgccatagccgcagtcgtattaggcggcacaagccttgccggaggaagaggacgaattgccggcacactcatcggcgtcctgatcatcggaacgttgaataacggcttgaacctgcttggcgtctcttcctttttccaaatggtcgtcaaaggtgtcgtcattttgatcgcagtcctgctggaccgcaagaaatccgcttaa

SEQ ID NO: 100009 - protein, 320 aa, Bacillus licheniformis ATCC 14580
MKTQPAVKKSLNVDSVMQKLGPFLGLIILVVIVSLLNPSFLEPLNILNLLRQVAINALIAFGMTFVILTGGIDLSVGAILALSSALIAGMIAGGIDPVFAVIIGCLIGALLGLVNGLLITKGKMAPFIATLATMTIFRGLTMVYTDGNPITGLGNHYGFQLFGRGYFLGIPVPAITMAAAFIILWVILHKTPFGRRTYAIGGNEKAALISGIKVPRVKMMIYSLAGLLSALAGAILTSRLNSAQPTAGTSYELDAIAAVVLGGTSLAGGRGRIAGTLIGVLIIGTLNNGLNLLGVSSFFQMVVKGVVILIAVLLDRKKSA

SEQ ID NO: 100010 - DNA, 978 bp, Burkholderia pseudomallei K96243
  CDS (1)..(978): transl_table=11
atgaacactcagaccctgtcccgtctcgacgcggcgcccaggcgcgtgaacgtcgcggagctcgcgagccgcttcggcatcccgatcgtcttcgtcgcgctgtgcgtcgtgctcgcgttcgcgagcccgtacttcctcacctggcgcaactggagcgacatcctgcgccagacgtcgatcaacggcattctcgcgatcggcatgacgtacgtgatcctgaccaagggcatcgacctgtcggtgggctcggtgctcgcgctcgcgggcatcgtgagcggcctcgccggcgcggcggggcacgggctcgcggtgtcgctcgcggccggcgtcgcgtgcggcgcggcgctcggcgcgatcaacggcgtggcgatcgcgcgcttgaacgtgccgccgttcgtcgcgacgctcggcatgctgagcgtcgcgcgcggcgtcacgtacatcgccaacgacggcagcccggtcgcgaacctgcccgacgattacctgtcgctcggcatcggcaggctcggcccgctcggcatgccggtgctgatcttcgcgggcgtcgcgctcgcgtgctggtgggtgctgcgctacacgacatacggccgctatctgtatgcggtcggcggcaacgagaagagtgcgcgcacgtcgggcatcggcgtgcgcaaggtcgtgttctcggtgtacgtcgtctcgggcgcgctcgccggcctcgcggggatgatcctcgccgcgcgcacgacgtccgcgctgccgcaggcgggcgtgtcgtacgagctcgacgcgatcgcggccgtcgtgatcggcggcacgagcctgtcgggcgggcagggcggcgtcgtcggcacgctgttcggcgcgttgttgatcggcgtgatcaacaacgggctgaacctgctcggcgtgtcgtcgtattaccagcagatcgcgaagggactcatcatcgtgctggccgtgctcatcgacgtggcccgcaaacagcagcgctga

SEQ ID NO: 100011 - protein, 325 aa, Burkholderia pseudomallei K96243
MNTQTLSRLDAAPRRVNVAELASRFGIPIVFVALCVVLAFASPYFLTWRNWSDILRQTSINGILAIGMTYVILTKGIDLSVGSVLALAGIVSGLAGAAGHGLAVSLAAGVACGAALGAINGVAIARLNVPPFVATLGMLSVARGVTYIANDGSPVANLPDDYLSLGIGRLGPLGMPVLIFAGVALACWWVLRYTTYGRYLYAVGGNEKSARTSGIGVRKVVFSVYVVSGALAGLAGMILAARTTSALPQAGVSYELDAIAAVVIGGTSLSGGQGGVVGTLFGALLIGVINNGLNLLGVSSYYQQIAKGLIIVLAVLIDVARKQQR

SEQ ID NO: 100012 - DNA, 945 bp, Bacillus clausii KSM-K16
  CDS (1)..(945): transl_table=11
atgttcaccaataaacgagtcaaggcattaacagcgacgcttggtccatttatcggccttttccttatcatattaattattagcattctaaacccaggattcttatcagcgccgaatctcctcaatgtccttcggcaagtatccattaatgcgctcattgcatttggaatgacgtttgtcattttgacaggtgggattgatttatcagttggtgcaattcttgctttttctggagcggtcactgcaaccttactttcgtcagggatggacccgatcttagcgatcttaattggattgcttgttggagcagcacttggtgcaataaatggcataatcattgcaaaaggaaaagtagcaccatttattgcgacactggcgacgatgacgatttaccgaggcgcgaccttaatgtttacagatggcaggcctgtatcaaacttaggtgattctacattgttccaaatgcttggaggcggctacttttttggaattccaatgccggcgattacgatgatgattagctttgttatcttgtacttgattttaaagaaaaccacatttggccgtcgcgtatatgcagttggtggcaatgaggaagcatcgattctatcaggcatcaaagtcgaccgaattaagatttacgtatactctctgactggatttttggcagccgttgctggtgtgattttaacgtcgaggctaaattcagctcaaccaacggctggcacgatgtacgaacttgacgcgattgctgcggttgtgctcgggggaacgagtttaacaggtggaaaagggtggattgtcggaacgcttattggtgccttaatcataggagtgttgaataatgggttgaatttgcttggtgtcagctcttttttccagcaaatggttaaaggaagtgtcattttacttgcagtcttgcttgatcgcagaaaaacagcttaa

SEQ ID NO: 100013 - protein, 314 aa, Bacillus clausii KSM-K16
MFTNKRVKALTATLGPFIGLFLIILIISILNPGFLSAPNLLNVLRQVSINALIAFGMTFVILTGGIDLSVGAILAFSGAVTATLLSSGMDPILAILIGLLVGAALGAINGIIIAKGKVAPFIATLATMTIYRGATLMFTDGRPVSNLGDSTLFQMLGGGYFFGIPMPAITMMISFVILYLILKKTTFGRRVYAVGGNEEASILSGIKVDRIKIYVYSLTGFLAAVAGVILTSRLNSAQPTAGTMYELDAIAAVVLGGTSLTGGKGWIVGTLIGALIIGVLNNGLNLLGVSSFFQQMVKGSVILLAVLLDRRKTA

SEQ ID NO: 100014 - DNA, 975 bp, Corynebacterium glutamicum ATCC 13032; identical to SEQ ID NO: 38841
  CDS (1)..(975): transl_table=11

SEQ ID NO: 100015 - protein, 324 aa, Corynebacterium glutamicum ATCC 13032; identical to SEQ ID NO: 38842

SEQ ID NO: 100016 - DNA, 978 bp, Pseudomonas syringae pv. syringae B728a; identical to SEQ ID NO: 38843
  CDS (1)..(978): transl_table=11

SEQ ID NO: 100017 - protein, 325 aa, Pseudomonas syringae pv. syringae B728a; identical to SEQ ID NO: 38844

SEQ ID NO: 100018 - DNA, 1023 bp, Pseudomonas fluorescens Pf-5
  CDS (1)..(1023): transl_table=11
atgaacgcgataatcgacaacaaacccgcggcggtggcagtcaagccccggcgacgactgcccaccgagctgagcatcttcctggtgctgatcggtatcggcctggtgttcgagctgtttggctggatcgtccgcgaccagagtttcctgctcaattcccagcgcctggtgctgatgattctccaggtctcggtgatcggcctgctggccatcggcgtgacccaggtgatcatcaccaccggcatcgacctgtcttccggttcggtgctggccctgtcggcgatgattgccgcaagcctggcccagacctcggacttcacccgggcggtgtttccatccctgaccgacctgccggtgtggatcccggtgctggccgggctcggggtcggcctcctggcgggggcgatcaacggcagtgtgattgccctgaccggcattcctccctttattgccaccctgggaatgatggtctcggcccgggggctggcgcgttactacacccagggccagccggtgagcatgctctccgattcctacaccgccatcggccacggggcgatgccggtggtgatcttcctggtggtggcgctgatctttcatatcgccctgcgctacaccaagtacggcaagtacacctatgccatcggcggcaacatgcaggcggcgcggacttcggggatcaacgtcaagcgccacctggtgattgtctacagcattgccgggctgttggcggggctggccggggtggtggcctcggcacgggccgccaccgggcaggcggggatgggcatgtcttacgagctggacgcgattgccgcggcagtgatcggcggcaccagcctggccggcggggtggggcgcatcaccggcaccgtgatcggcgcgctgatcctcggggtcatggccagtggcttcacctttgtcggggtcgatgcctacatccaggacatcatcaagggcctgatcatcgtggtggcggtggtcatcgaccagtaccgcaacaagcgcaagctcaagcgctga

SEQ ID NO: 100019 - protein, 340 aa, Pseudomonas fluorescens Pf-5
MNAIIDNKPAAVAVKPRRRLPTELSIFLVLIGIGLVFELFGWIVRDQSFLLNSQRLVLMILQVSVIGLLAIGVTQVIITTGIDLSSGSVLALSAMIAASLAQTSDFTRAVFPSLTDLPVWIPVLAGLGVGLLAGAINGSVIALTGIPPFIATLGMMVSARGLARYYTQGQPVSMLSDSYTAIGHGAMPVVIFLVVALIFHIALRYTKYGKYTYAIGGNMQAARTSGINVKRHLVIVYSIAGLLAGLAGVVASARAATGQAGMGMSYELDAIAAAVIGGTSLAGGVGRITGTVIGALILGVMASGFTFVGVDAYIQDIIKGLIIVVAVVIDQYRNKRKLKR

SEQ ID NO: 100020 - DNA, 1137 bp, Pseudomonas syringae pv. phaseolicola 1448A
  CDS (1)..(1137): transl_table=11
atgaaccaggtcaaacagttcttcacccgctacaaaatgcttgcgctggtgattgccatcgcagtgatctggctgttcttcagttggcagaccgatggagggtttctgaccccgcgcaacctttccaacctgctgcggcagatgtccatcaccggcattctggcttgcggcatggtattggtgatcatcagtggcgagatcgacctgtcggtgggttcattgctgggcctgctcggggggctggcggcgattctggatgtggtttaccaggtgccgctgctggcaaacctgagcgtggttgcgctatgtgggctgatgattggcctggccaacggctacatgacggcctacctgcgcattccctccttcattgtcgggctgggcggtatgctggcctttcgcggcattcttctggggattaccggcggcacgaccatcgccccggtatcgccttcgctggtctacgtcggccagggatatttgccgcactctgtcggtacagcgcttggcgtactgttgctggccctgacgctgttcctgacctggaaacaacggcgcaatagagccctgcacgggctggcggcacattcgatgatccgtgatgtgttacgcgtggtattgatcggcgctgtgttgggcgggtttgtctatgtgctcaacagctacgacggaatccccgttccggtattgctgttgctggtcctgctcggtgtgttcagttatgtcaccagccagacggttttcggacggcgcgtctatgcggtgggcagcaacatggaagccacgcggttatccggcatcaacgtacaggccgtaaaactgtggatcttcggcatcatgggcgtcatgtgtgccttcgccgggctggtcaataccgcacgcctggctgcaggctcaccctcggccggcaacatgggcgaactggacgccattgccgcctgttttatcggcggcacgtccatgcgcggtggctcgggcactgtctacggtgcactgcttggcgcgctggtcatcaccagtctcgataacggcatgtccatgctcgacgtcgacagttactggcagatgatcgtcaagggcggcatcctcgtgctggcggtgtgggtggacgtgagcacacgggccggacggcggtga

SEQ ID NO: 100021 - protein, 378 aa, Pseudomonas syringae pv. phaseolicola 1448A
MNQVKQFFTRYKMLALVIAIAVIWLFFSWQTDGGFLTPRNLSNLLRQMSITGILACGMVLVIISGEIDLSVGSLLGLLGGLAAILDVVYQVPLLANLSVVALCGLMIGLANGYMTAYLRIPSFIVGLGGMLAFRGILLGITGGTTIAPVSPSLVYVGQGYLPHSVGTALGVLLLALTLFLTWKQRRNRALHGLAAHSMIRDVLRVVLIGAVLGGFVYVLNSYDGIPVPVLLLLVLLGVFSYVTSQTVFGRRVYAVGSNMEATRLSGINVQAVKLWIFGIMGVMCAFAGLVNTARLAAGSPSAGNMGELDAIAACFIGGTSMRGGSGTVYGALLGALVITSLDNGMSMLDVDSYWQMIVKGGILVLAVWVDVSTRAGRR

SEQ ID NO: 100022 - DNA, 1023 bp, Ralstonia eutropha JMP134
  CDS (1)..(1023): transl_table=11
atgcgcaattccattcatcccacggcgcacgccgttgcttcacaaggcgcggcgcgcacgcttggtcgccccggcggcgccaccacgcaggaacgccttcgagccctcggcatgctgccggtgctggtgctgctgtgcgccggcttcacggtgctgaccgacaacttcgccagcctgcaaaacctgtcgatcatcgcgcagcaggcgtcgatcaacctggtgctggcggccggcatgaccttcgtcatcctgacgggcgggatcgacctgtcggtcggttccatcctgtcgatctcggcggtggcggcgatgctgacgtcgctgacgccggaactgagtgcgctcagcgtgcccgccgcgctgctgtgcggcctgctgttcgggctggtgaacggcgcgctgattgccttcatgaagctgccgccgttcatcgtcacgctcggaagcctgaccgcagtgcgcgggctggcgcggctggtcgggcatgacagcacgctctacaacccggacatcggttttgccttcatcggcaatggcgacgtgctgggcgtgccgtggctcgtgatcatcgcgggtgccgtgatcgcggtgtcctgggtcgtgctgcgccggaccgtactggggctgcagatctacgccgtgggcggcaacgccgaggcggcgcggctgtcgggcatcaaggtgtgggtggtgctgctgttcgtctatgccgtgtctggcctgctggcggggctgggcggcgtgatgtccgcctcgcgcctgtacgcggccaacggcctgcagttgggccagtcttatgagctcgatgcgatcgccgcggtgatcctcggtggcacgagcttcgtgggcggcgtcggctccatcggcggcacgctgatcggcgcgctgatcattgccgcgctttccaatgggctggtgctgctgggtgtgtcggacatctggcaatacatcatcaagggtctggtcatcatcggcgcggtggcgctggaccgctatcgccagaagggctcggcccggacctga

SEQ ID NO: 100023 - protein, 340 aa, Ralstonia eutropha JMP134
MRNSIHPTAHAVASQGAARTLGRPGGATTQERLRALGMLPVLVLLCAGFTVLTDNFASLQNLSIIAQQASINLVLAAGMTFVILTGGIDLSVGSILSISAVAAMLTSLTPELSALSVPAALLCGLLFGLVNGALIAFMKLPPFIVTLGSLTAVRGLARLVGHDSTLYNPDIGFAFIGNGDVLGVPWLVIIAGAVIAVSWVVLRRTVLGLQIYAVGGNAEAARLSGIKVWVVLLFVYAVSGLLAGLGGVMSASRLYAANGLQLGQSYELDAIAAVILGGTSFVGGVGSIGGTLIGALIIAALSNGLVLLGVSDIWQYIIKGLVIIGAVALDRYRQKGSART

SEQ ID NO: 100024 - DNA, 999 bp, Anabaena variabilis ATCC 29413; identical to SEQ ID NO: 38847
  CDS (1)..(999): transl_table=11

SEQ ID NO: 100025 - protein, 332 aa, Anabaena variabilis ATCC 29413; identical to SEQ ID NO: 38848

SEQ ID NO: 100026 - DNA, 933 bp, Streptococcus agalactiae A909
  CDS (1)..(933): transl_table=11
atgatgaaatatatatcagagttaacaaccctgattgcgttagctggtttaatggttattatcacactcattaatcctaatttcctcacaaccaataatctactcaatttattattacaagtaactgcaaatggttttatcgctttcgggatgaccttcgttattttgactggcggtattgatttatcagtcgggtccatattagccctatctagtgcattaacagctggattaatcggccacggagtacccgttggtattgctatcgttttatctgttgccttaggtggcatcttgggaatgctaaacggactcttcatttcttacggaaaattagcaccatttatcgttacactggcaacaatgactatctttagaggagcaacgctagtttattcaaacggcaacccaattaccgctggcttatccgatagttttctattccaatttttgggacaaggctatattgttggtatcccattcccagtcattctcatgtttcttacttttattattttgtatattttgttacataaaacagccttcgggaaatctgtttacgctttaggaggtaatgaaaaagcagcgtatatctcgggtattaagttaaacaaagttaaaattatcatctacactatctcaggtatcatggcttccatttctgggttaattatcacatcacgccttagctcagcacaaccaacagctggagcaagttatgagatggatgctattgccgctgttgtcttaggtggaacgtctttatctggtgggaaaggacgtatcattggaacattgattggtgctcttattattggtgtcctgaacaatggattaaacatcattggtgtctctgcattttggcaacaagttgtgaaaggtatcgttattttaatggctgttttacttgatcgctttaaagtagcaaaatag

SEQ ID NO: 100027 - protein, 310 aa, Streptococcus agalactiae A909
MMKYISELTTLIALAGLMVIITLINPNFLTTNNLLNLLLQVTANGFIAFGMTFVILTGGIDLSVGSILALSSALTAGLIGHGVPVGIAIVLSVALGGILGMLNGLFISYGKLAPFIVTLATMTIFRGATLVYSNGNPITAGLSDSFLFQFLGQGYIVGIPFPVILMFLTFIILYILLHKTAFGKSVYALGGNEKAAYISGIKLNKVKIIIYTISGIMASISGLIITSRLSSAQPTAGASYEMDAIAAVVLGGTSLSGGKGRIIGTLIGALIIGVLNNGLNIIGVSAFWQQVVKGIVILMAVLLDRFKVAK

SEQ ID NO: 100028 - DNA, 1137 bp, Pseudomonas fluorescens PfO-1
  CDS (1)..(1137): transl_table=11
atgaatcaggtcaaacaactcttcacccgctacaagatgctcgcactggtgtttgccgtggcgttgatctggctgttcttcagctggcagaccgagggcggattcctgacaccacgcaacctctccaacctgctgcgccagatgtccatcaccgggatcctcgcctgcggcatggtgctggtcatcatcagcggcgagatcgatctgtccgtcggctcattgctgggcctgctcggtggcgtggcagccattctcgacgttgtctatcacataccactgctggcgaacctgagccttgtggtggtgtgcggactgctgatcggcctcgccaacggctacatggcggcctacctgcgcattccgtcgttcatcgtggggctgggaggcatgctggcttttcgggggattttgctggggatcaccggcggcacgaccattgcgccggtgtcgccggaactcgtctacattggccagggttatctgccccatacggtcggcgcgggtctgggtgtcctgctgttcgcactgacgttgttcctgacctggaaacaacggcgcaatcgcgcccttcacggcctcgcggcacattcactggcgcgtgacgtggcacgcgtgttgctgatcggcgcggtgctggccgggtttgtccagaccctcaacagctatgacggcattcccgtgccggtcctgctcctgctgatcctgctgggcggattcagctatgtgaccagccagaccgtgttcggccgacgcgtctattccgtgggcagcaacatggaagcgacgcgcctgtccggtatcaatgtgcaggccgtgaagctctggatcttcgggatcatgggcgtgatgtgcgccctcgccggcgtggtcaacaccgcgcgcctggccgccggctccccctcggccggcagcatgggcgaactcgacgccatcgccgcctgcttcatcggtggcacctcgatgcgtggcggttccggcacagtctatggcgccctcctcggcgccctggtcatcaccagcctggacaacggcatgtccatgctcgacgtcgacagctactggcagatgatcgtcaagggcagcattctggtgttggcggtttgggttgatgtgagtacgcggactgggcggcgttga

SEQ ID NO: 100029 - protein, 378 aa, Pseudomonas fluorescens PfO-1
MNQVKQLFTRYKMLALVFAVALIWLFFSWQTEGGFLTPRNLSNLLRQMSITGILACGMVLVIISGEIDLSVGSLLGLLGGVAAILDVVYHIPLLANLSLVVVCGLLIGLANGYMAAYLRIPSFIVGLGGMLAFRGILLGITGGTTIAPVSPELVYIGQGYLPHTVGAGLGVLLFALTLFLTWKQRRNRALHGLAAHSLARDVARVLLIGAVLAGFVQTLNSYDGIPVPVLLLLILLGGFSYVTSQTVFGRRVYSVGSNMEATRLSGINVQAVKLWIFGIMGVMCALAGVVNTARLAAGSPSAGSMGELDAIAACFIGGTSMRGGSGTVYGALLGALVITSLDNGMSMLDVDSYWQMIVKGSILVLAVWVDVSTRTGRR

SEQ ID NO: 100030 - DNA, 1005 bp, Rhodobacter sphaeroides 2.4.1
  CDS (1)..(1005): transl_table=11
atggcgacctacaccgagcgccaggccggctcgcggctggccgacttcatcggggaccatgcgcaggtcctgtcgatcgcgctgttcttcgcgctctgtctgctgttcttcggcgccatgaccaccaccttcctcacctcgggcaacctgctcaacgtggtgcgacaggcggcgcccatcctgatcgtggccgtggccatgaccctcgtcatcacgaccgccgggatcgacctgtcggtgggctcgatggtggcgctcatcaacgcgctcgcggccatcgtcatggcaagcgggctcgactggaccctgaccctgccgctgatgctggtcgccggcgcgctgatcggcgggatccagggctggttcatcgcctatcagggcattccggccttcatcgtgacgctcgcaggcctctcgatcctgcgcggcttcgcgctctacctgaccgagggctattcgatcccgatccgcgacgcggcgggcttcttctggctcggccgcggcgaggtgctgggcttccccgtgcccgccctgatcgcgatcctgatcgccgtgctgggcttcgtcgtcatgctgcgcacccagtatggccggcaggtgatcgccgtcggctcgaacatggaggccgcgcgccgggtggggatgcccgccaagcgcgtgctggcctcggtctatgtcgtctcgggcgtggcgagcgcggtggcgggcatgctgatcgccgcccgcctcggctcgggctcgtccaacgcggcacagggcttcgagctgcaggtgatcgcggccgtcgtgctggggggcacctcgctcatgggcggcaaggcctcgatgctgggcaccgtcctcggcaccatgaccatcgccgtcatcggcaacgggctgatcctcatgcatatctcgcccttcttcacccagatcgtcacaggcaccatcatcctcgtcgccatctggatgaacacgcggctcttcgatcgcccctggcgcttcggacggaggaaaccggcatga

SEQ ID NO: 100031 - protein, 334 aa, Rhodobacter sphaeroides 2.4.1
MATYTERQAGSRLADFIGDHAQVLSIALFFALCLLFFGAMTTTFLTSGNLLNVVRQAAPILIVAVAMTLVITTAGIDLSVGSMVALINALAAIVMASGLDWTLTLPLMLVAGALIGGIQGWFIAYQGIPAFIVTLAGLSILRGFALYLTEGYSIPIRDAAGFFWLGRGEVLGFPVPALIAILIAVLGFVVMLRTQYGRQVIAVGSNMEAARRVGMPAKRVLASVYVVSGVASAVAGMLIAARLGSGSSNAAQGFELQVIAAVVLGGTSLMGGKASMLGTVLGTMTIAVIGNGLILMHISPFFTQIVTGTIILVAIWMNTRLFDRPWRFGRRKPA

SEQ ID NO: 100032 - DNA, 1026 bp, Burkholderia sp. 383; identical to SEQ ID NO: 38851
  CDS (1)..(1026): transl_table=11

SEQ ID NO: 100033 - protein, 341 aa, Burkholderia sp. 383; identical to SEQ ID NO: 38852

SEQ ID NO: 100034 - DNA, 1017 bp, Rhodospirillum rubrum ATCC 11170
  CDS (1)..(1017): transl_table=11
atgcacatcacccagccggccgccaaggccccgatctccttgcgaaagtacggaatcgtcttcgcatttctcgggctctgcgtgttggtcagcgcgctctgccagctcaaggtggtccagggcgcctggcccgagaacaccttcctgaccgtcaataatctgatgctgatcttgcatcagatatcggtgaacggcgtccttgccgtcggcatgaccttcgtcgtcatctcggccggcatcgatttgtcggtgggctcggtcctggccttttccgggatgatggccgcctcgatggccacccgctcggtcggggtgacgccatggagcgacacctatccggtgatcttcccgatcatcgccgccctgggcgtcggcgcgctgtgcggcggcttaagcggctggatcatcgcccgtttccgcatccaggccttcatcgccaccctgggcatgctgctggcggcgcgcggcttcaccatgtcggtcaccggcggcaatccgatttcgggcctaagcccggatttccgctggttcggcacgggcaagctgttcgaggtgatcccggtgccggtggtcatcctcgccctggtcttccttctggcctgggtgatcctcaataaaacggtctttggccgctacgtctatgccgttggcggcaacgagaagagcgcgcgcacctcgggcatcaacaccggggcgatcctcatctgggtctatgtggtcgccggcttcctggccggcgtggccggggtgatcctgaccgccaagaccgggtcggcccagaccagcgccggcagttcctatgaacttgacgccatcgccgccgtggtcatcggcggcgccagcctggccggcggcgtcggccggctgacgggtacgtttttcggggccctgatcatcggcgtgatgaacaacggcctcgatatcctgggggtccagagcttctaccagctcatcatcaaaggcggactgatcgttgtcgccgtgatcctcgacccctcaagaaaacaggctggttga

SEQ ID NO: 100035 - protein, 338 aa, Rhodospirillum rubrum ATCC 11170
MHITQPAAKAPISLRKYGIVFAFLGLCVLVSALCQLKVVQGAWPENTFLTVNNLMLILHQISVNGVLAVGMTFVVISAGIDLSVGSVLAFSGMMAASMATRSVGVTPWSDTYPVIFPIIAALGVGALCGGLSGWIIARFRIQAFIATLGMLLAARGFTMSVTGGNPISGLSPDFRWFGTGKLFEVIPVPVVILALVFLLAWVILNKTVFGRYVYAVGGNEKSARTSGINTGAILIWVYVVAGFLAGVAGVILTAKTGSAQTSAGSSYELDAIAAVVIGGASLAGGVGRLTGTFFGALIIGVMNNGLDILGVQSFYQLIIKGGLIVVAVILDPSRKQAG

SEQ ID NO: 100036 - DNA, 996 bp, Moorella thermoacetica ATCC 39073; identical to SEQ ID NO: 38853
  CDS (1)..(996): transl_table=11

SEQ ID NO: 100037 - protein, 331 aa, Moorella thermoacetica ATCC 39073; identical to SEQ ID NO: 38854

SEQ ID NO: 100038 - DNA, 1002 bp, Burkholderia xenovorans LB400
  CDS (1)..(1002): transl_table=11
atgaacgaatccgtctcgccgctgacgtccgaacggcaggcatcgccgccgcagaaaagccggttgcggcgcatcgcgcgcgctttgctgcaaggcgaccgcccctatgcgctttatgccgcgttcgcgattctgctagtggtgttcagcttcgcgtcgccgtggtttctatccatcgacaacttcctgaatatcggccggcaaaccgcgctcgtctcgatcatcgcgatcggcatgaccttcgtgatcattgcgcggcagatcgatctttcggtgggctcgacgttggcgctctcgggcatgtccgcggcgctggccatgacgtatctgggcaacaactgggtcatcggcgcgcttgcgggtatcggcaccggcgcgatagtcggcgcgatcaacgggatcgtgaccacgcgcgtgaacattccttcgtttctcgtcacgctcggcacactgagcgccgcgcgcggactcgcgctgatggtcacgaccaccaagcccgtgatcatcgacaacgactcgttcatcgcgatcttcggcgagggcgatattttcggcgtgcccgtgccgatcatctggacggtgctcgccgtgatcgccggcattctgctgctgcactacagcgtattcggccggcagatctatgcggcgggcggcaacccgaccgcggcgctgtactcgggcatcaacacgcggcgcgtgactaccctcgccttcattctcaccggcatgctggccgggctcgccgcgctcgtgctgtcggctcgctcgcatgcggcgcggcccgacgtcgtgcagggcatggagctggacgtgatcgcctccgtcacgctcggcggctgcagtctgttcggcggccgcggcttcgtgctggggacgctgctcggcagtctgatcatcggcacgctcaataacgggctggtgctgctcggcgtcagttcgtcgcttcagttggtgatcaaaggcgtgatcatcgtcgcggcggtggcttttacgaggaaatag

SEQ ID NO: 100039 - protein, 333 aa, Burkholderia xenovorans LB400
MNESVSPLTSERQASPPQKSRLRRIARALLQGDRPYALYAAFAILLVVFSFASPWFLSIDNFLNIGRQTALVSIIAIGMTFVIIARQIDLSVGSTLALSGMSAALAMTYLGNNWVIGALAGIGTGAIVGAINGIVTTRVNIPSFLVTLGTLSAARGLALMVTTTKPVIIDNDSFIAIFGEGDIFGVPVPIIWTVLAVIAGILLLHYSVFGRQIYAAGGNPTAALYSGINTRRVTTLAFILTGMLAGLAALVLSARSHAARPDVVQGMELDVIASVTLGGCSLFGGRGFVLGTLLGSLIIGTLNNGLVLLGVSSSLQLVIKGVIIVAAVAFTRK

SEQ ID NO: 100040 - DNA, 1011 bp, Silicibacter sp. TM1040
  CDS (1)..(1011): transl_table=11
atgaccacccaaatcctgccattaaatcccttcggagtgatccggaaaatctttgtccgggtgggggtgctcccctttttcctgctggcggcgctggtggtgtttagcctgctgtcgcccaagtttctgaccggtcagaacatcgtcaacgttatgcgtcagtcggtctatctggtactggtgtccctggggcagatgctggtgctgatctcgggcggctttgatctctcggttgggaccgcgattgccctgacctcggttgtcagtgctacggccatggtctggcttgcgggtatctttcccgatgcgatctttctggtgatccttctgggcgcgctggcggggcttctggcggcggcctgcgtggggctcttgaacgggatcggggtcgcctattttgatgtctcacccttcatcatgacgcttggggcgtcgtcgctcgcggggggcgctgcactgctgctgaccggcggtgtgcccgtgtcgggcttgccctttgcctttgctgatgtctttggctttggccgcctctggggggtgccggtgcccgtcattgtcgccatgatctgcatagcggtcatgtgggttttcatgtcgcggacctcgctcggtacccaggtctatgcggttggcggcaacatcaaggcggcgcatctttctgcgatcaacaccaaacggacgctgatgatgacctatgtgggttgcgctctaattgccgcgctgacagggcttttgctgaccgcgcgcgtggaaagcggcgaagccaacctcggcgggtcgttgacgctcgaatccatcgccgcctgcgtgatcgccggggtttccctgcgcggcggcatcggccgggtcgaaaacgtggttctgggcgggttcttcatcgttctggtgcaaaacggaatgaacctcgcgcaggtgtcttcctatatgcagatggtccttctgggcgcgcttttgatcctcgcggtgatctttgaccagctgcgctatcggatgatcatgggcacaaactga

SEQ ID NO: 100041 - protein, 336 aa, Silicibacter sp. TM1040
MTTQILPLNPFGVIRKIFVRVGVLPFFLLAALVVFSLLSPKFLTGQNIVNVMRQSVYLVLVSLGQMLVLISGGFDLSVGTAIALTSVVSATAMVWLAGIFPDAIFLVILLGALAGLLAAACVGLLNGIGVAYFDVSPFIMTLGASSLAGGAALLLTGGVPVSGLPFAFADVFGFGRLWGVPVPVIVAMICIAVMWVFMSRTSLGTQVYAVGGNIKAAHLSAINTKRTLMMTYVGCALIAALTGLLLTARVESGEANLGGSLTLESIAACVIAGVSLRGGIGRVENVVLGGFFIVLVQNGMNLAQVSSYMQMVLLGALLILAVIFDQLRYRMIMGTN

SEQ ID NO: 100042 - DNA, 1044 bp, Rubrobacter xylanophilus DSM 9941
  CDS (1)..(1044): transl_table=11
gtgaaggataccggatcgaaggccatgacggcgagacagtcacatagaaccttcccgccggagacgctacgctcaagcctaagtcacctcttgatggccagagagagcggagtgttgaccgcccttgccatgctggtcttcgcagggagcttcgtcgcgccggggctctgggcgccgcagaacatgctgaacgtcggccaacaggtagcgcagatcggaatcatggccgtcgggatgactttcgtcatcatcaccgcgcagatagatctgagcgtgggttccatctacgctctcgcagccgtggtcacgggtctgctccttacgcagggctctccggcgtgggtcgcgtgcctcggaggattagcggtgggcttctgtgccgggctagtcaatgggctcaccaccgtctacctgcacataccgtctttcatcgtcacactcggaacgctcagcgcttttcgcggtctgaccttgctgctcaccaacggttccccgatctcgctcgatgcgaaccaggcgaacgtgcagaccttctcgctcctcggccagggcctactattcagcgtcgtgcccatggagttcgccttcctcatcctgaccttcatcttcggctatgtgttgctagcctggaccaagtacggcttctacgtgtacgcggtgggcggcagtgccgaggcggcccggttatgcggcatcaacgtggctcgcgtgcgcctcaccagcttcgtgatactcggcaccctcagcgccttctccggcatccttggtctatcgttcttgaactacgtacagggggtcacggggcagggtctcgagctcgtcgtgatttcggccgtgatcatcggtgggacggctctcttcggcggctccggcacgatgttgggcacccttatcggggttgctttgatcggggtcctacaaaacatactcgtgctgagcggcctgtcgtcgttctggcagatcctggttgtgggggtggtggtcatcctggcggtggcgctggattcctaccttcggcgcagacgaaagatgaaggggccttaa

SEQ ID NO: 100043 - protein, 347 aa, Rubrobacter xylanophilus DSM 9941
MKDTGSKAMTARQSHRTFPPETLRSSLSHLLMARESGVLTALAMLVFAGSFVAPGLWAPQNMLNVGQQVAQIGIMAVGMTFVIITAQIDLSVGSIYALAAVVTGLLLTQGSPAWVACLGGLAVGFCAGLVNGLTTVYLHIPSFIVTLGTLSAFRGLTLLLTNGSPISLDANQANVQTFSLLGQGLLFSVVPMEFAFLILTFIFGYVLLAWTKYGFYVYAVGGSAEAARLCGINVARVRLTSFVILGTLSAFSGILGLSFLNYVQGVTGQGLELVVISAVIIGGTALFGGSGTMLGTLIGVALIGVLQNILVLSGLSSFWQILVVGVVVILAVALDSYLRRRRKMKGP

SEQ ID NO: 100044 - DNA, 1008 bp, Mesorhizobium sp. BNC1
  CDS (1)..(1008): transl_table=11
atgacgccgttgcagaacgttcagcatttccgcagcaacgccattaagaccgagaggcatagacaaggcgtcaagtttttgagctttacacgccgttacggcacgcttgtcatcttcgttctcctcgttgctgcggcggcatatatctcgaccgacttcctgacattgcggaacgtgatgaacctgctcaggcaggcatcgacgaccatcatcatggcgatcggcatgctcttcgtcgtgctcacccgcggcatcgacctgtcgatcggatcggtccttgccgtgggcggcgtgattgccgcgcttctcgcgccggagtggggattgcctgcatcaattgccgttgcgctggtcgctggtcttatttgcggactcgcatgcggcactctcatcgcgtatctcaggctgcccccgttcgtcataaccttggctatgatgacggtggctcgcggctctgcctttatcctgaccggcgggcagcccatcatgctcaacgacgcggccagtgggttaagtgcttttgccggcggctacatcggcccggtcccctatcccgtgctgctgatggcagcgatcgttctgctgggaacctttgtgctcatgttcacttcgttcgggcgcctggtgaaggcgatcggttcgaacgaggaggctgtgcgcctgtccggcatacggacacaacgctatatcgtggcggtttatgtcatttcgggtttcatggcggcgcttgccggtgtgctgatcaccggccggaccggtgtcggagcgcccaatgtcggcgtcggattcgaattgcaggtcatagccgccgtcgtcatcggtggcgcaagcctcatgggcggccggggcgatgcgctgaacaccgtgcttggcgcgctcatcctggccattatcggcaacatcatgaatctttccaacgtaccaggctatacacagcaggtgattatgggtgcggtcatcgtcgcggctgtgatccttcagaagattcagaaccagaaaatgagctga

SEQ ID NO: 100045 - protein, 335 aa, Mesorhizobium sp. BNC1
MTPLQNVQHFRSNAIKTERHRQGVKFLSFTRRYGTLVIFVLLVAAAAYISTDFLTLRNVMNLLRQASTTIIMAIGMLFVVLTRGIDLSIGSVLAVGGVIAALLAPEWGLPASIAVALVAGLICGLACGTLIAYLRLPPFVITLAMMTVARGSAFILTGGQPIMLNDAASGLSAFAGGYIGPVPYPVLLMAAIVLLGTFVLMFTSFGRLVKAIGSNEEAVRLSGIRTQRYIVAVYVISGFMAALAGVLITGRTGVGAPNVGVGFELQVIAAVVIGGASLMGGRGDALNTVLGALILAIIGNIMNLSNVPGYTQQVIMGAVIVAAVILQKIQNQKMS

SEQ ID NO: 100046 - DNA, 1020 bp, Rhodococcus sp. RHA1
  CDS (1)..(1020): transl_table=11
atgaccacccgacttccctcccccgccctgcctgcggcgccgcaccggcccccgcgttcgaacggtatccgccaccacgtcgccgcactcgccgaccggctcggtgtggcgctcgcactcatcgtgctgatcgccgtgttctccacagtcgcaccgtatttcctgtcggtcgacaacctcttcgacgtcgcccggcagatctccgtgaccgcgatactcggtgcgggactgaccttcgtcatcatgaccggaggcatcgacctgtccgtcggttcggcggtgggcgtgaccgcgttcgtcgccgtcgccctctccatcaacggcgctcccgccccggtcgccctgctcggtgcgctggccgccggcctgatcatcggattgatcaacggtgcgctggtggccgggctcgggttggcgtcgttcatcgtcaccctcgccgcgttgacatacctgcgtggggtcacctacgtcggtaccgacggcaagacgctgttctcgacggacctcggctacgccgtcctcggccacggctccctactcggtgtaccgattccggtgctcgtgatggccgcggtcttcgcgggcggatggtatctgctcaatcgcaccgtcttcgggcgctgggttcgcgcagtcggcggcaacgccgaagccgcccgactggccggcatccctgtccggcgagtgctcaccaccgtgtacgtgatctccggcatctgcgccgccgtgggcggaatcatcgcgtcggcccgtctgcagagcgcggtgccggacctcggtgccggatacgaattgtccgcgatcgctgccgtggtcctcggcgggacgtcactgatgggcgggcgaggctcgttgatcggcaccctggtgggtgcggcgatcatcggggttctcgtcaacggtatgacgctgctcgacgtctcgacgttctaccagcagatcatccagggcgcggtcatcgtgctcgcggtggcgctggaccggctgcgcatcaagtcctcggggacgcagcatgcgtga

SEQ ID NO: 100047 - protein, 339 aa, Rhodococcus sp. RHA1
MTTRLPSPALPAAPHRPPRSNGIRHHVAALADRLGVALALIVLIAVFSTVAPYFLSVDNLFDVARQISVTAILGAGLTFVIMTGGIDLSVGSAVGVTAFVAVALSINGAPAPVALLGALAAGLIIGLINGALVAGLGLASFIVTLAALTYLRGVTYVGTDGKTLFSTDLGYAVLGHGSLLGVPIPVLVMAAVFAGGWYLLNRTVFGRWVRAVGGNAEAARLAGIPVRRVLTTVYVISGICAAVGGIIASARLQSAVPDLGAGYELSAIAAVVLGGTSLMGGRGSLIGTLVGAAIIGVLVNGMTLLDVSTFYQQIIQGAVIVLAVALDRLRIKSSGTQHA

SEQ ID NO: 100048 - DNA, 1074 bp, Haemophilus somnus 129PT
  CDS (1)..(1074): transl_table=11
atggtgattatgttttttttctcaattgcaacagaaggggcttatttaagtgcaagaaatatctctaacttattacgtcaaactgctatcaccggtattcttgctattggtatggtgtttgtgattatctctgcagaaattgacttatcagttggttcactaatggggctactcggtggctttgcggcaattagtaatgtttggtggggttggccgttacccttaactatccttgttaccttgctcttaggtttactaatcggggcgtggagcggttggtgggttgcttatcaaaaagtaccatctttcatcgttaccttagcaggcatgcttgcatttcggggaattttgatcggattaacgaatggtactaccgtttcccccatcagtaatgatatgacaattatcggtcaaggttatctttccgacactatagggataattttagggagcatcataatattttgctttattgcttggggaagttatcagcgtaaagccagacaaaacctaaatttaccagttgccaaaatgcccaaagaaacagtgaaatatggcatgatagcaatccttattcttggtgcaatttatctgcttaacgattatcgaggcatgccaattccagtattaattctctgtggattagccattataggaacattcatttcgaaaaaaacagcatttggtcgacatatttacgcaattggtggcaatattgatgcagctcgcctatcaggtattgccgtggaaaaagttaaattaaccatttttgctcttaacggcttattagtggcaatagccggcttgattttaagttcccgtttaggagccggagcaccctctgccggtcaaaatgcagaactcgatgctattgccgcttgtgttatcggtggagccagtttagccggcggtatcggcagtatttttggcgtagtaatcggggcatttatcatcgccttattggataacggaatgagtatgctggatgtaccgactttttggcaatatattgtaaaaggtggcattttattactagcagtatggatagataccattagtaagaaaaaggtctaa

SEQ ID NO: 100049 - protein, 357 aa, Haemophilus somnus 129PT
MVIMFFFSIATEGAYLSARNISNLLRQTAITGILAIGMVFVIISAEIDLSVGSLMGLLGGFAAISNVWWGWPLPLTILVTLLLGLLIGAWSGWWVAYQKVPSFIVTLAGMLAFRGILIGLTNGTTVSPISNDMTIIGQGYLSDTIGIILGSIIIFCFIAWGSYQRKARQNLNLPVAKMPKETVKYGMIAILILGAIYLLNDYRGMPIPVLILCGLAIIGTFISKKTAFGRHIYAIGGNIDAARLSGIAVEKVKLTIFALNGLLVAIAGLILSSRLGAGAPSAGQNAELDAIAACVIGGASLAGGIGSIFGVVIGAFIIALLDNGMSMLDVPTFWQYIVKGGILLLAVWIDTISKKKV

SEQ ID NO: 100050 - DNA, 1005 bp, Trichodesmium erythraeum IMS101
  CDS (1)..(1005): transl_table=11
atgattaaacaaattataaactttgctcttaataatgctatctacttagtgttaatcctattgttaattgttataactataatttcacctgattttttaacagttaataattttcgtctgattttaactcaagcttcgactcgaattattattgctttgggtgttgggggagttttaattactcaaggtactgatttatctgcaggacgtatagtaggagtaggagcagtattatcagcttcattattacaaggagcagattatccttaccgtatgtatccaaatttaatggaattacctttaataattccgatgttatttactctgataatttgtgctttttttgggttcattaatggagtggttgtaggtatgtttaaagtacctccttttattgctacattaggaacaatgattataatttatggattaaattctatttattttgatcgccctcctttaggagcacaaccagttggtggattagctgaaaattttactacttttgttcaaggtgatttgattttaggttcctttgaaattccatatttaattatctatgcagtcatagtaattggagttatttgggttttatggaatcaaactattttgggcagaaatatgtatgctataggaggaaatattgaagcagcaactgtctctggtgttagtgttattaagtatttattaattgtttatactttagcgggtttattatacggatttgctggaatattagaagcaggtcgtgttggcagtgccactaataatactggtaatatgtatgagttagatgccattgctgcttgtgtagtgggaggagtttctacttccggaggtattggtactgtatcaggagttgtcacaggagtcttgattttccaaattattaattatggtctggtatttattgagttaagtccttatttacaatttattgttaagggattaattattgtcagtgcagtggcaattgatattagaaaatatgttagacaaagttga

SEQ ID NO: 100051 - protein, 334 aa, Trichodesmium erythraeum IMS101
MIKQIINFALNNAIYLVLILLLIVITIISPDFLTVNNFRLILTQASTRIIIALGVGGVLITQGTDLSAGRIVGVGAVLSASLLQGADYPYRMYPNLMELPLIIPMLFTLIICAFFGFINGVVVGMFKVPPFIATLGTMIIIYGLNSIYFDRPPLGAQPVGGLAENFTTFVQGDLILGSFEIPYLIIYAVIVIGVIWVLWNQTILGRNMYAIGGNIEAATVSGVSVIKYLLIVYTLAGLLYGFAGILEAGRVGSATNNTGNMYELDAIAACVVGGVSTSGGIGTVSGVVTGVLIFQIINYGLVFIELSPYLQFIVKGLIIVSAVAIDIRKYVRQS

SEQ ID NO: 100052 - DNA, 1005 bp, Rhizobium leguminosarum bv. viciae 3841
  CDS (1)..(1005): transl_table=11
atgacggcttatacggaacgcggccacggctcgcgcgtcgccgatttcttcggtgaacacgcacaggtcctgtcgatcgccattttcttcctcgcctgcatgatcttcttctcgatcggcagcgaaaccttcttcacgctcggcaacatcctgaacatcgtgcgccaggccgcccccatcctgatcgtcgccatcgccatgaccttcgtcatcatcaccggcggcatcgatctgtcggttggctcgcaggtcgccctcatcaatgcggtcgctgcgatcgtcatggcgatgggcgtcccctggccgtcggtggtcatcggtatgctcgtgctcggcggcttcatggggctggttcagggctggtttaccgcctatcaaggcatcccggccttcatcgtgacacttgccggcctctcgatcctgcgcggtctggcgctctatctgacccagggctattccattccgatcaaggatgcgccgggtttcttcgcgctcggccggggcgaaatcctcagcttcccgatccccgcggtcattgccgtcgtcatcgctattctcggttatgtcgtcatcaccgcgaccaaatatggccggcaggtcgtggcggtcggctccaatgcagaggcggcgcggcgtgtcggcatgcccgccaaatggatcatcgcctcggtctatatcatctccggcgtcgcctgcgccgtcgccggcctgctgatcgccgctcgcctcggctccggctcgtccaatgccgccgtcggtttcgagctgcaggtgatcgccgccgtggtgctcggcggaacgtcgctgatgggcgggcgcggcaccatcctcggcaccgtattgggcacgctgaccatcgccgtcatcggcaatggcctgatcctgatgcacatatcgccgttcttcacccagatcgtcaccggcgccatcattctcgtcgccatctggctgaacacgcgcatcttcacggccaatttccatttccggctgggcaggaaaggatga

SEQ ID NO: 100053 - protein, 334 aa, Rhizobium leguminosarum bv. viciae 3841
MTAYTERGHGSRVADFFGEHAQVLSIAIFFLACMIFFSIGSETFFTLGNILNIVRQAAPILIVAIAMTFVIITGGIDLSVGSQVALINAVAAIVMAMGVPWPSVVIGMLVLGGFMGLVQGWFTAYQGIPAFIVTLAGLSILRGLALYLTQGYSIPIKDAPGFFALGRGEILSFPIPAVIAVVIAILGYVVITATKYGRQVVAVGSNAEAARRVGMPAKWIIASVYIISGVACAVAGLLIAARLGSGSSNAAVGFELQVIAAVVLGGTSLMGGRGTILGTVLGTLTIAVIGNGLILMHISPFFTQIVTGAIILVAIWLNTRIFTANFHFRLGRKG

SEQ ID NO: 100054 - DNA, 999 bp, Pseudomonas aeruginosa UCBPP-PA14
  CDS (1)..(999): transl_table=11
atgagcgacccgacgtcttccgctaccgccgccgcagcgccaaccctgcgacgcggcaactatttcggcctgggcacctacctcggcctggccggcgcgctgctggcgatgatcgcgctgttctcggcgctgagcagccacttcctcagctatggcaccttcctcgccatcgccaaccagatccccgacctggtggtgctggcggtgggcatgaccttcatcctgatcgtcggcggcatcgatctctcggtaggttcggtgctggccctggcggcctcggcggtaagcctggcgacgctcggctggggctggggcgtgctgccggcggcgatgctcgggatggcctgcgcgaccctggccggctgcgtcaccggttcgatcacggtggcctggcggattccctcgttcatcgtgtccctcggggtgctggagatggcccgtgggctggcctaccagatgaccgactcgcgcacggcctatatcggcgacgcctatgcctggctgtccaatccgctggcgttcggcatctcgccggccttcgtgatcgccctgctggtgatgttcgccgcccaggcggtgctcacccgcacggtgttcggccgctacctgatcggcatcggcaccaacgaagaagcggtgcgattggccggtgtgaacccgaaaccctataagattgcagtattcgccctgatggggctgctcgccgggttggccgcgctgttccagatctcgcgtctggaagcggccgatcccaacgccggggtcggcctggaactccaggtcatcgccgcggtggtgatcggcggcaccagcctgatgggcgggcgaggttcggtggtcagcaccttcttcggcgtgctgatcatttccgtattggcggcggggctggcgcagatcggtgcgtcggagccgaccaaacgaatcattaccggggcggtgatcgtggtagcggtggtgctggatacctaccgcagccatcgcgcccgcagacagggctga

SEQ ID NO: 100055 - protein, 332 aa, Pseudomonas aeruginosa UCBPP-PA14
MSDPTSSATAAAAPTLRRGNYFGLGTYLGLAGALLAMIALFSALSSHFLSYGTFLAIANQIPDLVVLAVGMTFILIVGGIDLSVGSVLALAASAVSLATLGWGWGVLPAAMLGMACATLAGCVTGSITVAWRIPSFIVSLGVLEMARGLAYQMTDSRTAYIGDAYAWLSNPLAFGISPAFVIALLVMFAAQAVLTRTVFGRYLIGIGTNEEAVRLAGVNPKPYKIAVFALMGLLAGLAALFQISRLEAADPNAGVGLELQVIAAVVIGGTSLMGGRGSVVSTFFGVLIISVLAAGLAQIGASEPTKRIITGAVIVVAVVLDTYRSHRARRQG

SEQ ID NO: 100056 - DNA, 963 bp, Solibacter usitatus Ellin6076
  CDS (1)..(963): transl_table=11
atgttcgaacgccaccggcgtgaaatctccctgatcgccgccattctggtattgggcgcggtgctggccgccgcggctcccggatttttcacgttcgccaatcagcgcgacctggtgctggccaacatgccggtgctgattgtggcgctgggtatggtgctggtgattctcaccggccagatcgatatttcggtgggctcgcagttcgccatctgcagcgtggccaccggagtgttcgcgcgcatgggtctgccgacgccgttggcgggcgcggcggcctgcctgctgggcgcgctgatgggcgcactcaatggagtgctggtggcgtgggtgcggattcccgcgatcgtggtcacgctggctacgatggtggcgctgcgcgatggcttgcgctgggtgactcagggcgcgtgggtggaaaacctgccgcccggatttcaatggttcggccaatcgcaggaggtgagcgaggcgatcacgatcggctgcgcgctcgcgctcacggtcggtatgagttggggactgcgcaatctggcggcaggccgcgtggtctatgccaccggcagcgatccgaacgccgcgcggctcgcgggagtgaatcccgcgcgcgtggtcttcgccgcctttgtgatcacgggggcgctcacgggctttgcggcggtattcaacgcggtgcgctttcaccagattcccagtaatgccggaatgggactggagctcaaggtgatcgcggcggcggtggtgggcggcgtgtcgatctccggagggcgcggcaccatcgccggcaccatgctcgggctgctgctgttgggcgtgatcgggccggcgctgacgtttctcggcctgagcgcttattgggaacgcgcgatcgaaggcggcatcattctggcggcggtatcgatggatgccgtgcgcgtacattcggggaaatatggcaacgtcgttggcgctcagcgagcatag

SEQ ID NO: 100057 - protein, 320 aa, Solibacter usitatus Ellin6076
MFERHRREISLIAAILVLGAVLAAAAPGFFTFANQRDLVLANMPVLIVALGMVLVILTGQIDISVGSQFAICSVATGVFARMGLPTPLAGAAACLLGALMGALNGVLVAWVRIPAIVVTLATMVALRDGLRWVTQGAWVENLPPGFQWFGQSQEVSEAITIGCALALTVGMSWGLRNLAAGRVVYATGSDPNAARLAGVNPARVVFAAFVITGALTGFAAVFNAVRFHQIPSNAGMGLELKVIAAAVVGGVSISGGRGTIAGTMLGLLLLGVIGPALTFLGLSAYWERAIEGGIILAAVSMDAVRVHSGKYGNVVGAQRA

SEQ ID NO: 100058 - DNA, 1005 bp, Mycobacterium smegmatis str. MC2 155
  CDS (1)..(1005): transl_table=11
atgagcacattacggtcagacgcccaccctgacgccacaccgcgggccgcatcgccgaggtcgtaccgactcaatgagatcggacttctggtcgcgatcgtcgcgttgtacatcgcgctgagcgcctcagcagccggcttcctgactgccggcaaccagttgggcatcctgcgcgacgcggcaaccatcggtatcgccgcgtggggtgtcacgctcgtgatcatcgccggggacatcgacatcagtatcggtcccgcagtggcgttctcatcggtactggtcgccaagggaagtgcccaatggggacttggtatcggcggggccatcgtgttgaccttggtcctcggcacgctatggggtgcagtggccggttatctacgcgcccggttcgatgtcccctccttcatcaccacactcggcttgtggagcatcctcggtggccttgccctgtacatgactgacgcgttgccggtggtgcttccggccagcagcctgatggaggttctcggcggcgacattctgggtgtgcccacgtcagcgatcatcatgctcgtcctcttcgcggttttcgcctacgtggcgaagttcacggcctacggccgatcggtttatgccatcggcggcaacgccgcggcggcgatgcttgcaggcatcaacctcacccgcacccgcgtgatcctgttcgccaccacgggcctgctctcggcagtcaccggcatcctggttgcggcgcgtctcggatccggcaacggcggcgcggcgggcggactcgagttcgatgtgatcgcggccgtggtcatcggcggcaccttgctcgccggcggccggggcagcctggtcggcaccctcctcggggtcgtgttcatcacagtcatagccaacgggttggtgttgctcggcatcgactccttcctgcaggaggttgtgcgcggcgtcatcatcgtcggagcagtgctgatcaacgtgatcatcggtcgacgccgaaatgccacgcgcaccacatga

SEQ ID NO: 100059 - protein, 334 aa, Mycobacterium smegmatis str. MC2 155
MSTLRSDAHPDATPRAASPRSYRLNEIGLLVAIVALYIALSASAAGFLTAGNQLGILRDAATIGIAAWGVTLVIIAGDIDISIGPAVAFSSVLVAKGSAQWGLGIGGAIVLTLVLGTLWGAVAGYLRARFDVPSFITTLGLWSILGGLALYMTDALPVVLPASSLMEVLGGDILGVPTSAIIMLVLFAVFAYVAKFTAYGRSVYAIGGNAAAAMLAGINLTRTRVILFATTGLLSAVTGILVAARLGSGNGGAAGGLEFDVIAAVVIGGTLLAGGRGSLVGTLLGVVFITVIANGLVLLGIDSFLQEVVRGVIIVGAVLINVIIGRRRNATRTT

SEQ ID NO: 100060 - DNA, 1038 bp, Mycobacterium smegmatis str. MC2 155
  CDS (1)..(1038): transl_table=11
atgaccacaacctccgcaccgctcaaaccaccggaatccggtccgaccaacacctcgcggccgaggggacgagtactcggtggccccagcttgcgtcagctcgcccagctgggaccggtggtcgcgctggtgcttctcgcagcggtgttcgcggtcagcgcgcccaacttcaccagcagcgccaacctcaccaatgttcttcagcaggtgtcgatcacggcgatcgccgcggtcggtgcgacggtggtgatcctcgttgcgggaatcgacctttccgtcggatcggtggtggcgctcaccggcagcatcgcggcgctgtacctgcagcatgcgatcctctcgacaggagcgtcggccgcggtggcggtactgctgagcctggtggtcggcaccgcgtgcgggttcctcaacggggtgctgatcaccttctgccgggtgcccgcgttcatcgcgacgttggccaccctgacggccctgcgtggaatcgcgttgctggtcaccaacagctacccgatctccatcaacaacagcgccttcacccagatcggcatcggcaaggtgggcgcggtgccgataccggtgatcatcatggcggtgaccttcgcggtgggttacgtgatcctgcatcgactcaagattgggcgccggatctacgccgtcggagggaaccgcgaggcggcccggttgtccggtatccgggtatcgcgagtgttgttgttcgccttcaccttcgccggtctctgcgccggggttgcctcggtcatcctgaccgccaagctgtcctcgggtcagccggcaggcgcggtgggtttcgaactcgacgtcatcgccgcggtggtggtcggtggcaccagcctgttcggtggccgcggccggctggcaggcaccttcctcggggcgctggtgatcgctgtcctgggcaacggcctgaccctgatgaacgtcccgttctactggcagcagatcgtcacgggcgccgtggtggtggtcgcagtggtgctcgaccgggtgactcgcggtggggaatcgggcgaatga

SEQ ID NO: 100061 - protein, 345 aa, Mycobacterium smegmatis str. MC2 155
MTTTSAPLKPPESGPTNTSRPRGRVLGGPSLRQLAQLGPVVALVLLAAVFAVSAPNFTSSANLTNVLQQVSITAIAAVGATVVILVAGIDLSVGSVVALTGSIAALYLQHAILSTGASAAVAVLLSLVVGTACGFLNGVLITFCRVPAFIATLATLTALRGIALLVTNSYPISINNSAFTQIGIGKVGAVPIPVIIMAVTFAVGYVILHRLKIGRRIYAVGGNREAARLSGIRVSRVLLFAFTFAGLCAGVASVILTAKLSSGQPAGAVGFELDVIAAVVVGGTSLFGGRGRLAGTFLGALVIAVLGNGLTLMNVPFYWQQIVTGAVVVVAVVLDRVTRGGESGE

SEQ ID NO: 100062 - DNA, 996 bp, Nocardioides sp. JS614
  CDS (1)..(996): transl_table=11
atgactgagaccagtacacccgtggcagcgcagccgtcggcgctctcccggtccttcaacctgcgcgactacggcgtcgtgctcggtgccgtcgcgcttgtgatctacctgtccctgtcgacgaccaccttcctcaccaccggcaacctcacgaacgtgctcgaccaggcggtcgtcgtgggcctgctggcgtgcggggcgacgatgtgcatcatcagcggcgtcttcgacctcacggccacggcgtcgctcgcgctgtccgcgatcatcggcgtcgaggtgacgcaggcggccggcgtcgaagccggcttcgttgccgcagttctggccggggcgggccttggtgcgttgacgggcttcatcgtcaacgtgagtacggccgtgaacgccttcatcgccacgcttgccacgagcatcgtctaccggggggtcgccctcgtgatcaccggcggcgccatcacctacccgttgaccgaccagctcgacggcgtgcaggtcttcaccgacgacgttcccgggctcgggatcaccgtcgcgacggggacgctgctcgtcgtcgcggtcgtcatgggcgtcatgctgtgggccaccaacttcggtcggcgggtctacgcggtcggaggcaatgccgaggcggcccggttgagcggcattcgggtgggctcggtccacatcggggtctacatggcaagcggggtctgctctgcgctggcgggtctcgtgctggtcgcgcgcagcggcggcggtgcgcaggccaacatggcgctcggcctagagctcagcgcgatcgccgcggcggtgatcggcggtacgtcgatcctgggcggcgagggcgcgatctggcgcggaatggtcggtgtcctcctgctcacgctgatcagcaacgggttcaacctgctcggatgggacacgaccttccagcaggtcgtccagggctgcctcatcctcgtcgcgatcatcaccgaccgctacatccgccgggtgagaagcacgtga

SEQ ID NO: 100063 - protein, 331 aa, Nocardioides sp. JS614
MTETSTPVAAQPSALSRSFNLRDYGVVLGAVALVIYLSLSTTTFLTTGNLTNVLDQAVVVGLLACGATMCIISGVFDLTATASLALSAIIGVEVTQAAGVEAGFVAAVLAGAGLGALTGFIVNVSTAVNAFIATLATSIVYRGVALVITGGAITYPLTDQLDGVQVFTDDVPGLGITVATGTLLVVAVVMGVMLWATNFGRRVYAVGGNAEAARLSGIRVGSVHIGVYMASGVCSALAGLVLVARSGGGAQANMALGLELSAIAAAVIGGTSILGGEGAIWRGMVGVLLLTLISNGFNLLGWDTTFQQVVQGCLILVAIITDRYIRRVRST

SEQ ID NO: 100064 - DNA, 981 bp, Nostoc punctiforme PCC 73102
  CDS (1)..(981): transl_table=11
atggctgccacaaagtctcttgcgcttgcgggtttgcggctgttgaagcgtcttgccaagctcctcaactcccagggcgtgctgctcgcgctccttagtttggctgttttcgcatcctttcgttatgaaacgttcctgacacctcttaatcttatgaacatcatgcgacagaacagtatgctggcgatcgtggcgctgggcatgactgttgtgattctgagtggaggaatcgatctgtccgtgggttccctcgttgctctaggcggtgttgtcgcagcaatgcttgcccgacaaggaagcttcgcggcgatcgtcggtggcattgctagcactacgttgctcggtgtagtcaatggtcttctagtgtctcgcgcgcggctccagccgttcgttgttaccttattcactgccagcgccgcccgcggactggcgttgagcatcaccgaggaaaagtccgttgctgtatcatcgacagcatcgggacttgtttggctgggtagagggtttattggttgggttcctgtacccgtgctgatagttgcactcttatattttgctgcttggtttatgctgcacagaagccgattaggtttgcacatattcgctattggcaacaatgaggaggcctcccgactcatgggcgtgaacccaaaccaagtaaagcttgcagtctacacatttagcgggttgctttcaggacttgctggtattattctcgcaggtcgtttaggagcgggtcagcctgtggctgccttcggctgggagacagatgcgatcgccgccagcgtcatgggaggaacatttctcgcagggggtcaggggagcgtgtttccgacgctagtcggtgtacttttactaggaatgatgtacaatcttttaaatcttgaaggaaccattactccttggtggcagctcgtactccgtggtggcttcttacttttggtcgtgctttttcagcagcgtattgtccacagaggctga

SEQ ID NO: 100065 - protein, 326 aa, Nostoc punctiforme PCC 73102
MAATKSLALAGLRLLKRLAKLLNSQGVLLALLSLAVFASFRYETFLTPLNLMNIMRQNSMLAIVALGMTVVILSGGIDLSVGSLVALGGVVAAMLARQGSFAAIVGGIASTTLLGVVNGLLVSRARLQPFVVTLFTASAARGLALSITEEKSVAVSSTASGLVWLGRGFIGWVPVPVLIVALLYFAAWFMLHRSRLGLHIFAIGNNEEASRLMGVNPNQVKLAVYTFSGLLSGLAGIILAGRLGAGQPVAAFGWETDAIAASVMGGTFLAGGQGSVFPTLVGVLLLGMMYNLLNLEGTITPWWQLVLRGGFLLLVVLFQQRIVHRG

SEQ ID NO: 100066 - DNA, 1128 bp, Haemophilus somnus 2336
  CDS (1)..(1128): transl_table=11
atgaataagttcaaatcaatcaatttacaagtctatattatgctgattgccattatggtgattatgttttttttctcaattgcaacagaaggggcttatttaagtgcaagaaatatctctaacttattacgtcaaactgctatcactggtattcttgctattggtatggtgtttgtgattatctctgcagaaattgacttatcagttggttcactaatggggctactcggtggctttgcggcaattagtaatgtttggtggggttggccgttacccttaactatccttgttaccttgctcttaggtttactaatcggggcgtggagcggttggtgggttgcttatcaaaaagtaccatctttcatcgttaccttagcaggaatgcttgcatttcggggaattttgatcggattaacgaatggtactaccgtttcccctatcagtaatgatatgacaattatcggtcaaggttatctttccgacaccatagggataattttagggagcatcataatattttgctttattgcttggggaagttatcagcgtaaagccagacaaaacctaaatttaccagttgccaaaatgcccaaagaaacagtgaaatatggcatgatagcaatccttattcttggtgcaatttatctgcttaacgattatcgaggcatgccaattccagtattaattctctgtggattagccattataggaacattcatttcgaaaaaaacagcatttggtcgacatatttacgcaattggtggcaatattgatgcagctcgcctatcaggtattgccgtggaaaaagttaaattaaccatttttgctcttaacggcttattagtggcaatagccggcttaattttaagttcccgtttgggagccggagctccatctgccggtcaaaatgcagaactcgatgccattgctgcttgtgttatcggtggagccagtttagccggcggtatcggcagtatttttggcgtagtaatcggggcatttatcatcgccttattggataacggaatgagtatgctggatgtaccgactttttggcaatatattgtaaaaggtggcattttattactagcagtatggatagataccattagtaagaaaaaggtctaa

SEQ ID NO: 100067 - protein, 375 aa, Haemophilus somnus 2336
MNKFKSINLQVYIMLIAIMVIMFFFSIATEGAYLSARNISNLLRQTAITGILAIGMVFVIISAEIDLSVGSLMGLLGGFAAISNVWWGWPLPLTILVTLLLGLLIGAWSGWWVAYQKVPSFIVTLAGMLAFRGILIGLTNGTTVSPISNDMTIIGQGYLSDTIGIILGSIIIFCFIAWGSYQRKARQNLNLPVAKMPKETVKYGMIAILILGAIYLLNDYRGMPIPVLILCGLAIIGTFISKKTAFGRHIYAIGGNIDAARLSGIAVEKVKLTIFALNGLLVAIAGLILSSRLGAGAPSAGQNAELDAIAACVIGGASLAGGIGSIFGVVIGAFIIALLDNGMSMLDVPTFWQYIVKGGILLLAVWIDTISKKKV

SEQ ID NO: 100068 - DNA, 936 bp, Bacillus cereus G9241
  CDS (1)..(936): transl_table=11
atggctaagaaggggaatatattacagcaactcggttctttaatcggtttagcactaattatcgtcgtaattacagctttaaatccagcatttattgaaattccaaatttatttaatatactgcgccaagtatcgattaatgcgcttattgcattcggaatgacctttgtaattttaacagggggtattgacttatcggtaggttctattttagcattatcaagtgcacttgttgctggaatgatggcaagtggcatggatccatttcttgcaatggcagttggattattggcaggtcttgtaatgggaattgtaaacggtatcatcattgcgaaaggaaaagtagctccatttattgcaactttagcaacaatgactatttttcgtgggttgacgcttgtttatatggacggacgtccgatcactggccttggtgatcatttaatgttccaaatgtttggccgcggttattttcttggtattccggtaccagctgttacaatgatgatcgctttcgcagtactgtacttcattttgaagaaaacgacatttggtcgccgtacatttgcaattggtggaaatgaagaagcagcagcactatcgggtattaatgttacgagaattaaagtaatgatttacggtctttccggaattttggcagcgcttgcaggtattgtcttaacatcacgactagattctgcacagccgactgcaggtacttcttatgaattagatgcaattgcagcagttgtattaggtggaacaagtctttctgggggaagaggatggattgttggtacattcatcggtgtacttattatcggtgtactaaataacggtttaaatttattaggtgtatcttctttcttccaacaagttgtaaaaggacttgtaatcttactagctgtattaattgatcgccgaaaagaagcgtaa

SEQ ID NO: 100069 - protein, 311 aa, Bacillus cereus G9241
MAKKGNILQQLGSLIGLALIIVVITALNPAFIEIPNLFNILRQVSINALIAFGMTFVILTGGIDLSVGSILALSSALVAGMMASGMDPFLAMAVGLLAGLVMGIVNGIIIAKGKVAPFIATLATMTIFRGLTLVYMDGRPITGLGDHLMFQMFGRGYFLGIPVPAVTMMIAFAVLYFILKKTTFGRRTFAIGGNEEAAALSGINVTRIKVMIYGLSGILAALAGIVLTSRLDSAQPTAGTSYELDAIAAVVLGGTSLSGGRGWIVGTFIGVLIIGVLNNGLNLLGVSSFFQQVVKGLVILLAVLIDRRKEA

SEQ ID NO: 100070 - DNA, 969 bp, Exiguobacterium sibiricum 255-15; identical to SEQ ID NO: 38877
  CDS (1)..(969): transl_table=11

SEQ ID NO: 100071 - protein, 322 aa, Exiguobacterium sibiricum 255-15; identical to SEQ ID NO: 38878

SEQ ID NO: 100072 - DNA, 1002 bp, Kineococcus radiotolerans SRS30216
  CDS (1)..(1002): transl_table=11
atgaccaccaccacccagctcgacacgaccccggctcccgcggagcggcggcggttctcccgggagtggatcctcgcccagctcatccgccgcgccatgctcatcgtgatgctgctggtcatcgcgttcttcagctaccgcagcctgcggttctcctccccggagaacctgcagaacatcctcatcgcggcggcgccgttcgcgctcatcgccctcggccagaccctggtcatcctcaccggcggcatcgacctctcggtcgggtcggtcatcgcggtcgccgggatgacctcggccgcggtggccaaggccaaccccggccaggtgtggctgaccgtgctctccgcgatggcggtgggcctgctggccggcaccgtcaacggcatcctcgtctccaggatcgacgtgcccccgttcatcgccaccctgggcatgctcaccgccggttccggcatcgcctacgtcatcggcggcggtgcccccatcaacggcctgcccgcggagttcggcagcatcgccaacaccaaggtcctcggcctgcagatcccggtcatcgtcatgatcgtcggcatcgtgctgctggggatcgtcatgcgccgcacggcctacggcatgcgcgtctacgccgtcggtggcaaccgcgtcgccgccgagatcgccggggtcaacgcccggcgcaccctgttcagcgtctacgccgtcagcggcctgctcgccggcctgtccggggtcatgctcgcctcgcgcgtcatctccggtccccccaacctcggccagggctacgagctcgacgcgatcgccgccgtcgtcatcggcggcgccagcctcatgggcgggcgcggcacggtctggggcacggccctgggcctgctgctcatccagaccctcaacaacggcctcgacctcctgctcgtccccgcctactggcaggacgtcatcaagggcgtcctcatcgtcgccgccgtcgcggtcgacgtgtggtcgaccaggcgccgggcctga

SEQ ID NO: 100073 - protein, 333 aa, Kineococcus radiotolerans SRS30216
MTTTTQLDTTPAPAERRRFSREWILAQLIRRAMLIVMLLVIAFFSYRSLRFSSPENLQNILIAAAPFALIALGQTLVILTGGIDLSVGSVIAVAGMTSAAVAKANPGQVWLTVLSAMAVGLLAGTVNGILVSRIDVPPFIATLGMLTAGSGIAYVIGGGAPINGLPAEFGSIANTKVLGLQIPVIVMIVGIVLLGIVMRRTAYGMRVYAVGGNRVAAEIAGVNARRTLFSVYAVSGLLAGLSGVMLASRVISGPPNLGQGYELDAIAAVVIGGASLMGGRGTVWGTALGLLLIQTLNNGLDLLLVPAYWQDVIKGVLIVAAVAVDVWSTRRRA

SEQ ID NO: 100074 - DNA, 984 bp, Photobacterium sp. SKA34
  CDS (1)..(984): transl_table=11
atgagcactaataccatgaataaacccgctgaaaaaaatcgtcaaaagtggtttagcaaagagtggttaattgaacaaaaatcattaattgccttactttttttaattgttgttgtgtcctttttaaaccctaatttttttactgttgacaacattcttaatattcttcgtcaaacctctgtaaatgcgattattgccgtcggtatgactctggttattttaactgcaggtatcgacctaagtgtaggctcagtgctcgcgctctgtggtgcatttgctgccagtatgattgctttagaggtacctgtcttgattgcagtgccaacggctttgcttgctggtgctttattgggcgggattagtggtgtgatcattgccaagggtaaggttcaagcctttatcgcgaccttagtgacgatgacattactgcgcggtatcaccatggtgtataccgatgggcgtcctatctcaacaggctttactgatactggtgatgcgtttgcatggttcggtacaggttatgcgttaggcattcctgttccagtttggctgatggtaattgtctttgctggcgtttggtaccttttaaaccacactcgttttggtcgttatatttacgctcttggaggtaatgaatctgcggctcgtctttcaggtatcaatgttgatcgtgtgaaaattggtgtgtatgccatttgcggtatgttagctgcgctggcaggtattatcgtgacttctcgcttatcttctgcgcagcctacggctggtatgggttacgaattagatgccattgcagctgtcgtattaggtggaacaagcttgatggggggcaagggacgtatcatgggtacgttaattggtgctcttattattggtttcttgaataatgcgctgaacctactggatgtttcttcttattatcaaatgattgctaaagctgttgttatcttgctagcggttttagtagataacaaaaacaaataa

SEQ ID NO: 100075 - protein, 327 aa, Photobacterium sp. SKA34
MSTNTMNKPAEKNRQKWFSKEWLIEQKSLIALLFLIVVVSFLNPNFFTVDNILNILRQTSVNAIIAVGMTLVILTAGIDLSVGSVLALCGAFAASMIALEVPVLIAVPTALLAGALLGGISGVIIAKGKVQAFIATLVTMTLLRGITMVYTDGRPISTGFTDTGDAFAWFGTGYALGIPVPVWLMVIVFAGVWYLLNHTRFGRYIYALGGNESAARLSGINVDRVKIGVYAICGMLAALAGIIVTSRLSSAQPTAGMGYELDAIAAVVLGGTSLMGGKGRIMGTLIGALIIGFLNNALNLLDVSSYYQMIAKAVVILLAVLVDNKNK

SEQ ID NO: 100076 - DNA, 1083 bp, Xanthobacter autotrophicus Py2
  CDS (1)..(1083): transl_table=11
atgacagacacgagtggggagaaacgcgggatgcaggcgttcgaaaccgtcctgagcaaacaggacacgcgggttgcggagttcgaggtccacgccaggtccccgctccagatgctgcagcatttcctgcacgccaatccgaccgcggtaccggccatcgtgctggtgctgggggtggccgtgttctcggccatcgtggggccgcgcttctactcggccttcaacctgtcgctgatcctccagcaggtgaccatcatctgcatcatcggggtggcgcagacgcttatcgtgctcacggccggcatcgacctgtcggtgggcgcggtgatggtgctgtgctcggtgatcatgggtaagctcgccgtcgcgctgggcctgccggtgccggtggcgttcgccgccgggctcgccaccggggcggcctgcggcgcgttcaacggcctgctggtggtgcggttgaagctgccgcccttcatcgtgacgctgggcacctggtccatcttcttctcgctgaacctctggtattccggcgcccagaccatccgtgcccaggacgtggccaaggccgcgccgttcctgcagtggctcggcacgccggtggacctcttgggcgcgcggctcacctacggcaccttcttcatgctggggctggtggccatcgtctggtacgtgctcaaccgcaccgccctcggccgccacatctatgcggtgggcgatgatccggacgcggcgcgcctcgccggcatccgtaccgacaaggtgctgttcagtgtctatgtggcggcgggggtcatctgcgcgctgggggcgtgggcgctcatcggccgcatcggctccatcagcccgcaggcggggcagaccgccaacctcgacagcatcaccgcggtggtgatcggcggggccagcctgttcggcgggcgcggctccatcatcggcaccctcatcggcgcgctcatcgtcggggtctcgcgctccggcctcgctctgtcgggggtggatgtgctgtggcaggagtttgccgtgggcagcctcatcatcgtcgcggtcaccctcgaccagtggatccggaaggtgtcggcatga

SEQ ID NO: 100077 - protein, 360 aa, Xanthobacter autotrophicus Py2
MTDTSGEKRGMQAFETVLSKQDTRVAEFEVHARSPLQMLQHFLHANPTAVPAIVLVLGVAVFSAIVGPRFYSAFNLSLILQQVTIICIIGVAQTLIVLTAGIDLSVGAVMVLCSVIMGKLAVALGLPVPVAFAAGLATGAACGAFNGLLVVRLKLPPFIVTLGTWSIFFSLNLWYSGAQTIRAQDVAKAAPFLQWLGTPVDLLGARLTYGTFFMLGLVAIVWYVLNRTALGRHIYAVGDDPDAARLAGIRTDKVLFSVYVAAGVICALGAWALIGRIGSISPQAGQTANLDSITAVVIGGASLFGGRGSIIGTLIGALIVGVSRSGLALSGVDVLWQEFAVGSLIIVAVTLDQWIRKVSA

SEQ ID NO: 100078 - DNA, 984 bp, Vibrio sp. Ex25
  CDS (1)..(984): transl_table=11
atgagtactaataccatgagcaaaccaaccgaagctagcaacaagaagttgttcacaaaagagtggttgattgagcaaaaatcactgatagcactgatttttttgattgttgttgtgtcatttttgaacccgaacttctttacggtcgacaacattctcaacattcttcgtcaaacctcagtgaatgccattatcgcggtaggtatgacactggttattttaaccgcaggcatcgacttgagtgttggttccgtactggcgctatgtggtgcctttgcggcaagcatgattgcgcttgaagtcccggtgctggtggcggttccgactgctttagtcgcaggtgcagcgttaggtgcaattagcggcatcatcattgcgaagggcaaagtacaggcctttatcgctacgctggttaccatgacgttactacgcggtgtgactatggtgtacaccgaaggtcgtccaatctcgacaggttttactgacacagctgatgcgtttgcatggtttggtaccggctacgcgctaggtattccagtacctgtttggttgatggtagttgtattcgctgcggcttggtacctacttaaccacactcgctttggtcgctacgtttatgcactaggtggcaacgaatcagcgactcgtctatctggtatcaatgtagaccgagtgaagattggtgtgtacgccatctgcggtatgctggcagcgcttgcaggcatcatcgtgacttctcgtctgtcttcggcgcagccaacagcgggtatgggttacgagttagatgcgattgctgcggttgtacttggcggtaccagcttgatgggcggtaaaggccgcatcatgggtacgctaattggtgcgctgatcatcggtttcttaaacaacgctcttaacctactagacgtttcctcttactaccaaatgattgccaaagcagtggttatcttgctcgcagtactggtagacaacaaaaacaaataa

SEQ ID NO: 100079 - protein, 327 aa, Vibrio sp. Ex25
MSTNTMSKPTEASNKKLFTKEWLIEQKSLIALIFLIVVVSFLNPNFFTVDNILNILRQTSVNAIIAVGMTLVILTAGIDLSVGSVLALCGAFAASMIALEVPVLVAVPTALVAGAALGAISGIIIAKGKVQAFIATLVTMTLLRGVTMVYTEGRPISTGFTDTADAFAWFGTGYALGIPVPVWLMVVVFAAAWYLLNHTRFGRYVYALGGNESATRLSGINVDRVKIGVYAICGMLAALAGIIVTSRLSSAQPTAGMGYELDAIAAVVLGGTSLMGGKGRIMGTLIGALIIGFLNNALNLLDVSSYYQMIAKAVVILLAVLVDNKNK

SEQ ID NO: 100080 - DNA, 996 bp, Escherichia coli B
  CDS (1)..(996): transl_table=11
gtgataaaacgtaatttgccactgatgatcaccatcggcgtctttgtgttgggttatctttactgcctgacccagtttcccggttttgcttccacaagagtgatctgcaatatcctgaccgataacgcctttcttgggatcattgccgttggcatgacctttgtgatcctctccggtgggatcgatctctccgtcggttcggtgatcgcctttactggcgtgtttctggcaaaagtgattggcgatttcggcctctcgccgctactggcgtttccgctagtgctggtgatgggctgtgccttcggcgcatttatggggcttttgatcgacgccctgaagatcccggcatttatcattaccctggcggggatgttctttttgcgcggtgtcagctatctcgtttcggaagagtcgattccgataaaccatcccatttatgacacgctctcaagccttgcgtggaaaatccctggcggcggtcgcttaagtgcgatgggactgctgatgttggcggtggtggttatcggtattttcctcgcgcatcgtacccgttttggtaatcaggtatacgccattggcggcaacgcaacgtcggcgaacctgatggggatttccactcgcagcaccactattcgcatttatatgctctccaccggactggcaacgctggcggggattgtcttctcgatttatacccaggccggatatgcgctggcgggcgtaggtgtggaactggatgctatcgcctcagtggtaattggcggtacgcttctgagcggtggcgttggaacggtattagggacgctttttggcgtggcgattcagggactgattcagacttacataaactttgatggcacgctgagctcatggtggacgaaaatcgccatcggtattttgttgtttatttttatagcattacagcgtggattaacggtgctgtgggagaatcgtcagagttcgccagtgacaagagtcaacattgcgcagcgataa

SEQ ID NO: 100081 - protein, 331 aa, Escherichia coli B
MIKRNLPLMITIGVFVLGYLYCLTQFPGFASTRVICNILTDNAFLGIIAVGMTFVILSGGIDLSVGSVIAFTGVFLAKVIGDFGLSPLLAFPLVLVMGCAFGAFMGLLIDALKIPAFIITLAGMFFLRGVSYLVSEESIPINHPIYDTLSSLAWKIPGGGRLSAMGLLMLAVVVIGIFLAHRTRFGNQVYAIGGNATSANLMGISTRSTTIRIYMLSTGLATLAGIVFSIYTQAGYALAGVGVELDAIASVVIGGTLLSGGVGTVLGTLFGVAIQGLIQTYINFDGTLSSWWTKIAIGILLFIFIALQRGLTVLWENRQSSPVTRVNIAQR

SEQ ID NO: 100082 - DNA, 999 bp, Escherichia coli B; identical to SEQ ID NO: 38879
  CDS (1)..(999): transl_table=11

SEQ ID NO: 100083 - protein, 332 aa, Escherichia coli B; identical to SEQ ID NO: 38880

SEQ ID NO: 100084 - DNA, 1020 bp, Azospirillum brasilense; identical to SEQ ID NO: 38885
  CDS (1)..(1020): transl_table=11

SEQ ID NO: 100085 - protein, 339 aa, Azospirillum brasilense; identical to SEQ ID NO: 38886

SEQ ID NO: 100086 - DNA, 1146 bp, Streptomyces olivaceoviridis
  CDS (1)..(1146): transl_table=11
atgaaggcgggcgaactggggtccatccccgtcgtcgtcggcctgatcctcatctgcgtcatcttccagagcctgaactcggcgttcctgtccgcgcagaacatcagcgacatcaccgtcacgatggtcggcaccggcatgatctcggtcggcatcgtcttcgtgctgctgctcggcgagatcgacctgtccgtcggctcggtcagcggcgcctccagcgccatcgcggccgtcctcgccgtgaaccagggcctgcccgagtggctggcggtgctgctcgccgtcgccgccggcgcggccatcggcgcggcccacggcttcttcttcgcggtgctcggcgcccccgccttcgccgtgaccctggccggcctgctgttctggctcggcttcatgctcaagatcctgggcgagaacggcaccatcaacctcgacagcgacggtctgatcgggcagctgacgacgtacttcttcgcggacgtcgccgccgcctacggcctggccgccctcgtcgtcgcggtgttcttcatcacctccttcctgggcaaccggcgccgcgaagccgcgggcatcccgtcccggccgctcagcgacatcgtgctgcgcaccgtgctgctggccgtcgtctccttcgccgcggcgatcatgtacaaccagtacaagggcctgccgctggccacggtgatcttcctcgccttcctcatcggcacggacttcctgctccgccgcaccgcctacggccgcaaggtcttcgccctcggcggcagcgtcgaggcgtcccgccgcgccggcatcaacgtcacggcgatccgcatctccgtgttcggcatcgcgggcggcttcgccgcgatcggcggcctgttcctggcctccaagatcgcgtccgccaaccagagcgccggtaccggtgacctgctgatgaacgcgatcgccgcggccgtgatcggcggcacgtcgctgttcggcggtcgcggccggacctggaacgcgctgctcggtgtgctggtgatcgtctccatccagtacgggctccagctggagtccatcgcggagccggtgaagtacatgatcaccgcggcggtcctgctgaccaccgtcgtgatcgactccgtgacgcgccggacgcagaagaccgcgggccgggcgtag

SEQ ID NO: 100087 - protein, 381 aa, Streptomyces olivaceoviridis
MKAGELGSIPVVVGLILICVIFQSLNSAFLSAQNISDITVTMVGTGMISVGIVFVLLLGEIDLSVGSVSGASSAIAAVLAVNQGLPEWLAVLLAVAAGAAIGAAHGFFFAVLGAPAFAVTLAGLLFWLGFMLKILGENGTINLDSDGLIGQLTTYFFADVAAAYGLAALVVAVFFITSFLGNRRREAAGIPSRPLSDIVLRTVLLAVVSFAAAIMYNQYKGLPLATVIFLAFLIGTDFLLRRTAYGRKVFALGGSVEASRRAGINVTAIRISVFGIAGGFAAIGGLFLASKIASANQSAGTGDLLMNAIAAAVIGGTSLFGGRGRTWNALLGVLVIVSIQYGLQLESIAEPVKYMITAAVLLTTVVIDSVTRRTQKTAGRA

SEQ ID NO: 100088 - DNA, 1002 bp, Rhizobium leguminosarum bv
  CDS (1)..(1002): transl_table=11
atggcaagactgatcagaaaacgcgaaaccctgctgttcctcatcatcgtcgtgatgatcgtggtcttttcgacgcgggctgcggatttcgccacacccggcaatctcgccggcatcttcaacgatacctcgatcctgatcatcctggcgctggcgcagatgacggtcatcctgacgaaatcgatcgacctgtcggtcgctgccaacctcgccttcaccggcatggcaatcgcgatgatgaacgccgcccaccccgatctgccgctcgtcgtgctgatcctgatggccgtcgtcatcggcgcctgtctcggcgccatcaacggctttctcgtctgggcgctggaaatcccgccgatcgtcgtcaccctcggcacgctcaccatctatcgcggcatggccttcgtgctttccggcggcgcctgggtcaacgcgcaccagatgacgccgatcttcctgtcggtgccgcgcacgccggtcctcggcctgcccgtgctcagttgggtgggcatcatcatcgtcatcctgatgtatgtgcttcttcgatatacccagttcggccgctccgcctatgcaaccggcggcaacccgactgccgccgtctatgccggtatcgatacgggctggacgaaattcctcgccttcgtcctctcgggcgctctggccggcctcgccagctatctctgggtatcgcgttatgccgtcgcctatgtcgatatcgccaacggcttcgagctcgacagcgtcgcggcttgcgtcatcggcggcatctcgattgccggtggcgtcggctcggtcgccggcaccgtgctcggcgcgcttttcctcggcgtcatcaaaaacgccctgccggtgatcggcatttcacccttcacgcagatggcgatatcaggcaccgtcatcattctcgccgtcgccttcaacgcccggcgcgagcgcaaccgcggccgcatcatcctgcgtgaccgcgccgcgaccgaaatcaaagcggaggccgcagcatga

SEQ ID NO: 100089 - protein, 333 aa, Rhizobium leguminosarum bv
MARLIRKRETLLFLIIVVMIVVFSTRAADFATPGNLAGIFNDTSILIILALAQMTVILTKSIDLSVAANLAFTGMAIAMMNAAHPDLPLVVLILMAVVIGACLGAINGFLVWALEIPPIVVTLGTLTIYRGMAFVLSGGAWVNAHQMTPIFLSVPRTPVLGLPVLSWVGIIIVILMYVLLRYTQFGRSAYATGGNPTAAVYAGIDTGWTKFLAFVLSGALAGLASYLWVSRYAVAYVDIANGFELDSVAACVIGGISIAGGVGSVAGTVLGALFLGVIKNALPVIGISPFTQMAISGTVIILAVAFNARRERNRGRIILRDRAATEIKAEAAA

SEQ ID NO: 100090 - DNA, 1011 bp, Salmonella typhimurium
  CDS (1)..(1011): transl_table=11
atgagtgcgttaaacaagaaaagctttttgacctggctgaaagagggcggaatttacgtcgttcttttagtgttgctggcgattattattttccaggacccgacttttttaagtttgctgaatttaagtaatattctgacgcaatcttcggtacgtattattatcgcgctgggcgtggcgggactcatcgtcacccaggggacagatctgtcggcggggcgtcaggtagggctggcggcggtcgtggcggcaacattactgcaatcaatggaaaacgccaataaagtgtttccggaaatggcgaccatgccgattgcgctggtcatcctgattgtctgcgcgattggcgcggtgattggcttggtgaacggcatcatcattgcttacctgaacgtgacgccgtttattaccacgcttggcacgatgattatcgtttatgggatcaactccctttactatgactttgtcggcgcttcgcccatttccggctttgacagcggcttttccacctttgcacagggctttgtggcgatgggcagtttccggctctcatacatcaccttttacgctctgattgcggtagcgtttgtctgggtgctgtggaataagacccgttttggtaaaaacatttttgctattggcggcaacccggaagcggcgaaagtttctggcgtaaacgtggcgctgaacctgctgatgatttatgcgctctccggcgtgttttatgccttcggcggcttactggaagcagggcgtattggttctgccaccaacaacctcggctttatgtatgaactggatgcgattgccgcgtgcgtggtcgggggcgtatcgtttagcggcggagtgggtacggtcttcggcgtggtgaccggcgtcattatctttaccgtcatcaactacggcctgacctatatcggggtaaacccgtactggcagtacattatcaaaggcggcattatcattttcgccgtggcgctggactcgctgaaatacgcgcgtaagaagtag

SEQ ID NO: 100091 - protein, 336 aa, Salmonella typhimurium
MSALNKKSFLTWLKEGGIYVVLLVLLAIIIFQDPTFLSLLNLSNILTQSSVRIIIALGVAGLIVTQGTDLSAGRQVGLAAVVAATLLQSMENANKVFPEMATMPIALVILIVCAIGAVIGLVNGIIIAYLNVTPFITTLGTMIIVYGINSLYYDFVGASPISGFDSGFSTFAQGFVAMGSFRLSYITFYALIAVAFVWVLWNKTRFGKNIFAIGGNPEAAKVSGVNVALNLLMIYALSGVFYAFGGLLEAGRIGSATNNLGFMYELDAIAACVVGGVSFSGGVGTVFGVVTGVIIFTVINYGLTYIGVNPYWQYIIKGGIIIFAVALDSLKYARKK

SEQ ID NO: 100092 - DNA, 969 bp, Bacillus subtilis; identical to SEQ ID NO: 38893
  CDS (1)..(969): transl_table=11

SEQ ID NO: 100093 - protein, 322 aa, Bacillus subtilis; identical to SEQ ID NO: 38894

SEQ ID NO: 100094 - DNA, 1182 bp, Escherichia coli O157
  CDS (1)..(1182): transl_table=11
atgtcgaaaagcaatccgtctgaagtgaaattggccgtaccgacatccggtggcttctccgggctgaaatcactgaatttgcaggtcttcgtgatgattgcagctatcatcgcaatcatgctgttctttacctggaccaccgatggtgcctacttaagcgcccgtaacgtctccaacctgttacgccagaccgcgattaccggcatcctcgcggtaggaatggtgttcgtcataatttctgctgaaatcgacctttccgtcggctcaatgatggggctattaggtggcgtcgcggcgatttgtgacgtctggctaggctggcctttgccacttaccatcattgtgacgttggttctgggactgcttctcggtgcctggaacggatggtgggtcgcgtaccgcaaagtcccttcatttattgtcactctcgcgggcatgttggcatttcgcggcatactcattggcatcaccaacggcacgactgtatcccccaccagcgccgcgatgtcacaaattgggcaaagctatctccccgccagcaccggcttcatcattggcgcgcttggcttaatggcttttgttggctggcaatggcgcggaagaatgcgccgtcaggctttgggtttgcagtctccagcctctaccgcagtagtcggtcgccaggctttaaccgctatcatcgtattaggcgcaatctggctgttgaatgattaccgtggcgttcctactcctgttctgctgctgacgttgctgttactcggcggaatgtttatggcaacgcggacagcatttggacgacgcatttatgccatcggcggcaatctggaagcagcacgtctctccggaattaacgttgaacgcaccaaacttgccgtgttcgctattaacggattaatggtagccatcgccggattaatcctcagttctcgacttggcgctggttcaccttctgcggggaatatcgccgagctggacgcaattgcagcatgcgtgattggcggcaccagtctggcaggcggcgtcgggagcgtggctggagcggtaatgggggcattcatcatggcttcactggataacggtatgagtatgatggatgtaccgaccttctggcagtatatcgttaaaggtgcgattctgttgctggcagtatggatggactccgcaaccaaacgccgttcttga

SEQ ID NO: 100095 - protein, 393 aa, Escherichia coli O157
MSKSNPSEVKLAVPTSGGFSGLKSLNLQVFVMIAAIIAIMLFFTWTTDGAYLSARNVSNLLRQTAITGILAVGMVFVIISAEIDLSVGSMMGLLGGVAAICDVWLGWPLPLTIIVTLVLGLLLGAWNGWWVAYRKVPSFIVTLAGMLAFRGILIGITNGTTVSPTSAAMSQIGQSYLPASTGFIIGALGLMAFVGWQWRGRMRRQALGLQSPASTAVVGRQALTAIIVLGAIWLLNDYRGVPTPVLLLTLLLLGGMFMATRTAFGRRIYAIGGNLEAARLSGINVERTKLAVFAINGLMVAIAGLILSSRLGAGSPSAGNIAELDAIAACVIGGTSLAGGVGSVAGAVMGAFIMASLDNGMSMMDVPTFWQYIVKGAILLLAVWMDSATKRRS

SEQ ID NO: 100096 - DNA, 1128 bp, Haemophilus influenzae
  CDS (1)..(1128): transl_table=11
  misc_feature (138)..(138): y is t or c
  misc_feature (152)..(152): w is a or t
atgtttaagttaaaatccgtaaatttacaagtttacattatgttaatagctattgcagtcattatggcattctttagtgttgctactgatggcgcttatttaagtgcaagaaatatttctaacttgttacgccaaacytcaattactggcawtcttgcaattggaatggtttttgtcattatttctgctgaaattgacttatctgttggttcacttatgggcctactgggcggatttgcagctattgccgatgtttggtggggcttcccattacctgtaactattattgcaacaattgctcttggtttaatttttggtatttggaatggttggtgggtggcttatcgcaaagtgccatccttcattgttacacttgcaggttatctcgcatttcgtggaattttgattggtttgactaatggtacaactgtatctcctattagtggaactatgacagttattgggcaaggttatttatcagatattgcaggggttatcttaggtggtattgcagttattggatttgttctttggggaaattatcaacgtagaagtcgccagcagcttcagctggaagtgtctgcattatcaaaagattttacgaaatatgctttgtttgcagtaattgtattaggagcaatttatttacttaatgattatcgtggcattccatttcctgttttagtactggcagttcttgcaatcttagggttattcctctctcgtaaaacttcattcggccgccacgtttatgcaattggtggcaatattgatgcggcaaaattatctggtatcaatgtagagaaaacaaaactgattatctttgcaatgaatggtgtgttagttgcaatagcagggttgattttaagtgctcgtttaggtgcaggatcaccatctgctgggcaaaatgcagaactagatgcgattgcagcttgtgtcattggaggggcaagcttagctggtggtgtaggaagtgtgtttggggtcgttattggcgcacttatcatcgcatcgcttgataatggtatgagtatgcttgatgtgccaactttttggcaatatattgtcaaaggtggcattttgttacttgctgtatggatagatactagtaataagaaaaagatgtaa

SEQ ID NO: 100097 - protein, 375 aa, Haemophilus influenzae
  misc_feature (51)..(51): The Xaa at location 51 stands for Asn, or Ile.
MFKLKSVNLQVYIMLIAIAVIMAFFSVATDGAYLSARNISNLLRQTSITGXLAIGMVFVIISAEIDLSVGSLMGLLGGFAAIADVWWGFPLPVTIIATIALGLIFGIWNGWWVAYRKVPSFIVTLAGYLAFRGILIGLTNGTTVSPISGTMTVIGQGYLSDIAGVILGGIAVIGFVLWGNYQRRSRQQLQLEVSALSKDFTKYALFAVIVLGAIYLLNDYRGIPFPVLVLAVLAILGLFLSRKTSFGRHVYAIGGNIDAAKLSGINVEKTKLIIFAMNGVLVAIAGLILSARLGAGSPSAGQNAELDAIAACVIGGASLAGGVGSVFGVVIGALIIASLDNGMSMLDVPTFWQYIVKGGILLLAVWIDTSNKKKM

SEQ ID NO: 100098 - DNA, 1002 bp, Rhizobium sp
  CDS (1)..(1002): transl_table=11
atgacgaagaccattattgaccaggccggggctacgccaggggcaatccgaactcgggaaggcctcgtttccgcctaccgtacggaattggcgattgcaggggccattgtccttctcgttctcgcggttggaacacaggtgccgcaggcgatgagctggggcaatttcgccaatattacacaggccggagcaccgctgatcatcatgtcgctcggcgtgcttctcgtcgtcattaccggcggcatagacctttctgtcggctcggtcttctcactgaccggcatggtcacagcacaggctatggcctcaggtctcgacgtcagcgccgcgctgattgggcttggggtcgggcttgtgttcggttcgatcaacggctttctcgtcacggtggccggtctcgcgcctttcgtcgtcacgctgatcacctttgccgtggccggctcactcgctttcatcgtcaccaatggacgctcgatgccgatcggcgatccggatttctggctgctcaacagcggcagcctgatacccggcgtgcccaactacatcctgttctgcatcgtcctgctcgtcgtgatcgagatctttctcaagaagatggtcgcggggcgctggttctatgccgtgggcagcagcgcggcagcggcacgtcttctgggaattcccgtcaagcggacgcagttcttcgcttatgttgcctcgtcacttctcgcatccttctccggattgctgacgatttcctacattctcaatgcggaatcgacggccggttcgagcctcatgctgcaggcgatcgccgcggttgtgatcggcggcgcaagcctgcttggcggcacgggaacggcggtgggcgcggttctcggagcgctcatgatcacggtcatccagaacggcgtcaatctcatcggcatcaatagtttctggcagggatcggtcaccggcctcgccatcctgatcgcggtcctgatcgatcgcttcagcaaatcgcggcgcggtgccgtgtaa

SEQ ID NO: 100099 - protein, 333 aa, Rhizobium sp
MTKTIIDQAGATPGAIRTREGLVSAYRTELAIAGAIVLLVLAVGTQVPQAMSWGNFANITQAGAPLIIMSLGVLLVVITGGIDLSVGSVFSLTGMVTAQAMASGLDVSAALIGLGVGLVFGSINGFLVTVAGLAPFVVTLITFAVAGSLAFIVTNGRSMPIGDPDFWLLNSGSLIPGVPNYILFCIVLLVVIEIFLKKMVAGRWFYAVGSSAAAARLLGIPVKRTQFFAYVASSLLASFSGLLTISYILNAESTAGSSLMLQAIAAVVIGGASLLGGTGTAVGAVLGALMITVIQNGVNLIGINSFWQGSVTGLAILIAVLIDRFSKSRRGAV

SEQ ID NO: 100100 - DNA, 24 bp, Artificial sequence
  primer
atgtctgcttcgtcattaccattg

SEQ ID NO: 100101 - DNA, 24 bp, Artificial sequence
  primer
ttagcgtttcgctttactgcttcg

SEQ ID NO: 100102 - protein, 369 aa, Artificial sequence
  consensus sequence
  Variant (2)..(5): Xaa in position 2 to 5 is any amino acid
  Variant (7)..(20): Xaa in position 7 to 20 is any amino acid
  Variant (22)..(22): Xaa in position 22 is any amino acid
  Variant (24)..(26): Xaa in position 24 to 26 is any amino acid
  Variant (29)..(32): Xaa in position 29 to 32 is any amino acid
  Variant (39)..(65): Xaa in position 39 to 65 is any amino acid
  Variant (66)..(95): Xaa in position 66 to 95 is any or no amino acid
  Variant (97)..(99): Xaa in position 97 to 99 is any amino acid
  Variant (101)..(103): Xaa in position 101 to 103 is any amino acid
  Variant (105)..(110): Xaa in position 105 to 110 is any amino acid
  Variant (111)..(114): Xaa in position 111 to 114 is any or no amino acid
  Variant (116)..(117): Xaa in position 116 to 117 is any amino acid
  Variant (120)..(125): Xaa in position 120 to 125 is any amino acid
  Variant (128)..(171): Xaa in position 128 to 171 is any amino acid
  Variant (172)..(245): Xaa in position 172 to 245 is any or no amino acid
  Variant (247)..(248): Xaa in position 247 to 248 is any amino acid
  Variant (251)..(253): Xaa in position 251 to 253 is any amino acid
  Variant (255)..(255): Xaa in position 255 is any amino acid
  Variant (257)..(257): Xaa in position 257 is any amino acid
  Variant (259)..(260): Xaa in position 259 to 260 is any amino acid
  Variant (262)..(265): Xaa in position 262 to 265 is any amino acid
  Variant (267)..(280): Xaa in position 267 to 280 is any amino acid
  Variant (282)..(287): Xaa in position 282 to 287 is any amino acid
  Variant (289)..(293): Xaa in position 289 to 293 is any amino acid
  Variant (295)..(306): Xaa in position 295 to 306 is any amino acid
  Variant (307)..(307): Xaa in position 307 is any or no amino acid
  Variant (310)..(311): Xaa in position 310 to 311 is any amino acid
  Variant (315)..(315): Xaa in position 315 is any amino acid
  Variant (317)..(317): Xaa in position 317 is any amino acid
  Variant (320)..(321): Xaa in position 320 to 321 is any amino acid
  Variant (323)..(323): Xaa in position 323 is any amino acid
  Variant (326)..(326): Xaa in position 326 is any amino acid
  Variant (328)..(330): Xaa in position 328 to 330 is any amino acid
  Variant (332)..(334): Xaa in position 332 to 334 is any amino acid
  Variant (336)..(343): Xaa in position 336 to 343 is any amino acid
  Variant (346)..(355): Xaa in position 346 to 355 is any amino acid
  Variant (356)..(356): Xaa in position 356 is any or no amino acid
  Variant (358)..(361): Xaa in position 358 to 361 is any amino acid
  Variant (363)..(367): Xaa in position 363 to 367 is any amino acid
FXXXXNXXXXXXXXXXXXXXAXGXXXVIXXXXIDLSVGXXXXXXXXXXXXXXXXXXXXXXXXXXXXXXXXXXXXXXXXXXXXXXXXXXXXXXXXXGXXXGXXXGXXXXXXXXXXFXXTLXXXXXXRGXXXXXXXXXXXXXXXXXXXXXXXXXXXXXXXXXXXXXXXXXXXXXXXXXXXXXXXXXXXXXXXXXXXXXXXXXXXXXXXXXXXXXXXXXXXXXXXXXXXXXXXXXXXXXXXXXXXXXXTXXGRXXXAXGXNXXAXXXXGXXXXXXXXXXXXXXGXXXXXXGXXXXXRXXXXXXXXXXXXXELXXIAAXVXGGXXLXGGXGXXXGXXXGXXXXXXXXNGXXXXXXXXXXXQXXXXGXXXXXAV

SEQ ID NO: 100103 - protein, 46 aa, Artificial sequence
  protein pattern
  Variant (2)..(2): Xaa in position 2 is any amino acid
  Variant (3)..(7): Xaa in position 3 to 7 is any or no amino acid
  Variant (9)..(9): Xaa in position 9 is Phe, Leu or Met
  Variant (10)..(10): Xaa in position 10 is any amino acid
  Variant (11)..(11): Xaa in position 11 is Ala, Ser or Val
  Variant (14)..(14): Xaa in position 14 is Ala or Ser
  Variant (15)..(15): Xaa in position 15 is Ala, Cys, Thr or Val
  Variant (16)..(16): Xaa in position 16 is any amino acid
  Variant (17)..(17): Xaa in position 17 is Ile, Leu or Val
  Variant (20)..(20): Xaa in position 20 is Ala, Cys, Thr or Val
  Variant (21)..(23): Xaa in position 21 to 23 is any amino acid
  Variant (26)..(26): Xaa in position 26 is any amino acid
  Variant (28)..(31): Xaa in position 28 to 31 is any amino acid
  Variant (32)..(32): Xaa in position 32 is Ala, Gly, Ser, Thr or Val
  Variant (33)..(34): Xaa in position 33 to 34 is any amino acid
  Variant (36)..(41): Xaa in position 36 to 41 is any amino acid
  Variant (42)..(42): Xaa in position 42 is Ile, Leu or Met
  Variant (43)..(45): Xaa in position 43 to 45 is any amino acid
  Variant (46)..(46): Xaa in position 46 is Phe, Ile, Leu or Met
GXXXXXXEXXXIAXXXXGGXXXXGGXGXXXXXXXGXXXXXXXXXXX

SEQ ID NO: 100104 - protein, 34 aa, Artificial sequence
  protein pattern
  Variant (2)..(5): Xaa in position 2 to 5 is any amino acid
  Variant (6)..(6): Xaa in position 6 is Ala or Gly
  Variant (7)..(7): Xaa in position 7 is any amino acid
  Variant (9)..(9): Xaa in position 9 is Ala, Gly, Asn, Ser or Thr
  Variant (11)..(12): Xaa in position 11 to 12 is any amino acid
  Variant (13)..(13): Xaa in position 13 is any or no amino acid
  Variant (15)..(17): Xaa in position 15 to 17 is any amino acid
  Variant (18)..(18): Xaa in position 18 is any or no amino acid
  Variant (20)..(20): Xaa in position 20 is Ile, Leu, Met or Val
  Variant (21)..(29): Xaa in position 21 to 29 is any amino acid
  Variant (30)..(30): Xaa in position 30 is Phe or Tyr
  Variant (31)..(33): Xaa in position 31 to 33 is any amino acid
GXXXXXXGXNXXXAXXXXGXXXXXXXXXXXXXXG

SEQ ID NO: 100105 - DNA, 1062 bp, Escherichia coli
  CDS (1)..(1062): transl_table=11
atggctatcgacgaaaacaaacagaaagcgttggcggcagcactgggccagattgagaaacaatttggtaaaggctccatcatgcgcctgggtgaagaccgttccatggatgtggaaaccatctctaccggttcgctttcactggatatcgcgcttggggcaggtggtctgccgatgggccgtatcgtcgaaatctacggaccggaatcttccggtaaaaccacgctgacgctgcaggtgatcgccgcagcgcagcgtgaaggtaaaacctgtgcgtttatcgatgctgaacacgcgctggacccaatctacgcacgtaaactgggcgtcgatatcgacaacctgctgtgctcccagccggacaccggcgagcaggcactggaaatctgtgacgccctggcgcgttctggcgcagtagacgttatcgtcgttgactccgtggcggcactgacgccgaaagcggaaatcgaaggcgaaatcggcgactctcacatgggccttgcggcacgtatgatgagccaggcgatgcgtaagctggcgggtaacctgaagcagtccaacacgctgctgatcttcatcaaccagatccgtatgaaaattggtgtgatgttcggtaacccggaaaccactaccggtggtaacgcgctgaaattctacgcctctgttcgtctcgacatccgtcgtatcggcgcggtgaaagagggcgaaaacgtggtgggtagcgaaacccgcgtgaaagtggtgaagaacaaaatcgctgcgccgtttaaacaggctgaattccagatcctctacggcgaaggtatcaacttctacggcgaactggttgacctgggcgtaaaagagaagctgatcgagaaagcaggcgcgtggtacagctacaaaggtgagaagatcggtcagggtaaagcgaatgcgactgcctggctgaaagataacccggaaaccgcgaaagagatcgagaagaaagtacgtgagttgctgctgagcaacccgaactcaacgccggatttctctgtagatgatagcgaaggcgtagcagaaactaacgaagatttttaa

SEQ ID NO: 100106 - protein, 353 aa, Escherichia coli
MAIDENKQKALAAALGQIEKQFGKGSIMRLGEDRSMDVETISTGSLSLDIALGAGGLPMGRIVEIYGPESSGKTTLTLQVIAAAQREGKTCAFIDAEHALDPIYARKLGVDIDNLLCSQPDTGEQALEICDALARSGAVDVIVVDSVAALTPKAEIEGEIGDSHMGLAARMMSQAMRKLAGNLKQSNTLLIFINQIRMKIGVMFGNPETTTGGNALKFYASVRLDIRRIGAVKEGENVVGSETRVKVVKNKIAAPFKQAEFQILYGEGINFYGELVDLGVKEKLIEKAGAWYSYKGEKIGQGKANATAWLKDNPETAKEIEKKVRELLLSNPNSTPDFSVDDSEGVAETNEDF

SEQ ID NO: 100107 - DNA, 1290 bp, Oryza sativa (japonica cultivar-group)
  CDS (1)..(1290)
atggcgaacctcctgaggcgcgcgtcgctgcggcgcgccgtcgccgccgtcgcggcagcagccgcgccctgccccgagagctataagcaagggatctgtggctctactttccactgccggtatttctcgtctaaagccaaaaagaagacaaagtccagtggaactgactctggtgaagagaatctgtcaaagaaagacttggctctacaccaggctattgatcaaataacatctgcatttgggaagggcgcaataatgtggcttggtcgttctgaaggtcgtagagaagtacctgttgtgtcaactgggtctttctctttggatttggcattgggaactggtggacttccaaagggtcgtgttatagaggtgtatggtccagaagcttcaggcaagacaactcttgcacttcacgttattgcagaagcacaaaagcatggcggttattgtgccttcgtagatgcagagcatgccttagatccagctctggctgaatcaattggggtcaacaccagtaatttacttctctctcagccagactgtggcgagcaggcactcagtcttgtggacacactgattcgaagcggctctgttgatgttgttgttgttgatagtgtagcagctcttgtccctaagagtgagcttgacggggagatgggtgatgcacatgttgctctccaggctagattgatgagccaagctcttcgcaagctgagccactctctctcactttcccagacaattttgttattcattaaccagatcaggtctaaagtgaccacatttggaggatttggaggtccaatggaggttacttctggtggaaatgcccttaaattctatgcttccgttagaatgaacatcaagcgtattggtttggtaaagaaaggcgaagagactataggtagtcaagtgcttgtgaagattgtgaaaaacaagcatgccccaccgttcaagacagcacagtttgagctggaatttggtaaagggatatgccgcagttcagagcttattgaacttggattaaagcacaagcttgtcaaaaagttgggtggtgcattttattctttcaacgaagagtcatatcgtggtaaagatgcccttaaatcttacctcaacgaaaatgaaagtatcgcaaaagaactggagacgaatttaaggaaattgatggaaactcaagcacctaaaaagcaggaggatgaaggtgatttcctgagtgatctgcctgaagagagtctcgccactgaaacatcctccgaggaggaactggcagctgtaatagaagcttaa

SEQ ID NO: 100108 - protein, 429 aa, Oryza sativa (japonica cultivar-group)
MANLLRRASLRRAVAAVAAAAAPCPESYKQGICGSTFHCRYFSSKAKKKTKSSGTDSGEENLSKKDLALHQAIDQITSAFGKGAIMWLGRSEGRREVPVVSTGSFSLDLALGTGGLPKGRVIEVYGPEASGKTTLALHVIAEAQKHGGYCAFVDAEHALDPALAESIGVNTSNLLLSQPDCGEQALSLVDTLIRSGSVDVVVVDSVAALVPKSELDGEMGDAHVALQARLMSQALRKLSHSLSLSQTILLFINQIRSKVTTFGGFGGPMEVTSGGNALKFYASVRMNIKRIGLVKKGEETIGSQVLVKIVKNKHAPPFKTAQFELEFGKGICRSSELIELGLKHKLVKKLGGAFYSFNEESYRGKDALKSYLNENESIAKELETNLRKLMETQAPKKQEDEGDFLSDLPEESLATETSSEEELAAVIEA

SEQ ID NO: 100109 - DNA, 1257 bp, Oryza sativa (japonica cultivar-group)
  CDS (1)..(1257)
atggccgccgccaccgtcgcagcctcctcccgcttcggccccgcccacctgcttccccgctcccgcaggaaggggagggcccccgcgccgagcgcgcgcgccacggcctgcggagccgtcgggcgaggccgccggctgcgctgcgagttcgtggccggcggcgggaacggcgcgctctccggggaggacgacccgcgcctcatagaccgccaaaaagctcttgatgcagccatgaatgacataaacagctcctttggaaaaggcagtgttacaagattaggaagcgcgggtggtgcctttgttgagacatttccaagtggctgcttgacactagattttgccttgggtggtggccttccaaaaggaagagtagtagaggtgtatggtccagaaagcagtggaaagactactctagcgctgcatgccattgctgaagtacagaaattgggaggcaatgccatgcttgtggatgcagagcatgcttttgatccagcttattctaaagcacttggggtagatattgaaaatctgattgtatgccagccagacaatggagagatggcactagaaattgcggaccgcatgtgcagatctggagctatcgatctcatctgtattgattcagtgtcagctctcactccgcgtgcagaaattgaaggtgagatagggatgcagcagatgggtttacaagcacgtctaatgagtcaagcattgagaaagatgtcaggcaatgcctcaaaggctggttgtactcttatgttcttgaatcaaataagatacaagattggagtattttatggtaatcctgaagtcactagtggagggatagctttgaaattcttcgcatcagttcgactagagatacggcccattggcaagataaaatctgccaagggagatgaagatgtgggtgtgaaggttcgtgtcagagtgcagaagagtaaagtctccagaccctacaagcaagctgaatttgagatcatctttggggagggcgttagtaaactgggatgtgttcttgattgtgctgagctgatggaagtcgttgcaaagaaaggctcatggtatagctacaaagaaatgagattgggtcaaggcagagaaaaagcactgcagtatctccgagagagccctaccatctgtgatgagatagaaaaggctgttcgagccatgataccagaaggagcaagacatatgagcctgctcgctttcgggcggtcatcattgaccgaagaagaacaagtagacgatgagtga

SEQ ID NO: 100110 - protein, 418 aa, Oryza sativa (japonica cultivar-group)
MAAATVAASSRFGPAHLLPRSRRKGRAPAPSARATACGAVGRGRRLRCEFVAGGGNGALSGEDDPRLIDRQKALDAAMNDINSSFGKGSVTRLGSAGGAFVETFPSGCLTLDFALGGGLPKGRVVEVYGPESSGKTTLALHAIAEVQKLGGNAMLVDAEHAFDPAYSKALGVDIENLIVCQPDNGEMALEIADRMCRSGAIDLICIDSVSALTPRAEIEGEIGMQQMGLQARLMSQALRKMSGNASKAGCTLMFLNQIRYKIGVFYGNPEVTSGGIALKFFASVRLEIRPIGKIKSAKGDEDVGVKVRVRVQKSKVSRPYKQAEFEIIFGEGVSKLGCVLDCAELMEVVAKKGSWYSYKEMRLGQGREKALQYLRESPTICDEIEKAVRAMIPEGARHMSLLAFGRSSLTEEEQVDDE

SEQ ID NO: 100111 - DNA, 1293 bp, Oryza sativa (japonica cultivar-group)
  CDS (1)..(1293)
atggccagggccctcctcctccggcgcggccaccccttcctccgccgcctcctgcggcctcccccgcctcccacctcctctgtactggaatcctgcaatagaaatgtgtcaccaagagttcagttgtggagattctctgcagaagggaaagaccagacaaattcaagtgaagatggttacagtgaggcaaacattaagaagaaggactttgcgctacaacaagctttggaccaaattaagtctgcatttggtgaggagtcaattatgtggctaaatcactcttacggtcctaaagaagttcctgtcatatctactggatcctttgcattggacatggctttaggaattggtgggctcccgaagggaagggttgttgaaatttatggtccagaggcatcaggaaaaaccactttagcacttcatatcatagctgaagcacagaagaatggaggatattgtgcttttattgatgccgagcatgccctggatccaacattagcagaatctataggtgttaaggcagaacacctgttattatctcaaccagactgtggtgaacaggcccttggtcttgctgatatcttaatccgaagtggctctattgatgttgtggttgtggacagtgtagcagctcttgttccaaaaactgaactggatggtgagatgggagatgcccatgttgcacttcaagcaaggcttatgagtcaagcacttcgcaagttgagccattctctttctcgctccaggacaatgttggtgtttattaatcaggtaagatcgaaattaagcacatttagtggattcggagcaccagcagaagtaacctgtggagggaatgccttaaagttctatgcttctgtccgcttgaacaccaaaaggattggtcttataaaaaagtcagaagaggttgtaggcacacaaattcaggtcaagattgtcaagaacaagcatgcacccccatttaagactgtacaccttgagcttgagtttggtaagggcctgagtcgtgaattggagattattgaagtaggcttcaaacacaagttcataacaaaatcaggagtattctatcacttgaacgggcaaaatttccatggaaaggatgctcttaaatgttatctcgctgaaaacaagaatgtcctggaatctctgatgtcaatgataaaggaaagcataatgcaacaggagtcccatccagatagaaacatggaggatgccaacccagatacgagcataacagaagagttcgtttcagcaacagatgaacaagtacctgaagaggttgaggcctga

SEQ ID NO: 100112 - protein, 430 aa, Oryza sativa (japonica cultivar-group)
MARALLLRRGHPFLRRLLRPPPPPTSSVLESCNRNVSPRVQLWRFSAEGKDQTNSSEDGYSEANIKKKDFALQQALDQIKSAFGEESIMWLNHSYGPKEVPVISTGSFALDMALGIGGLPKGRVVEIYGPEASGKTTLALHIIAEAQKNGGYCAFIDAEHALDPTLAESIGVKAEHLLLSQPDCGEQALGLADILIRSGSIDVVVVDSVAALVPKTELDGEMGDAHVALQARLMSQALRKLSHSLSRSRTMLVFINQVRSKLSTFSGFGAPAEVTCGGNALKFYASVRLNTKRIGLIKKSEEVVGTQIQVKIVKNKHAPPFKTVHLELEFGKGLSRELEIIEVGFKHKFITKSGVFYHLNGQNFHGKDALKCYLAENKNVLESLMSMIKESIMQQESHPDRNMEDANPDTSITEEFVSATDEQVPEEVEA

SEQ ID NO: 100113 - DNA, 1293 bp, Arabidopsis thaliana
  CDS (1)..(1293)
atggcgaggattctccgaaacgtttattcactgagaagctctctgttttcgtcagagttacttagaagaagtgtggttggaacatcgtttcagctccgaggctttgctgccaaagctaaaaagaaatccaagtcagatggaaatggatcatctgaagaaggtatgtcgaaaaaggagattgctcttcagcaagcacttgatcagattaccagttcatttggcaaagggtccataatgtatctcggtcgtgctgtttctcctagaaatgtcccggttttctctaccggatcttttgcccttgatgtagctttgggagttggtggccttcctaaggggcgtgttgtggagatatatggtcctgaagcatcgggaaagacaacacttgctcttcatgttattgcagaagcacaaaaacaaggaggaacctgtgtctttgtagatgctgagcatgctcttgattcgtcacttgctaaggcaatcggtgtaaatacagaaaatctgcttctatcacagcctgattgtggcgaacaggcccttagtcttgtggatactttaatccgaagtggttcagttgatgttattgtagttgacagtgtggctgctcttgtacctaaaggagaacttgagggcgagatgggtgatgcacatatggctatgcaagccagattgatgagccaagctttgcgtaaattgagccattctttatcgttatcgcaaacacttctgatctttataaatcaggtgagatcaaaactatctacgtttggaggatttggaggtccaacagaagttacttgtggtggaaatgctttgaagttttatgcttctatgcgtttgaatatcaagcgaattggacttatcaagaaaggcgaagagacaacgggaagtcaagtctccgtgaagatagtgaagaacaaactcgctccgccgtttagaactgctcagtttgagcttgaattcggcaaaggaatctgcaagatcacggagataatcgacctgagcataaagcacaagttcatcgcgaaaaacggaacattctacaatctcaacggtaaaaactaccatggaaaagaggctttaaagagattccttaaacagaacgaatctgatcaagaagagctcatgaagaagctccaagacaagctcatcgccgatgaagctgcagataaggaaactgaatctgaatctgaggaagaagattccctgagagttgtggtttcacctgacaacacagatgatgaatcaccagctcttgttgttggagctgctgcagtggttgttgaggcagcatga

SEQ ID NO: 100114 - protein, 430 aa, Arabidopsis thaliana
MARILRNVYSLRSSLFSSELLRRSVVGTSFQLRGFAAKAKKKSKSDGNGSSEEGMSKKEIALQQALDQITSSFGKGSIMYLGRAVSPRNVPVFSTGSFALDVALGVGGLPKGRVVEIYGPEASGKTTLALHVIAEAQKQGGTCVFVDAEHALDSSLAKAIGVNTENLLLSQPDCGEQALSLVDTLIRSGSVDVIVVDSVAALVPKGELEGEMGDAHMAMQARLMSQALRKLSHSLSLSQTLLIFINQVRSKLSTFGGFGGPTEVTCGGNALKFYASMRLNIKRIGLIKKGEETTGSQVSVKIVKNKLAPPFRTAQFELEFGKGICKITEIIDLSIKHKFIAKNGTFYNLNGKNYHGKEALKRFLKQNESDQEELMKKLQDKLIADEAADKETESESEEEDSLRVVVSPDNTDDESPALVVGAAAVVVEAA

SEQ ID NO: 100115 - DNA, 1239 bp, Vibrio cholerae O1 biovar eltor str. N16961
  CDS (1)..(1239): transl_table=11
ttgagcatctcgcagcagatcaggttcaaaacgttaactgagccaaacttttttctatacaggggtggacactgtacaaatcaacagtataataaaccccaacatgacaaatcagcgtcgacccgatttcgacacaattacctatcacctgagagtgactatccggagagagtaatggacgagaataaacagaaggcacttgcggccgccctcggtcaaattgaaaagcaatttggtaaaggctccatcatgcgcttaggcgacaaccgcgcgatggatgtagaaaccatttcgaccggttctctgtctctggatatcgcgttgggtgctggtggtctaccaatgggacgtatcgttgagatcttcggccctgaatcttcgggtaaaacgacactgactctggaactgattgctgctgcacaacgtgaaggtaaaacctgtgcgtttatcgatgccgagcacgcactggatccggtttatgccaaaaaattgggcgtgaatatcgatgagctactggtttctcagccagataccggcgagcaagcactggaaatttgtgatgcactggctcgctctggtgctgtggatgtcatcgttgttgactcagtagcggctttgacaccaaaagcggaaattgaaggcgaaatgggcgatagccacatgggtctgcaagcgcgtatgttgtcgcaagcaatgcgtaaactgacgggtaacctcaagcaatccaactgtatgtgtatcttcatcaaccaaattcgtatgaagattggtgtgatgtttggtaacccagaaactaccactggcggtaacgcactgaaattctacgcttctgttcgtttggatattcgccgtactggcgcaatcaaagaaggcgaagaagtggtgggtaacgaaacccgtatcaaggttgtgaagaacaagattgctgcgccgtttaaagaagcgaacactcagatcatgtatggccaaggtttcaatcgtgaaggtgaattgatcgatcttggtgtgaaacacaaaatggttgagaagtcaggcgcttggtacagctataacggcgataaaatcggccaaggtaaagcgaatgcctacaagtatctgaaagaaaacccagaaattgcgaaaactctagataaaaaactgcgtgaaatgctgttaaacccagaaaacatgcagctgatcgctgaaacatcttctgcggcggatgacgtcgaatttggcgcggtgccagaagagttttaa

SEQ ID NO: 100116 - protein, 412 aa, Vibrio cholerae O1 biovar eltor str. N16961
MSISQQIRFKTLTEPNFFLYRGGHCTNQQYNKPQHDKSASTRFRHNYLSPESDYPERVMDENKQKALAAALGQIEKQFGKGSIMRLGDNRAMDVETISTGSLSLDIALGAGGLPMGRIVEIFGPESSGKTTLTLELIAAAQREGKTCAFIDAEHALDPVYAKKLGVNIDELLVSQPDTGEQALEICDALARSGAVDVIVVDSVAALTPKAEIEGEMGDSHMGLQARMLSQAMRKLTGNLKQSNCMCIFINQIRMKIGVMFGNPETTTGGNALKFYASVRLDIRRTGAIKEGEEVVGNETRIKVVKNKIAAPFKEANTQIMYGQGFNREGELIDLGVKHKMVEKSGAWYSYNGDKIGQGKANAYKYLKENPEIAKTLDKKLREMLLNPENMQLIAETSSAADDVEFGAVPEEF

SEQ ID NO: 100117 - DNA, 1062 bp, Escherichia coli O157:H7 EDL933
  CDS (1)..(1062): transl_table=11
  misc_feature (78)..(78): y is t or c
  misc_feature (472)..(472): n is a, g, c or t
  misc_feature (702)..(702): r is g or a
atggctatcgacgaaaacaaacagaaagcgttggcggcagcactgggccagattgagaaacaatttggtaaaggctcyatcatgcgcctgggtgaagaccgttccatggatgtggaaaccatctctaccggttcgctttcactggatatcgcgcttggggcaggtggtctgccgatgggccgtatcgtcgaaatctacggaccggaatcttccggtaaaaccacgctgacgttgcaggtgattgccgcagcgcagcgtgaaggtaaaacctgtgcgtttatcgatgctgaacacgcgctggacccaatctacgcacgtaaactgggcgtcgatatcgacaacctgctgtgctcccagccggacaccggcgagcaggcactggaaatctgtgacgccctggcgcgttctggcgcagtaaacgttatcgtcgttgactccgtggcggcactgacgccgaaagcggaaatcgaangcgaaatcggcgactctcacatgggccttgcggcacgtatgatgagccaggcgatgcgtaagctggcgggtaacctgaagcagtccaacacgctgctgatcttcatcaaccagatccgtatgaaaattggtgtgatgttcggtaacccggaaaccactaccggtggtaacgcgctgaaattctacgcctctgttcgtctcgacatccgtcgtatcggcgcggtgaaagarggcgaaaacgtggtgggtagcgaaacccgcgtgaaagtggtgaagaacaaaatcgctgcgccgtttaaacaggctgaattccagatcctctacggcgaaggtatcaacttctacggcgaactggttgacctgggcgtaaaagagaagctgatcgagaaagcaggcgcgtggtacagctacaaaggtgagaagatcggtcagggtaaagcgaatgcaactgcctggctgaaagataacccggaaaccgcgaaagagatcgagaagaaagtacgtgagttgctgctgagcaacccgaactcaacgccggatttctctgtagatgatagcgaaggcgtagcagaaactaacgaagatttttaa

SEQ ID NO: 100118 - protein, 353 aa, Escherichia coli O157:H7 EDL933
  misc_feature (158)..(158): The Xaa at location 158 stands for Arg, Cys, Gly, or Ser.
MAIDENKQKALAAALGQIEKQFGKGSIMRLGEDRSMDVETISTGSLSLDIALGAGGLPMGRIVEIYGPESSGKTTLTLQVIAAAQREGKTCAFIDAEHALDPIYARKLGVDIDNLLCSQPDTGEQALEICDALARSGAVNVIVVDSVAALTPKAEIEXEIGDSHMGLAARMMSQAMRKLAGNLKQSNTLLIFINQIRMKIGVMFGNPETTTGGNALKFYASVRLDIRRIGAVKEGENVVGSETRVKVVKNKIAAPFKQAEFQILYGEGINFYGELVDLGVKEKLIEKAGAWYSYKGEKIGQGKANATAWLKDNPETAKEIEKKVRELLLSNPNSTPDFSVDDSEGVAETNEDF

SEQ ID NO: 100119 - DNA, 1251 bp, Agrobacterium tumefaciens str. C58
  CDS (1)..(1251): transl_table=11
atgggccgggcacggaaaaacgaaagcagaacaaactacttatcgttatttgttttcaatatgctggctcagccttgcgaaatgagaacaaatagagtacataccgtttccatactgcttcgttgcctgtgcggcttcaataacctaaaggtggttcggatggcacaaaattctttgcgtctcgtagaggataaatcggtggataaaagcaaggcactggaagcggcgctctcccagatcgaacggtcgttcggcaagggatcgatcatgaagctcggttccaatgaaaatgtggttgaagtggaaaccgtttcgacgggctcgctcagcctggatatcgcgctcggcatcggcggcttgccgaaggggcgtatcattgagatttacggcccggaaagctccggtaaaacgacgctggcgctgcagacgatcgcggaagcccagaagaagggcggcatctgcgccttcgtggacgccgaacacgcgctcgatccggtttatgcccgcaagctcggtgtggatttgcagagccttctgatctcgcagcccgataccggcgagcaggcgcttgagatcaccgatacgctggtgcgttcgggcgctgtggacgttcttgtcatcgattcggttgcggccttgacgccgcgggcggaaatcgaaggtgaaatgggcgatagcctgccgggtcttcaggcccgtctgatgagccaggcgctgcgcaagctgaccgcctcgatctccaagtcgaagtgcatggtgatcttcatcaaccagattcgcatgaagatcggcgtcatgtttggttcgccggaaacgacgacgggcggtaacgctctcaagttctatgcgtccgtccgcctcgacatccgccgtatcggcgccgtcaaggagcgcgaagaggttgtcggcaaccagacgcgcgtcaaggtcgtcaagaacaagatggcgccgcccttcaaacaggttgaattcgacatcatgtatggcgaaggtgtttccaagaccggtgagctggtcgatctcggcgtgaaggccggtatcgtcgagaagtccggcgcatggttctcctataacagccagcgtctggggcaggggcgtgaaaacgccaagacctttctgcgcgacaatccggatacggccaatgagatcgaactggcgttgcgccagaatgccggtctgattgccgaccgcttcctgcagaatggtggcccggacgccggtgaaggcgacgacggcagcgacgagggctga

SEQ ID NO: 100120 - protein, 416 aa, Agrobacterium tumefaciens str. C58
MGRARKNESRTNYLSLFVFNMLAQPCEMRTNRVHTVSILLRCLCGFNNLKVVRMAQNSLRLVEDKSVDKSKALEAALSQIERSFGKGSIMKLGSNENVVEVETVSTGSLSLDIALGIGGLPKGRIIEIYGPESSGKTTLALQTIAEAQKKGGICAFVDAEHALDPVYARKLGVDLQSLLISQPDTGEQALEITDTLVRSGAVDVLVIDSVAALTPRAEIEGEMGDSLPGLQARLMSQALRKLTASISKSKCMVIFINQIRMKIGVMFGSPETTTGGNALKFYASVRLDIRRIGAVKEREEVVGNQTRVKVVKNKMAPPFKQVEFDIMYGEGVSKTGELVDLGVKAGIVEKSGAWFSYNSQRLGQGRENAKTFLRDNPDTANEIELALRQNAGLIADRFLQNGGPDAGEGDDGSDEG

SEQ ID NO: 100121 - DNA, 1110 bp, Vibrio vulnificus YJ016
  CDS (1)..(1110): transl_table=11
ttgtcgaccctatttcgacataattacctatcacctgagagtgactatctggagagagtaatggacgagaacaaacagaaggcactggccgccgcactaggtcaaattgaaaagcagttcggtaaaggttcaatcatgcgcctaggtgacaaccgtgcgatggatgttgaaaccatctcgacaggttcactatctctggatattgcgctgggtgctggtggcttaccaatgggccgtatcgttgaaatttttggtccagaatcttcaggtaaaaccacgttgacccttgagctgatcgctgcggctcaacgtgaaggcaaaacttgtgcgtttatcgatgccgagcacgcgttggatcctgtgtatgcgaagaagcttggcgttaatatcgaccagttgttggtatctcagcctgacaccggtgaacaagcattggaaatctgtgatgctcttgctcgctcaggtgcggttgacgttattgttgtcgactctgttgcagcattgacgccaaaggcagaaatcgaaggtgagatgggcgactcgcacatgggtcttcaagctcgtatgctatctcaagcgatgcgtaagttaacgggtaacctaaagcagtctaactgtatgtgtatcttcatcaaccagatccgtatgaagatcggtgtgatgtttggtaacccagaaaccacaacgggtggtaatgctctgaaattctacgcttctgttcgtcttgatattcgccgtactggtgcgatcaaagaaggtgatgaggtcgtgggtaacgaaacgcgcatcaaagtggtgaagaataagatcgctgcgccgtttaaagaagccaacactcaaattatgtacggccaaggctttaaccgcgaaggtgaactgattgacctaggcgtgaaatgtaagctgattgaaaaatcaggcgcttggtacagctataacggcgacaaaattggccaaggtaaagcgaacgcttgtaaatacctgaaagaaaacgtagatgtcgcaaaagtactggatacgaaattgcgtgaaatgttgctttctccagcaaacatcaacgatgaatcggcagagttagtcgaagaaatgccagagcaagaagagttttaa

SEQ ID NO: 100122 - protein, 369 aa, Vibrio vulnificus YJ016
MSTLFRHNYLSPESDYLERVMDENKQKALAAALGQIEKQFGKGSIMRLGDNRAMDVETISTGSLSLDIALGAGGLPMGRIVEIFGPESSGKTTLTLELIAAAQREGKTCAFIDAEHALDPVYAKKLGVNIDQLLVSQPDTGEQALEICDALARSGAVDVIVVDSVAALTPKAEIEGEMGDSHMGLQARMLSQAMRKLTGNLKQSNCMCIFINQIRMKIGVMFGNPETTTGGNALKFYASVRLDIRRTGAIKEGDEVVGNETRIKVVKNKIAAPFKEANTQIMYGQGFNREGELIDLGVKCKLIEKSGAWYSYNGDKIGQGKANACKYLKENVDVAKVLDTKLREMLLSPANINDESAELVEEMPEQEEF

SEQ ID NO: 100123 - DNA, 1047 bp, Clostridium difficile 630
  CDS (1)..(1047): transl_table=11
atgagtgtagatcaagaaaaattaaaagcgttgaatgaagctttaggtaaaattgaaaaagattttggtaaaggttcagtaatgaaattgggagaagcaacatctatgtctatagatgttatatcaacaggagcgattggtttagacatagctattggtataggaggtctacctagagggagaatagttgaagtatatggtccagaatcttctggtaagactactgttgcgcttagttgtgtagcatcagctcaaaaagatggaggaatagctgcatttatagatgcagaacatgcacttgacccagtatatgcaaaagctttgggtgtggatgttgataacctaataatatctcaaccagatacaggtgaacaggctttagagatagcagaggcattgataagaagtggagcgatagatataatagtaatagactcagtagcagcattagttccaaaggctgaaatagatggagatatgggtgattctcatgtaggtttacaagctagacttatgtcacaagcacttagaaagttaactggttcaattaaaaaatcaaattgtgttgctatatttataaaccagttaagagagaaagtaggaataatgtttggaaacccagaaactactactggaggacgtgcactaaaattctattcatcagttagattggatgttagaaaaatagatacaataaaacaaggtgataaagttataggtagtagaactagagttaaagttgttaaaaacaaagtagcaccaccatttaagcaagctgaatttgatataatgtatggagaagggatttcaaaaattggagaccttttagatatagctgctgatgtagatatagttaaaaaatcaggttcatggtatagttacaatgatactaaacttggacaaggaagagaaaatgttaaaaaattcttggaagataatttagatttaactactgaaatagatgagaaagttagagcattttacaatttaaatgaagaacatgaagaatcaggtacttcagtatcaaaagaaattgtagaagaataa

SEQ ID NO: 100124 - protein, 348 aa, Clostridium difficile 630
MSVDQEKLKALNEALGKIEKDFGKGSVMKLGEATSMSIDVISTGAIGLDIAIGIGGLPRGRIVEVYGPESSGKTTVALSCVASAQKDGGIAAFIDAEHALDPVYAKALGVDVDNLIISQPDTGEQALEIAEALIRSGAIDIIVIDSVAALVPKAEIDGDMGDSHVGLQARLMSQALRKLTGSIKKSNCVAIFINQLREKVGIMFGNPETTTGGRALKFYSSVRLDVRKIDTIKQGDKVIGSRTRVKVVKNKVAPPFKQAEFDIMYGEGISKIGDLLDIAADVDIVKKSGSWYSYNDTKLGQGRENVKKFLEDNLDLTTEIDEKVRAFYNLNEEHEESGTSVSKEIVEE

SEQ ID NO: 100125 - DNA, 1104 bp, Herminiimonas arsenicoxydans
  CDS (1)..(1104): transl_table=11
atggacgataaaaaaaacgcaccaagctcggataagagtaaggcactcgctgccgcactggcacaaatcgagaagcaattcggtaaaggctcggtgatgcgcatggaggacggtgccgtcgtcgaagaggtgcaagtcgtgtccactggttcattgggcctggatctcgcgcttggcgtcggcggtttgccgcgcggccgcgtagtggaaatttacggtccggaatcgtcgggtaaaaccacgctgacgctgcaaaccatcgcagaaatgcagaaactgggcggcacctgcgcgtttatcgatgcggagcatgcgctggatgtgacgtatgcgcaaaaactgggtatcaacctgtcggaattgttgatttcgcagccggataccggcgaacaggctttggaaatttgcgatgcgctggtgcgctccggcggcgttgatctgattgtcatcgactcggtcgccgccttgacgccgcgtgccgagatcgaaggcgatatgggcgattccctgcctggtctgcaggcgcgcctgatgtcgcaggccttgcgcaaactgaccggcagcatcaaccgcaccaatacgctggtgatttttatcaaccagattcgcatgaaaatcggcgtcatgttcggcaatccggaaaccacgaccggtggtaatgcattgaaattttatgcttcggtacgcctggatattcgtcgtaccggctcgatcaaatcgggcgatgaagtcatcggcaatgaaaccaaggtcaaggtcgtcaagaacaagatcgcgccgccattcaaggaagcgcatttcgaaattctgtatggcgaaggcacatcgcgcgaaggcgagattctggatctgggttcggatgcaaaaatcgtcgaaaaatccggtgcctggtatagctataacggcgaacgtattggccagggcaaggacaatgcacgcaattatttgaaagagcgtccggaactcgcgcgtgaaatcgaaaacaaggtgcgcgcctccttgggcgtgcctgaactcggcgcgatcaagtcggatgaacctgttgcgaagaaggcttccgccaaggaaagcaaggaagccaaagagctgaaagaagtcgagtaa

SEQ ID NO: 100126 - protein, 367 aa, Herminiimonas arsenicoxydans
MDDKKNAPSSDKSKALAAALAQIEKQFGKGSVMRMEDGAVVEEVQVVSTGSLGLDLALGVGGLPRGRVVEIYGPESSGKTTLTLQTIAEMQKLGGTCAFIDAEHALDVTYAQKLGINLSELLISQPDTGEQALEICDALVRSGGVDLIVIDSVAALTPRAEIEGDMGDSLPGLQARLMSQALRKLTGSINRTNTLVIFINQIRMKIGVMFGNPETTTGGNALKFYASVRLDIRRTGSIKSGDEVIGNETKVKVVKNKIAPPFKEAHFEILYGEGTSREGEILDLGSDAKIVEKSGAWYSYNGERIGQGKDNARNYLKERPELAREIENKVRASLGVPELGAIKSDEPVAKKASAKESKEAKELKEVE

SEQ ID NO: 100127 - DNA, 1071 bp, Burkholderia vietnamiensis G4
  CDS (1)..(1071): transl_table=11
atggaagatagcaagaagggctccgggatgaccgccgagaagagcaaggcgctggcggccgcactcgcgcagatcgagaagcagttcggcaaagggtcgatcatgcggatgggcgacggcgacgtgaaggaagacatccaggtcgtctccacgggctcgctgggcctcgatatcgcgctcggcgtcggcggcctgccgcgcggccgggtggtcgaaatctacggtccggaatcgtccggcaagaccacgctcacgctgcaggtgatcgccgagctgcagaagctgggcggcaccgcagccttcatcgacgccgagcacgcgctcgacgtccagtacgcggcgaagctcggcgtgaacgtgccggagctgctgatctcgcagccggacaccggcgaacaggcgctcgaaatcaccgacgcgctcgtgcgctcgggctcgatcgacatgatcgtcatcgactcggtcgcggcactggtgccgaaggccgaaatcgaaggcgagatgggcgattcgctgccgggtctgcaggcgcgtctgatgtcgcaggcgctgcgcaagctgacgggtacgatcaagcgcacgaactgcctcgtgatcttcatcaaccagatccggatgaagatcggcgtgatgttcggcaacccggaaaccacgacgggcggcaatgcactgaagttctattcgtcggtgcgtctggacatccgccggatcggctcgatcaagaagaacgacgaggtgatcggcaacgaaacccgcgtgaaggtcgtcaagaacaaggtatcgccgccgttccgcgaagcgatcttcgacatcctctacggcgaaggcatttcgcgtcagggcgagatcatcgatctcggcgtgcaggcgaaaatcgtcgacaaggccggcgcctggtacagctacaacggcgagaagatcggtcagggcaaggacaacgcgcgtgaattcctgcgcgagaatcccgaaatcgcacgcgagatcgagaaccgcattcgcgagtcgctcggtgtcgtcgcgatgcccgatggcgtggtcgacgaagccgaggcgatggacgaagaagagtga

SEQ ID NO: 100128 - protein, 356 aa, Burkholderia vietnamiensis G4
MEDSKKGSGMTAEKSKALAAALAQIEKQFGKGSIMRMGDGDVKEDIQVVSTGSLGLDIALGVGGLPRGRVVEIYGPESSGKTTLTLQVIAELQKLGGTAAFIDAEHALDVQYAAKLGVNVPELLISQPDTGEQALEITDALVRSGSIDMIVIDSVAALVPKAEIEGEMGDSLPGLQARLMSQALRKLTGTIKRTNCLVIFINQIRMKIGVMFGNPETTTGGNALKFYSSVRLDIRRIGSIKKNDEVIGNETRVKVVKNKVSPPFREAIFDILYGEGISRQGEIIDLGVQAKIVDKAGAWYSYNGEKIGQGKDNAREFLRENPEIAREIENRIRESLGVVAMPDGVVDEAEAMDEEE

SEQ ID NO: 100129 - DNA, 1089 bp, Bradyrhizobium sp. ORS278
  CDS (1)..(1089): transl_table=11
atgtccgccaccgccctgcgtatcgtcgaaggttcctccatggataagagtaaggcgctctcggcagcgctgtcccagatcgagcgtcagttcggcaagggctcggtgatgaagctcggcaagaacgaccgctcgatggacgtcgagacagtgtcgacgggctctctcgggctggacatcgcgctggggatcggcggcctgccgaaggggcgcatcgtcgagatctacgggcctgaatcgtcgggcaagacgacgctggcactgcatacagtggcggaggcgcagaagaagggcggcatctgcgcgttcatcgatgccgagcatgcgctcgatccggtctatgcgcgcaagctgggggtcaacatcgatgagctcctgatctcgcagccggacaccggcgagcaggcgctggagatctgcgacacgctggtccgctccggtgccgttgacgtgctggtcgtcgactcggtggcggcgctggtcccgaaggccgagctcgagggtgagatgggcgagtcgctgcccggcctgcaggcgcgattgatgagccaggcgctgcgcaagctgacggcctcgatcaacaagtccaacacgatggtcatcttcatcaaccagatccgcatgaagatcggcgtgatgtacggctcgcccgagaccaccacgggcggcaacgcgctgaagttctatgcttcggtgcgcctcgacatccgccgcatcggcgcgatcaaggagcgcgacgaggtgatcggcaacaccacccgcgtcaaggtcgtcaagaacaagctggcgccgccgttcaagcaggtcgagttcgacatcatgtatggcgagggcgtgtccaagatgggcgagatcctcgatctcggcgtcaaggccgggatcgtcgagaagtcgggtgcctggttctcttatgacagccagcggctcgggcaggggcgtgagaattcgaaatcgttcctgaaggcgaaccccgacatgaccgccaagatcgaggcggccattcgccagaattccggcctgatcgccgagcagatcctggccggcgccgccgagcgcgacgccgacggagaggagccggcggaggagtag

SEQ ID NO: 100130 - protein, 362 aa, Bradyrhizobium sp. ORS278
MSATALRIVEGSSMDKSKALSAALSQIERQFGKGSVMKLGKNDRSMDVETVSTGSLGLDIALGIGGLPKGRIVEIYGPESSGKTTLALHTVAEAQKKGGICAFIDAEHALDPVYARKLGVNIDELLISQPDTGEQALEICDTLVRSGAVDVLVVDSVAALVPKAELEGEMGESLPGLQARLMSQALRKLTASINKSNTMVIFINQIRMKIGVMYGSPETTTGGNALKFYASVRLDIRRIGAIKERDEVIGNTTRVKVVKNKLAPPFKQVEFDIMYGEGVSKMGEILDLGVKAGIVEKSGAWFSYDSQRLGQGRENSKSFLKANPDMTAKIEAAIRQNSGLIAEQILAGAAERDADGEEPAEE

SEQ ID NO: 100131 - DNA, 1053 bp, Dichelobacter nodosus VCS1703A
  CDS (1)..(1053): transl_table=11
atgaatgaagaacagaaaaaagcattaaccgccgttttaacgcaattagataaacaatttggcaaaggaaccgtgatgcgtttgggcgagcaagttgccgcgcacgatattcaagccatttctacgggttcattaacgctcgatattgcgcttggcatcggcggattgcctaaaggacgcatcgttgaaatctacgggcctgaatcttcgggaaaaactacgatgatgttacacgtcatcgctgaagcgcaaaaaaacggcggcacggcagcatttatcgatgccgaacacgcattagatccgatttatgcccgaaaattaggcgttaataccgatgatttatacgtcacacaacccgataccggcgaacaagcgttagaaatttgcgatgctttagtgcgcagcggcgcgtttgacgttatcgtggttgattccgttgccgcgttaacgccaaaagcagaaattgaaggcgaaatgggcgattctcacgttggtttacaagcgcgcttgatgagtcaagctttgcgcaaattaaccggaaatattaagcgcgccaatacgctcgttgtttttattaaccaaatccgcatgaaaattggcgttatgtttggttctccagaaacaaccaccggcggcaatgcgctgaaattttacgcttccgtacgtatggatatccgccgcatcggttcaattaaagaaggcgacgaagtcctcggtaatgaaacgcgcgtaaaagtcgtgaaaaacaaagtagcgccgccatttaagcaagcagaatttgatattttatacggtcaaggcgtttcacgcgaaggggaaattattcaacttgccgttaatgccgatatcatgcaaaaatccggcgcgtggtacagttaccgcgatgaaaaaatcggacaaggtaaagaaaaagtacggctttatttaaaagaacaccccgacgtcgcacaagaaattgaaacgaaaatccgcgaaaaatttatcggcggtgaattgcatttacctgatgccgccggcgatgaaatcgatacctcaatcaatgatgaagaatga

SEQ ID NO: 100132 - protein, 350 aa, Dichelobacter nodosus VCS1703A
MNEEQKKALTAVLTQLDKQFGKGTVMRLGEQVAAHDIQAISTGSLTLDIALGIGGLPKGRIVEIYGPESSGKTTMMLHVIAEAQKNGGTAAFIDAEHALDPIYARKLGVNTDDLYVTQPDTGEQALEICDALVRSGAFDVIVVDSVAALTPKAEIEGEMGDSHVGLQARLMSQALRKLTGNIKRANTLVVFINQIRMKIGVMFGSPETTTGGNALKFYASVRMDIRRIGSIKEGDEVLGNETRVKVVKNKVAPPFKQAEFDILYGQGVSREGEIIQLAVNADIMQKSGAWYSYRDEKIGQGKEKVRLYLKEHPDVAQEIETKIREKFIGGELHLPDAAGDEIDTSINDEE

SEQ ID NO: 100133 - DNA, 1125 bp, Leifsonia xyli subsp. xyli str. CTCB07
  CDS (1)..(1125): transl_table=11
atgtcccccgtaccgtcgaactcgtcagcgaagtccaaaggagaaccgcacatgccatcacccgcagaccgcgagaaggcgctcgtgaccgcgctcgcacagatcgaccgtcagttcggaaaaggctcggtcatgcgactgggcagcgacgagcgcgctcctgtcgaggtcgtcccgaccgggtcgatcgccctggatgtcgcgcttggcatcggcggtcttccgcgtggccgcatcgtcgagatctatggcccggaatcgtcgggtaagaccaccctgaccctgcacgcgatcgccaacgcgcagcgcgcgggcggcatcgctgccttcatcgacgcggagcacgcgctcgacccggactacgcccgcaagctcggcgtcgacatcgacgcactgctggtctcccagccagacaccggtgagcaggcgctggagatcgcggacatgctggtgcgttccggctcgatcgacttgatcgtcatcgactccgtcgccgcgctcgtcccccgtgccgagatcgagggcgagatgggcgacgcgcacgtcggtctgcaggcccgtctcatgtcgcaggcgctccgtaagctcaccggtgcgctcagccagacgaacaccacgatgatcttcatcaaccagctccgcgagaaagtgggagtgttcttcggcagcccggagaccacagccggtggaaaggcgctcaagttctacgcctcggtccgtctcgacatccgccgcatcgagacgctcaaagacggcaccgacgcggtcggaaaccgcacccgcgttaaggtcgtcaagaacaagatggcaccgcccttcaaacaggcggaattcgacatcctgtacggtgtcggcatctcccatgagggcagccttctcgatttcggtgtggagcacgcgctcgtcaagaagtccggtgcctggtacacttacgagggcgaccagctgggccagggcaaagagaactcgcgcaactttctcatcgccaacccggacatcgccgcggagatcgagaacaaaatcaagatcaagctcggcatcgtggccgatccgaacgccgacgccgaaccgaccgctgcggccggctctctggaggagaagctgccggcccgcaagggcgcctga

SEQ ID NO: 100134 - protein, 374 aa, Leifsonia xyli subsp. xyli str. CTCB07
MSPVPSNSSAKSKGEPHMPSPADREKALVTALAQIDRQFGKGSVMRLGSDERAPVEVVPTGSIALDVALGIGGLPRGRIVEIYGPESSGKTTLTLHAIANAQRAGGIAAFIDAEHALDPDYARKLGVDIDALLVSQPDTGEQALEIADMLVRSGSIDLIVIDSVAALVPRAEIEGEMGDAHVGLQARLMSQALRKLTGALSQTNTTMIFINQLREKVGVFFGSPETTAGGKALKFYASVRLDIRRIETLKDGTDAVGNRTRVKVVKNKMAPPFKQAEFDILYGVGISHEGSLLDFGVEHALVKKSGAWYTYEGDQLGQGKENSRNFLIANPDIAAEIENKIKIKLGIVADPNADAEPTAAAGSLEEKLPARKGA

SEQ ID NO: 100135 - DNA, 1059 bp, Psychrobacter arcticus 273-4
  CDS (1)..(1059): transl_table=11
atggacgacaataaagccaaagcccttaaagctgcgctcgctcaaatcgaaaagcaatttggtaaaaataccatcatgcatttgggtgatgactcagcagcacttgatgtcgatgtggtctctactggctcattaggtttagatattgctctagggattggtggtctgccaaaaggtcgtatcgttgaaatttacggccctgaaagctcaggtaaaacgacgatgaccttacaggcgattgcagagtgccaaaagcaaggcggtgtttgtgcctttatcgatgctgagcacgcactagatccagtatatgcacgcaagcttggcgtcaatacggatgatttactactctcacagcctgataatggagagcaagcgcttgaaattactgatatgttggtacgttcaggggcgatcgatatgatcgttattgactcggttgccgctttgacaccacgtgcagagattgaaggcgagatgggcgattcacatatgggtctgcaagcacgtctgatgagccaagccttacgtaaaattactggtaacgccaagcgctcaaactgtatggtgttatttattaaccaaattcgtatgaaaattggcgttatgtttggtagccctgagaccacaaccggtggtaatgcgcttaaattctatgcctctgtgcgtatggatattcgccgtattggtgcggtgaagaatggtgatgaaatcatcggtaaccaaactcgcgttaaagtcatcaaaaataaaatggcaccaccatttcgtcaagctgagtttgagattacttacggtgaaggtaccaatcacttagccgaagtgattgatttaggtgttgagattggtgcggttggtaaagcgggttcttggtacagctatggtgatgaaaaaatcggtcaaggcaaagccaattctgtactgttcttaaaagagaaccctgctattgctgaagagatagaagccaaaatccgtgctgaaaagcttggcgtaaaggatgatagcaaagcagcggtcgtggctgagactaatgaagaactagcctctgaacctgtacaataa

SEQ ID NO: 100136 - protein, 352 aa, Psychrobacter arcticus 273-4
MDDNKAKALKAALAQIEKQFGKNTIMHLGDDSAALDVDVVSTGSLGLDIALGIGGLPKGRIVEIYGPESSGKTTMTLQAIAECQKQGGVCAFIDAEHALDPVYARKLGVNTDDLLLSQPDNGEQALEITDMLVRSGAIDMIVIDSVAALTPRAEIEGEMGDSHMGLQARLMSQALRKITGNAKRSNCMVLFINQIRMKIGVMFGSPETTTGGNALKFYASVRMDIRRIGAVKNGDEIIGNQTRVKVIKNKMAPPFRQAEFEITYGEGTNHLAEVIDLGVEIGAVGKAGSWYSYGDEKIGQGKANSVLFLKENPAIAEEIEAKIRAEKLGVKDDSKAAVVAETNEELASEPVQ

SEQ ID NO: 100137 - DNA, 1038 bp, Colwellia psychrerythraea 34H
  CDS (1)..(1038): transl_table=11
atgaaagacgataaagaaaaagcactatcagcagccttagcccaaattgaacgtcaattcggtaaaggttcaataatgaagcttggtgataataccaccatggatgtagaaactatttctacgggttcattaggcttagatatcgccttaggtgctggcggcttaccaatgggtcgagttgttgaaatttatggtcctgaatcaagcggtaaaaccacgttaactttagaagttattgctgaagcacaacgcaatggtaaagtttgtgcttttatcgatgcagagcatgctcttgaccctgtttatgctgaaaaattaggtgttaacattgatgagttattaatttctcaacctgataccggcgaacaagctctagaaattgttgatatgttaacgcgctctggtgctatcgacgttattgtagttgactctgttgccgcgcttacacctaaagctgaaattgaaggcgatatgggtgattcacatatgggcttgcaagcacgtatgttgtcacaagcgatgcgtaaacttaccggtaatttgaaaaaatctaatactatgcttatcttcattaaccaaattcgtatgaaaattggtgttatgtttggtagcccagaaacgacgaccggtggtaatgcgttaaaattctacgcttctgtacgtttagatatccgtcgtattggcgcggttaaaaacggtgatgaaatcgttggtaatgaaacgcgtgtgaaagtcgttaaaaacaaaattgcgccaccgtttaaacaagctgaattccaaattttatacggtgaaggaattaacaacttaggtgagttaattgaattaggcgttaagcatgagtttgtagagaaagcaggtgcttggtatagctgtaatggtgaaagaattggtcaaggtaaagctaatgctgctaaatatttagatgaacatcctgaaatggctaaagatgttgatactaaattacgcgatatgtttttatcaaaaactgttgtggcagaagataaatcagaagtaaaagaaaaagaaaaagcataa

SEQ ID NO: 100138 - protein, 345 aa, Colwellia psychrerythraea 34H
MKDDKEKALSAALAQIERQFGKGSIMKLGDNTTMDVETISTGSLGLDIALGAGGLPMGRVVEIYGPESSGKTTLTLEVIAEAQRNGKVCAFIDAEHALDPVYAEKLGVNIDELLISQPDTGEQALEIVDMLTRSGAIDVIVVDSVAALTPKAEIEGDMGDSHMGLQARMLSQAMRKLTGNLKKSNTMLIFINQIRMKIGVMFGSPETTTGGNALKFYASVRLDIRRIGAVKNGDEIVGNETRVKVVKNKIAPPFKQAEFQILYGEGINNLGELIELGVKHEFVEKAGAWYSCNGERIGQGKANAAKYLDEHPEMAKDVDTKLRDMFLSKTVVAEDKSEVKEKEKA

SEQ ID NO: 100139 - DNA, 1032 bp, Dechloromonas aromatica RCB
  CDS (1)..(1032): transl_table=11
atggacgacaacaaggcaaaagcgctcgccgcagcactgcaacagatcgaaaagcaattcggcaaaggctccatcatgaagatgggcgatgccgaaatcgacgaaggcattcaggtcgtgtcgaccggttcgctcggtctggacattgcgctgggcgttggcggtctgccacgcggccgtgtcgttgaaatctatggtccggaatcctccggcaagaccacgctctgtctgcaggtcgtggccgaaatgcagaagctcggtggcgttgccgccttcatcgacgccgaacacgcgctcgatccgcaatatgcccagaagctcggcgtcaatgtcggcgacctgctgatctcgcagccggataccggcgaacaggccctcgaaattgctgacatgctggtccgctccggctcagtcgacatcatcgtcgtcgactcggtcgccgcccttaccccgcgcgccgaaatcgaaggcgaaatgggcgaccagatggtcggcctgcatgcccgcctgatgtcgcaggccctgcgcaagctgactgccaatatcaagaagaccaacacgctggtcatcttcatcaaccagatccggatgaagatcggcgtcatgttcggttcgccggaaaccaccactggtggcaatgcgctcaagttctacgcctccgtccgcctcgacatccgccgtatcggcgcgatcaagaagggtgacgaagtcatcggcagcgaaaccaaggtcaaggtcgtcaagaacaaggtcgccccacccttccgcgaagccattttcgacatcctctacggcgagggtatttcccgccagggcgaaatcgtcgaaatgggtgttgcccacaaactggtcgacaagtccggtgcctggtatgcctacaagggcgaaaagatcggccagggcaaggacaatgcccgtgaattcctgaaagccaatccggaaatcgcccaggaaatcgaagccggcattcgtgaggctgccagcaccaacgtgatcaagccggtcaaggcggccaaggcagcggatgcctga

SEQ ID NO: 100140 - protein, 343 aa, Dechloromonas aromatica RCB
MDDNKAKALAAALQQIEKQFGKGSIMKMGDAEIDEGIQVVSTGSLGLDIALGVGGLPRGRVVEIYGPESSGKTTLCLQVVAEMQKLGGVAAFIDAEHALDPQYAQKLGVNVGDLLISQPDTGEQALEIADMLVRSGSVDIIVVDSVAALTPRAEIEGEMGDQMVGLHARLMSQALRKLTANIKKTNTLVIFINQIRMKIGVMFGSPETTTGGNALKFYASVRLDIRRIGAIKKGDEVIGSETKVKVVKNKVAPPFREAIFDILYGEGISRQGEIVEMGVAHKLVDKSGAWYAYKGEKIGQGKDNAREFLKANPEIAQEIEAGIREAASTNVIKPVKAAKAADA

SEQ ID NO: 100141 - DNA, 1062 bp, Ralstonia eutropha JMP134
  CDS (1)..(1062): transl_table=11
atggatgacaagaaggcaggtgccggcctgagcgccgagaagcagaaggcgcttgccgccgcgctctcgcagatcgagaagcagtttggcaagggctcgatcatgcgcatgggcgacggcgaggtcgagaaggacatccaggtggtctccaccggctccctcggccttgacatcgcgctgggcgtcggcggcctgccgcgcggccgcgtggtcgagatctacggcccggaatcgtcgggcaagaccacgctgacgctgcaggtcgttgccgaaatgcagaagcttggcggcacctgcgcctttatcgatgccgagcacgcgctcgacgtcaactacgcctccaagcttggcgtggacgtgggcgagctgctgatctcccagccggacactggcgaacaagcgctcgaaatcaccgatgcgctggtgcgctcgggctcgatcgacctgatcgtgatcgactcggtggccgcgctggtgccgaaggctgaaatcgaaggcgaaatgggtgattcgctgcccggcctgcaggcccgcctgatgagccaggcgctgcgcaagctgaccggcaccatcaagcgcaccaactgcctggtgatcttcatcaaccagatccgtatgaagatcggtgtgatgttcggttcgcctgaaacgaccacgggcggcaatgcgctgaagttctacgcttccgtgcgcctggacatccgccgcatcggctcgatcaagaagggcgacgacgtgatcggcaacgagaccaaggtcaaggtggtcaagaacaaggtatcgccgccgttccgcgaggccttcttcgacatcctctatggccagggcatctcgcgccagggcgagatcatcgacctcggcgtggacgccaagatcgtcgagaagtcgggcgcctggtacagctacaacggcgacaagatcgggcagggcaaggacaatgcgcgcgagtacctgcgcgaaaatcccgacatcgctcaggaaatcgagaacaaggtccgcgccgcgctgggcgttgcgccgatgaacagtgttccggcggccgaggtcgtgacggaagactga

SEQ ID NO: 100142 - protein, 353 aa, Ralstonia eutropha JMP134
MDDKKAGAGLSAEKQKALAAALSQIEKQFGKGSIMRMGDGEVEKDIQVVSTGSLGLDIALGVGGLPRGRVVEIYGPESSGKTTLTLQVVAEMQKLGGTCAFIDAEHALDVNYASKLGVDVGELLISQPDTGEQALEITDALVRSGSIDLIVIDSVAALVPKAEIEGEMGDSLPGLQARLMSQALRKLTGTIKRTNCLVIFINQIRMKIGVMFGSPETTTGGNALKFYASVRLDIRRIGSIKKGDDVIGNETKVKVVKNKVSPPFREAFFDILYGQGISRQGEIIDLGVDAKIVEKSGAWYSYNGDKIGQGKDNAREYLRENPDIAQEIENKVRAALGVAPMNSVPAAEVVTED

SEQ ID NO: 100143 - DNA, 1074 bp, Ehrlichia canis str. Jake
  CDS (1)..(1074): transl_table=11
atgtctgatagtaaaaatttgaaccaagaaagacagaaagcattggataatgcaattagtcaaattgaaaaagcttttggtcgtggtgcaataatgaagttaaagcagggtgctattgaaaaaatagatagtatttctacaggttcaattgcacttgatacggctttaggtattggtggatttcctaaaggcagaattgttgagatttttggacctgaaagctctggtaaaacaactcttgctttacatgtaattgctgaatcacaaaaaaaaggcggaaattgtgcatttattgatgctgaacatgctttggacataatgtatgcacgtaaattaggtgtaaatactggtgatttgattgtttctcaacctgatactggtgaacaagcactccatatagttgaatatttagtgtgttcaggtgctattgatgtgatagtagtagattctgttgctgcattaacccctagggcagaaatagaaggtgatatgggtgatcagcatatgggcttacaagcgagattgttaagtcatgctttaaggaaattaacttctattgtatcaaaagcaaattgtgtgcttatttttattaatcagatacgtatgaaaataggtgtagtttatggaaatcctgaaactactactggtggaaatgcgttgaaattttatagttctgtaagattggatatacgcaaagtaagtgcaattaaagataaagacttaattattggcaatcaaactaaggtaaaggttgttaaaaataaggtagctcctccttttaagcaggtggactttgatataatgtataatgaaggcatctcaaaagttggtgaaattatagatatgggtgtaaagcttaatattattgagaaagctggtgcatattactcatataatggcatacgtctaggtcagggtaaagaaaatgcaaaatcttatcttaagacaaattatactactgcagatgaaatagaacaaaaaataagaaatatgttagcaagtgatagtgatgtgacttgttttaatacagaaggtagtgataatcttcatgaggtagaagaagcaattttttaa

SEQ ID NO: 100144 - protein, 357 aa, Ehrlichia canis str. Jake
MSDSKNLNQERQKALDNAISQIEKAFGRGAIMKLKQGAIEKIDSISTGSIALDTALGIGGFPKGRIVEIFGPESSGKTTLALHVIAESQKKGGNCAFIDAEHALDIMYARKLGVNTGDLIVSQPDTGEQALHIVEYLVCSGAIDVIVVDSVAALTPRAEIEGDMGDQHMGLQARLLSHALRKLTSIVSKANCVLIFINQIRMKIGVVYGNPETTTGGNALKFYSSVRLDIRKVSAIKDKDLIIGNQTKVKVVKNKVAPPFKQVDFDIMYNEGISKVGEIIDMGVKLNIIEKAGAYYSYNGIRLGQGKENAKSYLKTNYTTADEIEQKIRNMLASDSDVTCFNTEGSDNLHEVEEAIF

SEQ ID NO: 100145 - DNA, 1095 bp, Thiobacillus denitrificans ATCC 25259
  CDS (1)..(1095): transl_table=11
atgcggacgctgctccgcttccatttaaacccaggagagagaaccatggcatcccccgcattgacagacgacaaatcgaaggcactcgccgccgcgctcggacagatcgaaaagcagttcggcaagggctcggtcatgcgcttgggcgaccatgacgtttcgcgcgacatccaggccgtctccaccggctcgctcggactcgacatcgcgctcggcgtcggcggcctgccgcgcggccgcgtgatcgagatctacggcccggagtcgtccggcaagaccacgctcacgctgcaggtcatcgccgaaatgcaaaaaatgggcggcactgccgcgttcatcgacgccgaacacgcgctcgatccgagctacgcgcacaagctcggcgtcgacgtcgacaacctgctggtctcgcaacccgacaccggcgaacaggcgctcgaaatcgccgacatgctggtgcgctcgggcagcgtcgacgtcgtcgtcgtcgactcggtcgccgccttgacgccgaaggccgaaatcgaaggcgagatgggcgactcacacatggggctccaggcgcggctgatgagccaggccctgcgcaagctcaccgccaacatcaagcggacgaatacgctggtcatctttattaatcaaattcgcatgaagatcggcgtcatgttcggcaaccccgagacgactaccggcggcaatgcactcaagttctacgccagcgtgcgcctcgacatccgccgcaccggcgcgatcaagaagggcgacgagatcatcggcaacgaaaccaaggtcaaggtcgtcaagaacaaggtctcgccgccgttcaaggaagcctacttcgacatcctctacggccagggcatctcgcgcgaaggcgagatcatcgaactcggcgtcgcccacaaactcgtcgacaagtccggcgcctggtacgcctacaacggcgaaaagatcggccagggcaaggacaacgcgcgcgaattcctaaaagaacacccggaaatcgcgcacgagatcgaggccaaggttcgcgctgccgtcggcgtcaacaaccccacgatcgcggtcgaggatgaagacgaagtcgaggcctga

SEQ ID NO: 100146 - protein, 364 aa, Thiobacillus denitrificans ATCC 25259
MRTLLRFHLNPGERTMASPALTDDKSKALAAALGQIEKQFGKGSVMRLGDHDVSRDIQAVSTGSLGLDIALGVGGLPRGRVIEIYGPESSGKTTLTLQVIAEMQKMGGTAAFIDAEHALDPSYAHKLGVDVDNLLVSQPDTGEQALEIADMLVRSGSVDVVVVDSVAALTPKAEIEGEMGDSHMGLQARLMSQALRKLTANIKRTNTLVIFINQIRMKIGVMFGNPETTTGGNALKFYASVRLDIRRTGAIKKGDEIIGNETKVKVVKNKVSPPFKEAYFDILYGQGISREGEIIELGVAHKLVDKSGAWYAYNGEKIGQGKDNAREFLKEHPEIAHEIEAKVRAAVGVNNPTIAVEDEDEVEA

SEQ ID NO: 100147 - DNA, 1074 bp, Rhodobacter sphaeroides 2.4.1
  CDS (1)..(1074): transl_table=11
atggcgacggcgaacctgctcgacttgaacggaaggcgcgagatggacaaggcgaaggcgctcgaaagcgcgctggcacagatcgaacggcagttcggcaagggctcgatcatgaaactgggggccaacagcccggtcatggagatcgaggcgacttcgacgggctcgctgggtctcgatatcgcgctcggcatcggcggtctgcccaaggggcgaatcatcgagatctacggccccgaaagctcgggcaagaccacgctgaccctgcatgtggtggcggaagagcagaagaagggtggcgtctgcgccttcgtggacgccgaacatgctctcgacccgcaatatgccaagaagctcggcgtcaacctggacgaactcctcatcagccagcccgacacgggcgagcaggcgctcgagatcgtcgacacgctggtccggtccggcgcggtgaacctgatcgtggtcgactcggtggcggcgctgacgcccaagtccgagatcgagggcgacatgggcgacatgcagatgggctcgcaggcccgcctgatgagccaggccatgcggaagctgaccgcatccatcggccggtcgaactgcatggtgatcttcatcaaccagatccgcatgaagatcggcgtgatgttcggcaaccccgagacgacgacgggcggcaacgcgctgaagttttacgcctccgtgcgcctcgacattcgccggaccggtgccatcaaggaccgcgacaatgtcatcggcaacacgacgaaggtgaaggtggtcaagaacaaggtggccccgcccttccgcgaggtcgagttcgacatcatgtatggcgagggcatttcgaagacgggcgagctcgtcgatctcggcgtcaaggccggcgtggtcgagaagtcgggctcctggtattcctacggcgacgagcggatcgggcaggggcgcgagaatgccaaggccttcctgcgcgcgaaccccacggttgccggcgatatcgaagatcggattcgcgcctcgcatgggctggacttctcgaccggggaagacggcaagggcgacgatctggtggacatgtga

SEQ ID NO: 100148 - protein, 357 aa, Rhodobacter sphaeroides 2.4.1
MATANLLDLNGRREMDKAKALESALAQIERQFGKGSIMKLGANSPVMEIEATSTGSLGLDIALGIGGLPKGRIIEIYGPESSGKTTLTLHVVAEEQKKGGVCAFVDAEHALDPQYAKKLGVNLDELLISQPDTGEQALEIVDTLVRSGAVNLIVVDSVAALTPKSEIEGDMGDMQMGSQARLMSQAMRKLTASIGRSNCMVIFINQIRMKIGVMFGNPETTTGGNALKFYASVRLDIRRTGAIKDRDNVIGNTTKVKVVKNKVAPPFREVEFDIMYGEGISKTGELVDLGVKAGVVEKSGSWYSYGDERIGQGRENAKAFLRANPTVAGDIEDRIRASHGLDFSTGEDGKGDDLVDM

SEQ ID NO: 100149 - DNA, 1032 bp, Carboxydothermus hydrogenoformans Z-2901
  CDS (1)..(1032): transl_table=11
atgaatgataaactaaaagccttagagcttaccatttcccaaattgaaaagcagtttgggaaaggctcaattatgcgcctgggtgaaaacaccggaaaatttcaggtggaagtaattcctactggttctctggctctggatttagccttaggggtaggtggagttcccagaggccgggtggttgaaatttttggccccgaatcttccggaaaaactaccgtggctttgcatattatagcggaagcgcaaaaaatgggtggtatcgcagcatttattgatgccgaacatgcgttagatccggtttatgcccaaaaattaggagttgatattgaaaatctcttagtttcccagcccgataccggcgaacaggctttagagatagccgaaagcttggtgagaagcggtgcgattgacgtgattgtgattgattcggtggctgctttagttccgcgggcggagattgaaggagaaatgggtgatgctcatgtcggtttacaggcccgccttatgtctcaggctttaagaaagctcaccggggccataagtaaatcaaaaactgtggcgatctttatcaaccaaatgcgggaaaaagtaggggttatgtttggaaacccggaaactactcccggaggacgggccctgaaattttatgcgtcaattcgcatggatgttcggaagatagatgtcataaaacaaggaaatgatattattggcagccgcacgcgggtaaaaatcgttaaaaacaaagttgcccctccttttaaacaggcggattttgatattatgtacggggaagggatttccaaggaaggaagtttgttggatgttgctgttgagttaaaaattgttcaaaaggtcgggtcttggtattcttacaatgatgagcgattgggtcagggccgggaaaatgccaaagagtttttacggcagaacccggaaatttacagagaaattgagcaaaagatccgggagcaagtattgaactctccagaatcgtcgagttttaaaaattccgaggagtttgaggaataa

SEQ ID NO: 100150 - protein, 343 aa, Carboxydothermus hydrogenoformans Z-2901
MNDKLKALELTISQIEKQFGKGSIMRLGENTGKFQVEVIPTGSLALDLALGVGGVPRGRVVEIFGPESSGKTTVALHIIAEAQKMGGIAAFIDAEHALDPVYAQKLGVDIENLLVSQPDTGEQALEIAESLVRSGAIDVIVIDSVAALVPRAEIEGEMGDAHVGLQARLMSQALRKLTGAISKSKTVAIFINQMREKVGVMFGNPETTPGGRALKFYASIRMDVRKIDVIKQGNDIIGSRTRVKIVKNKVAPPFKQADFDIMYGEGISKEGSLLDVAVELKIVQKVGSWYSYNDERLGQGRENAKEFLRQNPEIYREIEQKIREQVLNSPESSSFKNSEEFEE

SEQ ID NO: 100151 - DNA, 1047 bp, Burkholderia sp. 383
  CDS (1)..(1047): transl_table=11
atgaccgccgagaagagcaaggcgctggccgccgcgcttgcccagatcgaaaagcagttcggcaagggctcgatcatgcgcatgggcgacggcgaggcgaccgagaacatccaggtcgtgtccacgggctcgctcggtctcgatatcgcgctcggcgtcggcggcctgccgcgcggccgggtggtcgaaatctacggtccggaatcgtccggtaaaaccacgctcacgctgcaggtcattgccgaactgcagaagatcggcggcaccgcagcgttcatcgacgccgagcacgcgctcgacgttcaatatgcagcgaagctcggcgtgaacgtgccggagctgctgatctcgcagccggacaccggcgagcaggcgcttgaaatcaccgacgcgctggtgcgctcgggctcgatcgacatgatcgtcatcgactcggtcgcggcgctcgtgccgaaggccgaaatcgaaggcgagatgggcgattcgttgccgggcctgcaggcccgcctgatgtcgcaggcgctgcgcaagctgaccggcacgatcaagcgcacgaactgcctggtgatcttcatcaaccagatccggatgaagatcggcgtgatgttcggcaacccggaaaccacgacgggcggtaacgcgctgaagttctactcgtcggtgcgtctcgacattcgccggatcggctcgatcaagaagaacgacgaggtgatcggcaacgaaacccgcgtgaaggtcgtcaagaacaaggtgtcgccgccgttccgcgaagcgatcttcgacatcctgtatggcgaaggcatttcgcgtcagggcgagatcatcgatctcggcgtgcaggcgaagatcgtcgacaaggcgggcgcttggtacagctacaacggcgagaagatcggccagggcaaggacaacgcgcgtgaattcttgcgcgagaatccggaaatcgcacgcgagatcgagaaccgcattcgcgaatcgcttggcgtggtcgccatgcctgatggtgcaggccaggacgaagccgaggcgatggacgaagaagagtga

SEQ ID NO: 100152 - protein, 348 aa, Burkholderia sp. 383
MTAEKSKALAAALAQIEKQFGKGSIMRMGDGEATENIQVVSTGSLGLDIALGVGGLPRGRVVEIYGPESSGKTTLTLQVIAELQKIGGTAAFIDAEHALDVQYAAKLGVNVPELLISQPDTGEQALEITDALVRSGSIDMIVIDSVAALVPKAEIEGEMGDSLPGLQARLMSQALRKLTGTIKRTNCLVIFINQIRMKIGVMFGNPETTTGGNALKFYSSVRLDIRRIGSIKKNDEVIGNETRVKVVKNKVSPPFREAIFDILYGEGISRQGEIIDLGVQAKIVDKAGAWYSYNGEKIGQGKDNAREFLRENPEIAREIENRIRESLGVVAMPDGAGQDEAEAMDEEE

SEQ ID NO: 100153 - DNA, 1020 bp, Geobacter metallireducens GS-15
  CDS (1)..(1020): transl_table=11
gtgacccaggaacgcgagaaggcgattgagctggcactgagccagatagagaagcagttcggcaagggcgccatcatgcggctgggtgctgacgaggccctgccggacatcgacgccatccccaccggcgccctctccctggatatcgccctgggggtgggcggggttccccggggacgggtcatcgagatctacggccccgagtcgtcgggcaagacgaccctcgccctccacatcgccgccgaggcccagaagctgggcggcatcgcggccttcgtggatgccgagcacgccctggacatcggctatgcccgcaagctgggtgttcggaccgacgacctcctggtctcccagcccgacacgggggagcaggcccttgagatcgccgagatgctcgtgcggagcggcgccgtggacgtcctcgtcatcgactcggtggcggccctcgttcccaaggccgagatcgagggggagatgggggactcccacgtggggctccaggcccgcctcatgtcccaggccctgcgcaagctcaccggcatcatctccaagtccaactgctgcgtcatcttcatcaaccagatccggatgaagatcggcgtcatgttcggcagccccgagaccaccaccggcggcaacgccctcaagttctacgcttcggtccgcctcgacatccgcaagatcgccaccctcaagcagggggatgcggtgatcggctcccgcaccaaggtgaaggtggtgaagaacaaggtggctccccccttcagggaggtggagttcgacatctactacggcgaggggatatcccgcctgggggacctcctggacctggccgttgaccgcaagatcatcgacaagagcggtgcctggttttcctacggctccgaccggatcggccagggacgcgagaactcccggaatttcctcaaggagcatccggagatggtggccgaaatcgaggacaagatttacgaaacggccggcattccccgcaaaggggggaaggaagaggcggcgtag

SEQ ID NO: 100154 - protein, 339 aa, Geobacter metallireducens GS-15
MTQEREKAIELALSQIEKQFGKGAIMRLGADEALPDIDAIPTGALSLDIALGVGGVPRGRVIEIYGPESSGKTTLALHIAAEAQKLGGIAAFVDAEHALDIGYARKLGVRTDDLLVSQPDTGEQALEIAEMLVRSGAVDVLVIDSVAALVPKAEIEGEMGDSHVGLQARLMSQALRKLTGIISKSNCCVIFINQIRMKIGVMFGSPETTTGGNALKFYASVRLDIRKIATLKQGDAVIGSRTKVKVVKNKVAPPFREVEFDIYYGEGISRLGDLLDLAVDRKIIDKSGAWFSYGSDRIGQGRENSRNFLKEHPEMVAEIEDKIYETAGIPRKGGKEEAA

SEQ ID NO: 100155 - DNA, 1101 bp, Rhodospirillum rubrum ATCC 11170
  CDS (1)..(1101): transl_table=11
atgtcgcagagcgtcttgcgtctggtggataaggatacgatggacaagcaaaaggctttggaagcggctgtgggccagatcgagcgcgcctttggcaagggctcgatcatgaaactcggccagcgcggcagtgtcgtcgacatcgagtcgatcagcaccggatccctgggcctggatatcgccctgggcatcggcggtctgccgcgcgggcgcatcgtcgagatctacgggcccgaaagctcgggcaagaccacgctcgccctgcatgtggtggccgaggcgcagaagaagggcggtcaatgcgccttcgtcgacgccgagcacgccttcgatccgctctatgcccgcaagcttggcgtcagccttgatgacctgctggtgtcccagcccgacaccggcgaacaggccctggaaatcgccgataccctggtgcggtcgggcgccatcgatgtgctggtgattgactcggtggcggcgctggtgcccaaggccgaactggaaggcgatatgggcgattcccatgtcggcctgcaggcgcggttgatgagccaagccctgcgcaagctgaccggcacggtctcgcgctccaacaccttgattatcttcatcaaccagatccgcatgaagatcggcgtgatgttcggcaaccccgaaaccaccaccggcggcaatgcgctgaagttctacgcctcggtccgtctcgacatccgccgcatcggcgcggtgaaggacaaggaggaggtcgtcggcaaccagacgcgggtcaaggtggtcaagaacaaggtcgccccgccgttcaaggtggtcgaattcgacatcatgtatggcgagggcatctccaagctaggcgagatgctcgacctgggggtgaaggccaatatcatcgagaagtcgggggcgtggttctcgtataattccacccgcatcggccagggccgcgagaacgccaagcagttcctgcgcgacaatccggcgatggccgaggaaatcgaaaacgccgtgcgcgccaatgccgggctgatcgccgaggagatgatcggcggtccgggcggcgaggatgacgacgccggtggcgccgccggagtcggcgacgaagcctga

SEQ ID NO: 100156 - protein, 366 aa, Rhodospirillum rubrum ATCC 11170
MSQSVLRLVDKDTMDKQKALEAAVGQIERAFGKGSIMKLGQRGSVVDIESISTGSLGLDIALGIGGLPRGRIVEIYGPESSGKTTLALHVVAEAQKKGGQCAFVDAEHAFDPLYARKLGVSLDDLLVSQPDTGEQALEIADTLVRSGAIDVLVIDSVAALVPKAELEGDMGDSHVGLQARLMSQALRKLTGTVSRSNTLIIFINQIRMKIGVMFGNPETTTGGNALKFYASVRLDIRRIGAVKDKEEVVGNQTRVKVVKNKVAPPFKVVEFDIMYGEGISKLGEMLDLGVKANIIEKSGAWFSYNSTRIGQGRENAKQFLRDNPAMAEEIENAVRANAGLIAEEMIGGPGGEDDDAGGAAGVGDEA

SEQ ID NO: 100157 - DNA, 1032 bp, Syntrophus aciditrophicus SB
  CDS (1)..(1032): transl_table=11
atgggaacagatggagacagggcaaaggcggtggatctggcaataagtcagatcgaaaggcagttcggaaaggggtctatcatgcgcctgggggcgaaagagcggatcgaggacattgcggtcattccgaccggagcactcagtctggatatcgcgctgggcatcggcggcgtcccccggggacgcatcatcgaaattttcggtcctgaatccgggggaaagacgaccctggccctgcatattattgcggaagcacagaagcggaacggactggcggccttcatcgatgccgaacacgccctggatgtttcctacgcccgaaaaatcggcgtcaacaccgacgatctgctgatttcccagccggataccggggagcaggccctggagatcgcggaaaccctggttcgcagcggagccctggatatcctcgttgtggattccgtggccgccctggtccccaaggcggaaatcgaaggggaaatgggcgatgcccagatggggctgcaggccagactgatgtcccaggccctgcggaaactcaccggcagcatcagcaaatccaacacgacggttatcttcatcaaccagctgcgaatgaagatcggcgtattcttcggcaacccggaaacgacgaccggcggcaacgccctgaaattctacgcttccatgcgcctcgacatccgcaagtccggttccatcaaatcggggcaggatgtcatcggcatgcggaccaaggtgaaggtcgtgaaaaacaaggtcgcgccgcccttccgggagacggaattcgacatcctcttcggcgaggggatttccaaggccggggatattctcgatctggccgcggaaagcgggatcgtggaaaagagcggcgcctggtactcctacgggggagagcggatcggccagggccgggacaacaccaggaactttttaaaggagcatcccgatattctggtccggatcgaggaacaggtgcgaagcgaacacggtctgaagccccggttgcaggaacaggaagaacctgctaaatga

SEQ ID NO: 100158 - protein, 343 aa, Syntrophus aciditrophicus SB
MGTDGDRAKAVDLAISQIERQFGKGSIMRLGAKERIEDIAVIPTGALSLDIALGIGGVPRGRIIEIFGPESGGKTTLALHIIAEAQKRNGLAAFIDAEHALDVSYARKIGVNTDDLLISQPDTGEQALEIAETLVRSGALDILVVDSVAALVPKAEIEGEMGDAQMGLQARLMSQALRKLTGSISKSNTTVIFINQLRMKIGVFFGNPETTTGGNALKFYASMRLDIRKSGSIKSGQDVIGMRTKVKVVKNKVAPPFRETEFDILFGEGISKAGDILDLAAESGIVEKSGAWYSYGGERIGQGRDNTRNFLKEHPDILVRIEEQVRSEHGLKPRLQEQEEPAK

SEQ ID NO: 100159 - DNA, 1038 bp, Frankia sp. CcI3
  CDS (1)..(1038): transl_table=11
atggcaggactcgaccgtgagaaggcgttggataacgccttggcgcagatcgacaagcagttcggcaagggatcggtcatgcggttgggggacgacaccaggccgccggtccaggccatccccaccggttcgattgctctggatgtcgcgctcggcatcggcgggctgccgcgggggcgcatcattgagatctacggcccggagtcgtccgggaagacgaccgtcgccctgcacgcggtggcgaacgcgcaggcggctggtggtatcgcggcgttcatcgacgccgagcacgcgctcgaccccgagtacgcgggaaagctcggcgtcgacaccgacggtctgctggtctcccagcctgataccggcgagcaggcgttggagatcgcggacatgctcgtccggtctggcgcgctggacatcatcgtcatcgactcggtggccgcgctggtcccgagggccgagatcgagggcgagatgggggacagtcacgtcggcctccaggcccgcctgatgtcccaggccctgcgcaagatgaccgcggcgctggcgaactccggtacgaccgcgatcttcatcaaccagttgcgcgagaagatcggggtgatgttcggctccccggagaccacgaccggtggtaaggcactgaagttctatgcgtcggtgcgcctcgatgtccgtcgtatcgaaactctcaaggacggcacggaggccgtgggtaaccggacccgcgtcaaggtggtgaagaacaaggtggcgccgccgtttcggaccgccgaattcgacatcgtctacggaggcggtatcagtcgggagggttccctgatcgacatgggtgtcgagcacggcattattcgtaagtccggtgcctggtacacctacgacggcgatcagctcggccagggcaaggagaacgcccggtcttttctgcgggacaaccccgatctggccaacgagatcgaaaagaagatcaaggagaagctcggcatcctgcccagtctcgaatccgatgccgtggcgcccgttccggtcgatctgtag

SEQ ID NO: 100160 - protein, 345 aa, Frankia sp. CcI3
MAGLDREKALDNALAQIDKQFGKGSVMRLGDDTRPPVQAIPTGSIALDVALGIGGLPRGRIIEIYGPESSGKTTVALHAVANAQAAGGIAAFIDAEHALDPEYAGKLGVDTDGLLVSQPDTGEQALEIADMLVRSGALDIIVIDSVAALVPRAEIEGEMGDSHVGLQARLMSQALRKMTAALANSGTTAIFINQLREKIGVMFGSPETTTGGKALKFYASVRLDVRRIETLKDGTEAVGNRTRVKVVKNKVAPPFRTAEFDIVYGGGISREGSLIDMGVEHGIIRKSGAWYTYDGDQLGQGKENARSFLRDNPDLANEIEKKIKEKLGILPSLESDAVAPVPVDL

SEQ ID NO: 100161 - DNA, 1071 bp, Novosphingobium aromaticivorans DSM 12444
  CDS (1)..(1071): transl_table=11
atggcggctcagctcaagctcatcgaggaaggtaagaccaaggacatggatcgtcagaaggcgctcgacgcggcccttgcgcagattgaccgcgcgttcggcaagggatcggccatgcggctcggttcgaaggaagcgatgcaggtggaagccgtttctaccggatcgctggggctggacatcgcgctcggcatcggcggcctgccgcgcggccgcatcatcgagatctacgggccggaaagctcgggcaagaccacgctggcgctccacgccatcgcggaagcgcagaagggcggcggcaccgcagccttcatcgacgcagaacacgcgctggacccggtctatgcccgcaagctcggcgtcgacatcgacaatctgatcgtctcgcagcccgacacgggcgagcaggcacttgaaatcaccgacacgctggtgcgttcgaacgcgatcgacgtgctggtggtggactcggtcgccgcgctcgttccccgcgccgaaatcgagggtgagatgggcgatagccacgtcggcctccaggcccgcctgatgagccaggccctgcgcaagctgaccggttcgatcagccgttcgcgctgcatggtgatcttcatcaaccaggtgcgcatgaagatcggtgtgatgtacggcaacccggaaacgacgacgggcggcaacgcgctcaagttctatgcttcggtccgcctcgacatccgccgcaccgggcagatcaaggatcgcgacgagatcgtaggcaacgccacgcgcgtgaaggtcgtcaagaacaaggtcgcgccgccgttcaagcaggtcgaattcgacatcatgtatggcgaaggcatctcgaagatcggcgaaattctcgatctcggcgtgaaggccgggctggtcgagaagtcgggcgcctggttcagctatgattccattcgcatcgggcaggggcgtgagaacgccaagaacttcctgcgcgaaaatcccgaagtttgcagccgtctggaagccgcgatccgcggccgcaccgatcaggttgccgaaggactgatggcgggcccggacgcggacgacgacatctga

SEQ ID NO: 100162 - protein, 356 aa, Novosphingobium aromaticivorans DSM 12444
MAAQLKLIEEGKTKDMDRQKALDAALAQIDRAFGKGSAMRLGSKEAMQVEAVSTGSLGLDIALGIGGLPRGRIIEIYGPESSGKTTLALHAIAEAQKGGGTAAFIDAEHALDPVYARKLGVDIDNLIVSQPDTGEQALEITDTLVRSNAIDVLVVDSVAALVPRAEIEGEMGDSHVGLQARLMSQALRKLTGSISRSRCMVIFINQVRMKIGVMYGNPETTTGGNALKFYASVRLDIRRTGQIKDRDEIVGNATRVKVVKNKVAPPFKQVEFDIMYGEGISKIGEILDLGVKAGLVEKSGAWFSYDSIRIGQGRENAKNFLRENPEVCSRLEAAIRGRTDQVAEGLMAGPDADDDI

SEQ ID NO: 100163 - DNA, 984 bp, Neorickettsia sennetsu str. Miyayama
  CDS (1)..(984): transl_table=11
atgaacagggaagatgcgcttaagggcgttgtggttcaaattgaaaaaatgtttgggaaaggttccataatgacctttagtcaggagccagcttcagtggagtgcatttctacgggttccataggattggatagtgctcttggtggaggtataccaaaggggcgaattattgagatatttggaccggaaagttctgggaagacgacacttacgcttcacataatagctgaagcgcagaaaaacggcgggacgtgtgcgtttattgacgctgagcatgctttggatcctgtttatgcaagaaggttgggtgtcaaaattgaggagctgttaatttcgcagccggatactggggagcaggctttggaaatagtagatagtcttattaagtctggtgcagtcgatgtgatagttgtcgattctgttgctgctcttactccgaaagcagaaatagaaggagaaatgggagatctacatgttgggcttcaggctagattgcttagtcaggcactgcgaaagatcacagcttctgtatcccgtagtaactgcgttgtggtcttcatcaaccagatccggatgaagatcggtgtcatgtttggtagtcctgaaacaacgacagggggtaatgcattgaaattctattcgtccgttagaattgatattcgcaagattggttcaattaaggataaagaagatgttgtgggtaaccagacacgggtgaaggtggttaaaaataaggtagcgcctccgtttaagcaggctgagtttgatatcatttacactgagggcatttcgaagcttggtgaaataatcgagattggtgtgcgcaataagataatagaaaaggcaggttcgtattattcatacggggatgtcaagcttggtcagggtaaggaaaatgtgaagcagttcttaaaagagaataaagagttagcagcggagttagagaggaaagtgagggattccatgctgcttattgcaacgtag

SEQ ID NO: 100164 - protein, 327 aa, Neorickettsia sennetsu str. Miyayama
MNREDALKGVVVQIEKMFGKGSIMTFSQEPASVECISTGSIGLDSALGGGIPKGRIIEIFGPESSGKTTLTLHIIAEAQKNGGTCAFIDAEHALDPVYARRLGVKIEELLISQPDTGEQALEIVDSLIKSGAVDVIVVDSVAALTPKAEIEGEMGDLHVGLQARLLSQALRKITASVSRSNCVVVFINQIRMKIGVMFGSPETTTGGNALKFYSSVRIDIRKIGSIKDKEDVVGNQTRVKVVKNKVAPPFKQAEFDIIYTEGISKLGEIIEIGVRNKIIEKAGSYYSYGDVKLGQGKENVKQFLKENKELAAELERKVRDSMLLIAT

SEQ ID NO: 100165 - DNA, 1074 bp, Ehrlichia chaffeensis str. Arkansas
  CDS (1)..(1074): transl_table=11
atgtctgatagcaaaaatttaaaccaggaaagacaaaaagcattggatagcgcaattagtcaaattgaaaaggcttttggtcgtggtgcaataatgaaattaaaacaaggtgctattgaaaaaatagatagtatttctactggatcaattgcgcttgatacagctttaggcattggtgggtttcctaaaggtagaattgttgaaatttttgggcctgaaagttctggtaaaacaacacttgctttgcatgtaattgctgagtcacaaaaaaagggtgggaattgtgcatttattgatgctgaacatgctttggatatcatgtatgctcgcaaattaggggtaaatactggtgatttgatcgtttctcaacccgatacaggtgaacaagcattacatatagttgagtatctggtttgttctggtgctattgatgtaatagtagtagattctgtggctgcattaactcctagagcagagatagaaggtgatatgggtgatcaacatatggggttacaagctaggttgttaagtcatgcattgaggaagttaacttctattgtatcaaaagctaattgtgttcttatttttattaatcagatacgtatgaaaataggggtagtttatggaaatcctgaaactactactggtggcaatgctttaaagttttatagttctgtaagattagatatacgtaaggtaagtgcaattaaggataaggacgtaattattggtaatcaaactaaggtgaaagttgttaaaaacaaggtggctcctccttttaaacaagtagattttgatatcatgtataatgaaggtatctcaaaggtaggagagattatagatatgggtgtaaaacttaatattattgaaaaagctgggtcatactactcgtataatagtgtgcgtcttggtcaaggtaaagaaaatgcaaaatcttatcttaaagctaattgtgatactgcacatgaaatagaacagaagataagaagtatacttgcaagtgataatgaagttagttgtttcaatgcagaggttaatgataatcttcatgaagtagaagaaacagttttttaa

SEQ ID NO: 100166 - protein, 357 aa, Ehrlichia chaffeensis str. Arkansas
MSDSKNLNQERQKALDSAISQIEKAFGRGAIMKLKQGAIEKIDSISTGSIALDTALGIGGFPKGRIVEIFGPESSGKTTLALHVIAESQKKGGNCAFIDAEHALDIMYARKLGVNTGDLIVSQPDTGEQALHIVEYLVCSGAIDVIVVDSVAALTPRAEIEGDMGDQHMGLQARLLSHALRKLTSIVSKANCVLIFINQIRMKIGVVYGNPETTTGGNALKFYSSVRLDIRKVSAIKDKDVIIGNQTKVKVVKNKVAPPFKQVDFDIMYNEGISKVGEIIDMGVKLNIIEKAGSYYSYNSVRLGQGKENAKSYLKANCDTAHEIEQKIRSILASDNEVSCFNAEVNDNLHEVEETVF

SEQ ID NO: 100167 - DNA, 1047 bp, Saccharophagus degradans 2-40
  CDS (1)..(1047): transl_table=11
atggatgccagtaaatcaaaagcgttagaagctgcactttctcaaattgatcgccagttcggtaagggcacggttatgcgccttggcgataaaggcagagaaaaaatgcctgctatttcaaccggttcactcggtttagatgtggccttaggtataggtggcttgcccaaaggacgtattgttgagatttacggccctgaatcttcaggtaaaaccacgctaacccttcaagttattgcagaagcgcagcgccaaggtggcacttgtgctttcgttgatgccgagcatgcactagaccctgtatacgccgaaaagcttggtgtaaatgtagacgacctaattatttctcagccagataacggtgaacaggccttagaagttgccgatatgttggttcgttctggcgctgtagatgtgcttgttgtcgactccgtggcggcgcttactcccaaggccgaaatcgaaggcgatatgggcgaccaccacgttggtttgcaagcgcgattaatgtcgcaagcactgcgaaaaattacgggcaacattaaaaacgctaactgtttagcaatttttattaaccaaattcgtatgaagattggtgtgatgttcggcaacccagaaaccactaccggtggtaacgcgctgaagttctactcttcggttcgtttagatatccgtcgcattggctcagttaaagagggcgatgaggttgttggctcggatacgcgcgttaaagttgttaaaaataaagttgcgccaccctttaagcaagccgagtttcaaattttgtatggtcagggcataaaccgcttgggcgagattgtagactttggtgttaagcttggtttaattgataaagctggtgcttggtatagctataacggcgataaaattggccagggtaaagcaaatgctatgcaataccttcgcgataacaaagaagttgccgagttcttagagcaaaaaataaaggcggaattactgggcgatattaagcctgtagctaaagaaggcgctgaagttgaagaagagagcgcagagcaggagtaa

SEQ ID NO: 100168 - protein, 348 aa, Saccharophagus degradans 2-40
MDASKSKALEAALSQIDRQFGKGTVMRLGDKGREKMPAISTGSLGLDVALGIGGLPKGRIVEIYGPESSGKTTLTLQVIAEAQRQGGTCAFVDAEHALDPVYAEKLGVNVDDLIISQPDNGEQALEVADMLVRSGAVDVLVVDSVAALTPKAEIEGDMGDHHVGLQARLMSQALRKITGNIKNANCLAIFINQIRMKIGVMFGNPETTTGGNALKFYSSVRLDIRRIGSVKEGDEVVGSDTRVKVVKNKVAPPFKQAEFQILYGQGINRLGEIVDFGVKLGLIDKAGAWYSYNGDKIGQGKANAMQYLRDNKEVAEFLEQKIKAELLGDIKPVAKEGAEVEEESAEQE

SEQ ID NO: 100169 - DNA, 1035 bp, Methylobacillus flagellatus KT
  CDS (1)..(1035): transl_table=11
atggatgaaaacagaagcaaagcgctagccgccgccctctcgcaaatcgagaaacaatttggcaaaggctctatcatgcgcatgggcgacaccgatgtcgctgctgacatccaggcagtttctaccggctccctgggcctggacatcgccctgggtattggcggcttgccgcgcggccgcatcgtcgagatttacggcccggaatcctccggcaagaccacgctgacattgtctgtgatcgcgcagatgcaaaagctgggcggcacggcagcattcatcgacgcagaacacgcgctcgacccggtctacgcgcagaagctcggtgtcaatgtttccgatctgctcatctcccagcccgacaccggcgaacaggcgctcgagatcgccgacatgctggtgcgctccggctcggtagatgtcgtggtggtcgactccgtcgctgcgctgacgcccaaggccgaaatcgaaggcgaaatgggcgactcgcacatgggcctgcaggcccgcctgatgtcgcaggcactgcgcaagctcaccgccaacatcaagcgcaccaacaccttggtcatcttcatcaaccagatccgcatgaagatcggcgtgatgttcggcaaccccgagaccaccaccggcggcaatgcactcaagttctacgcctccgtgcgcctggacatccgccgcaccggcgcgatcaagaagggggacgaggtcacgggatcagaaacccgggtcaaggtagtgaagaacaaagtggcccctccgttcaagcaagcggaattcgacatcctctatggcgaaggtatctcgcgcgagggcgaaatcatcgaactcggcgtcaaccttaaattgatcgagaaggccggtgcctggtacagctacaagggcgagaagatcggccagggcaaggacaacgcgcgcgagttcctcagggagcacccggaaatcgccaatgagatcgacgccaagattcgcgagcattccaatctggccaacgccgcgatgacgacggcaccggatgaagaaagcgacgaataa

SEQ ID NO: 100170 - protein, 344 aa, Methylobacillus flagellatus KT
MDENRSKALAAALSQIEKQFGKGSIMRMGDTDVAADIQAVSTGSLGLDIALGIGGLPRGRIVEIYGPESSGKTTLTLSVIAQMQKLGGTAAFIDAEHALDPVYAQKLGVNVSDLLISQPDTGEQALEIADMLVRSGSVDVVVVDSVAALTPKAEIEGEMGDSHMGLQARLMSQALRKLTANIKRTNTLVIFINQIRMKIGVMFGNPETTTGGNALKFYASVRLDIRRTGAIKKGDEVTGSETRVKVVKNKVAPPFKQAEFDILYGEGISREGEIIELGVNLKLIEKAGAWYSYKGEKIGQGKDNAREFLREHPEIANEIDAKIREHSNLANAAMTTAPDEESDE

SEQ ID NO: 100171 - DNA, 1077 bp, Burkholderia xenovorans LB400
  CDS (1)..(1077): transl_table=11
atggaagaaagcaagaaaggctcggctggactgactgctgaaaagagcaaggcactcgctgccgcactcgcgcagatcgaaaagcagttcggcaaagggtcggtcatgcggctcggcgcaggtgaggtaatcgaagacatccaggtggtctcaaccggatcgctcggtctcgacatcgcgctgggcgtcggcggtttgccgcgtggccgtgtggtcgaaatctatggcccggaatcatccggtaaaaccacgctgacgctgcaagtcattgccgaaatgcagaagatcggcggcacggcggcgtttatcgacgcggaacacgcgctggatatccagtacgcgagcaagctcggcgtgaacgtgaacgacctgctggtttcgcagcccgacacaggcgagcaggcgctcgaaattgctgacgcactggtgcgttcgggctcgatcgacatgatcgtgatcgactcggtcgcggcactcgtgccgaaggctgaaatcgaaggcgaaatgggcgactcgctgccgggtctgcaagcgcgtctcatgtcgcaggcgctgcgcaagctcaccggcacgatcaagcgcacgaactgtctcgtgatcttcatcaaccagatccgcatgaagatcggtgtgatgttcggcaatccggaaaccaccacgggcggtaacgcgctgaagttctacgcatcggtgcgtctggacattcgccgcatcggttcgatcaagaagaacgacgaagtgatcggcaacgaaacgcgcgtgaaggttgtcaagaacaaggtatcgccaccgttccgggaagcgattttcgacattctgtacggcgaaggcatctcgcgtcagggcgaaatcatcgacttgggcgtacaggccaagatcgtcgacaaggccggcgcgtggtacagctacagcggcgaacggatcggtcagggcaaggacaacgcgcgtgaattcctgcgtgaaaatccggatatcgctcgcgagatcgaaaaccgtatccgcgaatcgctgggcgtgaatgctatggctgaagccgcgaccgtcgcaagcgctgaagtcgcggacgaagaagagtaa

SEQ ID NO: 100172 - protein, 358 aa, Burkholderia xenovorans LB400
MEESKKGSAGLTAEKSKALAAALAQIEKQFGKGSVMRLGAGEVIEDIQVVSTGSLGLDIALGVGGLPRGRVVEIYGPESSGKTTLTLQVIAEMQKIGGTAAFIDAEHALDIQYASKLGVNVNDLLVSQPDTGEQALEIADALVRSGSIDMIVIDSVAALVPKAEIEGEMGDSLPGLQARLMSQALRKLTGTIKRTNCLVIFINQIRMKIGVMFGNPETTTGGNALKFYASVRLDIRRIGSIKKNDEVIGNETRVKVVKNKVSPPFREAIFDILYGEGISRQGEIIDLGVQAKIVDKAGAWYSYSGERIGQGKDNAREFLRENPDIAREIENRIRESLGVNAMAEAATVASAEVADEEE

SEQ ID NO: 100173 - DNA, 1062 bp, Ralstonia metallidurans CH34
  CDS (1)..(1062): transl_table=11
atggacgacaagaaggccggcgccggcgtgagcgctgagaagcagaaggcgcttgccgccgcgctctcccagattgagaagcagtttggcaagggctcgatcatgcgcctgggcgatggcgaaatcgaacaggacatccaggtagtgtccaccggctcgctggggctggacatcgcgctgggcgtgggtggcctgccgcgcggccgcgtggtcgagatctacggtccggaatcgtccggcaagaccacgctgacgctgcaggtggtggccgaaatgcagaagctgggcggcacctgcgcgttcatcgacgccgagcacgccctggatgtccaatatgctggcaagctcggcgtggacgtcggcaatctgctgatctcccagcccgataccggcgagcaggccctggaaatcaccgacgcgctggtgcgctcgggttcgatcgacctgatcgtgatcgactcggtggccgctctggtgccaaaggcagaaatcgagggcgaaatgggcgattcgctgcccggcctgcaggcccgcctgatgagccaggcgctgcgcaagctgaccggcacgatcaagcgcacgaactgcctggtgatcttcatcaaccagatccgtatgaagatcggtgtgatgtttggttctcccgaaaccaccaccggcggtaacgcgctgaagttctacgcctcggtgcgcctggacatccgccgtatcggctcgatcaagaagggcgacgaagtcgtcggcaacgagaccaaggtcaaggtggtcaagaacaaggtgtcacctccgttccgcgaggcgttcttcgacatcctctatggccagggcatctcgcgccagggtgaaatcatcgacctgggcgtggacgccaagatcgttgagaaggccggcgcctggtacagctacaacggcgagaagatcggccagggcaaggacaacgcacgcgagtatctgcgcgagaacccggacatcgccgacgagatcgagaacaaggtgcgtctggcgctgggcgtggcgccgctgaacaccgtggcgggcgcgccagcagaggtcgaaggctga

SEQ ID NO: 100174 - protein, 353 aa, Ralstonia metallidurans CH34
MDDKKAGAGVSAEKQKALAAALSQIEKQFGKGSIMRLGDGEIEQDIQVVSTGSLGLDIALGVGGLPRGRVVEIYGPESSGKTTLTLQVVAEMQKLGGTCAFIDAEHALDVQYAGKLGVDVGNLLISQPDTGEQALEITDALVRSGSIDLIVIDSVAALVPKAEIEGEMGDSLPGLQARLMSQALRKLTGTIKRTNCLVIFINQIRMKIGVMFGSPETTTGGNALKFYASVRLDIRRIGSIKKGDEVVGNETKVKVVKNKVSPPFREAFFDILYGQGISRQGEIIDLGVDAKIVEKAGAWYSYNGEKIGQGKDNAREYLRENPDIADEIENKVRLALGVAPLNTVAGAPAEVEG

SEQ ID NO: 100175 - DNA, 1074 bp, Silicibacter sp. TM1040
  CDS (1)..(1074): transl_table=11
atggcggatctattgaccatgaaggacgacaagaagagcggcgacaagcagaaggccttggacagcgcgcttgcccagatcgaacggcagttcggcaagggctcgatcatgaaactcggcgatggcacagccttgcaagagatcgaggcaagctctaccggctctcttgggctggatattgcgcttggcattggtggtctgccgatgggccggatcgtcgagatctacgggccggaaagctccgggaaaaccacgctgacgctgcactgtattgctgagcagcagaaaaagggcggcgtttgcgcctttgtggatgccgaacacgcgctggacccgcaatatgccaaaaagctgggcgtcgatctggacgagctgctgatttcgcagcccgacaccggcgaacaggcgcttgagatcaccgacacgctggtgcgctccggtgcggtcaacatggtgatcgtcgactcggtggcggctttgaccccgaagtcagagctcgagggcgacatgggtgacagcaacgtcggcgtgcaggcccgcctgatgagtcaggcgatgcgcaagctcaccggttccatcagccgctccaaatgcatggtgatctttatcaaccagattcgcatgaagatcggcgtgatgttcggctcgcccgagaccaccaccggcggcaacgcgctgaagttctactcctcggtgcgactggacatccgccgcatcgggtcgatcaaggaccgcgacgaggttgtcggcaacgccacccgcgtgaaggtcgtcaagaacaaggtcgcaccgccgttcaaacaggtggaattcgacatcatgtatggcgaaggcatctccaagatgggcgaattgctcgatctgggtgtggccgcaggcgtggtcaacaagtccggtgcctggttctcttatggggacgagcggatcgggcaggggcgcgagaatgccaaagggtatctgcgcgaaaactcccgcatcgcactggagatcgaagacaagatccgcgctgcgcatgggcttgatttcgacatgccccccgaagcgcaagacgacgatgttctgtttgaaggctga

SEQ ID NO: 100176 - protein, 357 aa, Silicibacter sp. TM1040
MADLLTMKDDKKSGDKQKALDSALAQIERQFGKGSIMKLGDGTALQEIEASSTGSLGLDIALGIGGLPMGRIVEIYGPESSGKTTLTLHCIAEQQKKGGVCAFVDAEHALDPQYAKKLGVDLDELLISQPDTGEQALEITDTLVRSGAVNMVIVDSVAALTPKSELEGDMGDSNVGVQARLMSQAMRKLTGSISRSKCMVIFINQIRMKIGVMFGSPETTTGGNALKFYSSVRLDIRRIGSIKDRDEVVGNATRVKVVKNKVAPPFKQVEFDIMYGEGISKMGELLDLGVAAGVVNKSGAWFSYGDERIGQGRENAKGYLRENSRIALEIEDKIRAAHGLDFDMPPEAQDDDVLFEG

SEQ ID NO: 100177 - DNA, 1092 bp, Myxococcus xanthus DK 1622
  CDS (1)..(1092): transl_table=11
atggccgtgaatcaggagaaggaaaaggcgatcgaactggcgatgtccgcggtggagcgccagttcggcaaggggtccatcatgcggctcggcaacgacgagccaatgatgcgagacgttcaggccatcccgacgggctccatctcgctggacatcgccctgggcgtgggtggcgtgcccaagggccgcatcatcgaaatcttcgggccggagtcgtccggtaagacgacgctgtgtctccacatcgtcgccgaagcgcagaagcgcggcggcatctgcggctacgtggacgcggagcacgcgctggacgtgggctacgcgcgcaagctgggcgtgcgcaccgatgacctgctgctgagccagccggacaccggtgagcaggcgctggaaatcgcggagatgctggtgcgctcgggcgccatcgacgtgctggtggtggactcggtggccgcgctcgtgccgaaggcggagctcgagggtgagatgggcgacgcgcacatgggtgtgcaggcccgcctcatgagccaggcgctccgcaagctgacgggcaccatcgccaagagccagacgtgcgtcatcttcatcaaccagattcgcatgaagattggcgtgatgttcggcaacccggagacgacgacgggcggtaacgcgctgaagttctacgcgtcgcagcgcctggacatccgccgcatcggcgccatcaagaatggcgacaacgtggtgggcagccgcacccgcgtgaaggtggtgaagaacaaggtcgcgccgccgttcaaggaagtcgagttcgacatcatgtacggcacgggcatctcccgtgagggcgacctcatcgacctcgcctccaacgagaacatcgtggagaagagcggcagctggttctccttcaatggtgagcgcatcggccagggccgggagaacgtgaaggagtacctgcgcgagcacccggagatcgcgaaggacatcgaaggccgcgtgctggagaagtacggcatcggcaagtcgggtgcgcccgtcgccgcggcgccggacgagtccgcgccggccgaaggtggcagcgagaagcgcggccgtgtgaaggccgtgaagtag

SEQ ID NO: 100178 - protein, 363 aa, Myxococcus xanthus DK 1622
MAVNQEKEKAIELAMSAVERQFGKGSIMRLGNDEPMMRDVQAIPTGSISLDIALGVGGVPKGRIIEIFGPESSGKTTLCLHIVAEAQKRGGICGYVDAEHALDVGYARKLGVRTDDLLLSQPDTGEQALEIAEMLVRSGAIDVLVVDSVAALVPKAELEGEMGDAHMGVQARLMSQALRKLTGTIAKSQTCVIFINQIRMKIGVMFGNPETTTGGNALKFYASQRLDIRRIGAIKNGDNVVGSRTRVKVVKNKVAPPFKEVEFDIMYGTGISREGDLIDLASNENIVEKSGSWFSFNGERIGQGRENVKEYLREHPEIAKDIEGRVLEKYGIGKSGAPVAAAPDESAPAEGGSEKRGRVKAVK

SEQ ID NO: 100179 - DNA, 1035 bp, Rubrobacter xylanophilus DSM 9941
  CDS (1)..(1035): transl_table=11
atggcattggacaagagcaaggcgctagacaccgccgtatcgcagatagagcggcagtttggcaagggttcgatcatgcggatgggcgaccgggcctcccagaaggtcgcctccatctccaccggctccctggcgctcgacctcgccctcggggtcgggggggtccccagggggcgcatcgtggagatcttcggtccggagtccagcggaaagaccaccctcgccctgcacatcatcgccgaggcccagagggccggcgggctcgccgcgttcatagacgccgagcacgccctcgaccccacctacgccgaggccataggcgtcgacctggagaacctctacttctcccagcccgacagcggcgagcaggccctcgagatcgccgacaccctcgtccgctccggggccctcgacgccgtggtcatagactccgtggccgcgctggtccctagagccgagatagagggtgagatgggggactctcacgtggggcttcaggcccggcttatgagccaggctctgaggaagctctcggggtcgctctcgcggtcggggaccacggcgatcttcataaaccagctgcgggagaagataggggtgatgttcggctcgccggagaccacgccggggggtcgggcgctgaagttctacgcgagcgtgcggatggacatccggcgcatcggggcgctgaaggccggcaacgagacggtgggcaaccagacgcgggtgaagatcgtcaagaacaaggttgcgccgccgttcaaggaggtcaccttcgacatcatgtacggggaggggatctccagggaggggagcctgctggacgtggggatagagcagggtgtgatccagaagagcggcgcctggttcgcctacggggaggagaggatcgggcaggggcgcgagaacgcccgcaagttcctcaaggagcacccggagatacgcgaccggataacccgcgaggtctacgagcggctgggcctcggcggggaggagcgggaggagctggagggccgggccgagccggtcctgtag

SEQ ID NO: 100180 - protein, 344 aa, Rubrobacter xylanophilus DSM 9941
MALDKSKALDTAVSQIERQFGKGSIMRMGDRASQKVASISTGSLALDLALGVGGVPRGRIVEIFGPESSGKTTLALHIIAEAQRAGGLAAFIDAEHALDPTYAEAIGVDLENLYFSQPDSGEQALEIADTLVRSGALDAVVIDSVAALVPRAEIEGEMGDSHVGLQARLMSQALRKLSGSLSRSGTTAIFINQLREKIGVMFGSPETTPGGRALKFYASVRMDIRRIGALKAGNETVGNQTRVKIVKNKVAPPFKEVTFDIMYGEGISREGSLLDVGIEQGVIQKSGAWFAYGEERIGQGRENARKFLKEHPEIRDRITREVYERLGLGGEEREELEGRAEPVL

SEQ ID NO: 100181 - DNA, 1074 bp, Shewanella sp. MR-4
  CDS (1)..(1074): transl_table=11
atgaaggtcgatccaaacaaagagaaagcacttgctgcggtattgagccaaattgaaaagcaatttggtaaaggctccatcatgaagctgggcgaagaccgctctatggatgttgagactatttctactggttcactttcccttgacgtcgccttaggtgctggcggtttaccaatgggacgtatcgttgagatttatggtcctgaatcatcaggtaaaacaacgctaacattagaagtgattgccgccgctcagcgggaaggtaaaacctgtgcctttatcgacgccgagcacgcgctagaccctatctatgctaaaaaattaggcgtagatatcgataacttactgtgttcacaacccgatactggtgaacaagcccttgagatctgtgatgcgttaacccgctctggcgcagtagatgtgatcatcgttgactcggtcgcggcattaacacccaaagcagaaattgaaggtgaaatcggtgactcacatatgggcttagcggcgcgtatgatgagccaagcgatgcgtaagttagcgggtaacctcaagcaatcgaatacactgttaatcttcatcaaccaaattcgtatgaagattggtgtgatgtttggtaacccagaaaccacaacgggcggtaacgcgctgaaattctacgcctctgttcgtcttgatattcgccgtactggtgctatcaaagaaggcgatgaagtggtaggtaacgagacgcgcgttaaagtggttaaaaacaaagttgctgcgccgtttaagcaagctgagttccaaattctttacggtcaaggtatcaaccgtaccggtgaattagtcgatttaggtgtggctcataaacttatcgaaaaagccggtgcatggtacagctacaagggtgacaagattggtcagggccgtgcaaatgctggcaaatatttgactgaaaacccagcgatagcagctgaaattgataaaacactacgtgagctattattgagtaaccctgcagccttgtcatcatcagcttctgatgatgagaatagtgaaggcaatgttgacttcgaaacaggcgaagtattctga

SEQ ID NO: 100182 - protein, 357 aa, Shewanella sp. MR-4
MKVDPNKEKALAAVLSQIEKQFGKGSIMKLGEDRSMDVETISTGSLSLDVALGAGGLPMGRIVEIYGPESSGKTTLTLEVIAAAQREGKTCAFIDAEHALDPIYAKKLGVDIDNLLCSQPDTGEQALEICDALTRSGAVDVIIVDSVAALTPKAEIEGEIGDSHMGLAARMMSQAMRKLAGNLKQSNTLLIFINQIRMKIGVMFGNPETTTGGNALKFYASVRLDIRRTGAIKEGDEVVGNETRVKVVKNKVAAPFKQAEFQILYGQGINRTGELVDLGVAHKLIEKAGAWYSYKGDKIGQGRANAGKYLTENPAIAAEIDKTLRELLLSNPAALSSSASDDENSEGNVDFETGEVF

SEQ ID NO: 100183 - DNA, 1044 bp, Alkalilimnicola ehrlichei MLHE-1
  CDS (1)..(1044): transl_table=11
atggacgaaaatcgcaagaaagcactgggcgctgccctgggacagatcgaacggcagtttggcaagggcgcggtcatgcgcatgggtgatgcccgcgccgtgcgcggcgacgtggaggtcatctccaccggctcgctgcagctcgatatcgccctgggcgtgggcggcctgcccaaggggcgggtggtggagatctacggcccggagtcctccggcaagaccaccctgaccctgcacgcgatcgccgaggcgcagaaggcgggcggcaccgccgccttcgtcgacgccgagcacgcactggaccccgactacgcagagaagctgggggtcaacctggacgacctgctggtctcccagccggacaccggcgagcaggcgctggagatcaccgacatgctggtccgttccggcgccgtggacgtggtggtggtggactcggtcgccgcgctcacgcccaaggccgagatcgagggcgagatgggcgactctcacgtgggcctgcaggcgcggctgatgtcccaagccctgcgcaagctcaccgccaacatcaaacgctccaacaccctggttatcttcatcaatcagatccgcatgaagattggggtaatgttcggcagccccgagaccaccaccgggggtaacgcgctgaaattctacagctcggtgcgcatggatatccgtcgcctgggtgccatcaagaagggcgacgaggtcctgggcaacgagacccgggtcaaggtggtcaagaacaagatggcgccgccgttcaagcaggcggagttcgagatcctctacggccagggtatctcccacgagggggagttgatcgacctgggtgtcaaggagggcctgatcgagaaggccggggcctggtacagccacaacggcgaccgcattggccagggcaaagacaacgtccgcaactacctcaaagagcacccggaactggccgcggaactggaaaagcagatccgcgacaagctgctgcccgggcgggccccatccagcgaggcccagggcaccgaaagcggtcaggaggcctga

SEQ ID NO: 100184 - protein, 347 aa, Alkalilimnicola ehrlichei MLHE-1
MDENRKKALGAALGQIERQFGKGAVMRMGDARAVRGDVEVISTGSLQLDIALGVGGLPKGRVVEIYGPESSGKTTLTLHAIAEAQKAGGTAAFVDAEHALDPDYAEKLGVNLDDLLVSQPDTGEQALEITDMLVRSGAVDVVVVDSVAALTPKAEIEGEMGDSHVGLQARLMSQALRKLTANIKRSNTLVIFINQIRMKIGVMFGSPETTTGGNALKFYSSVRMDIRRLGAIKKGDEVLGNETRVKVVKNKMAPPFKQAEFEILYGQGISHEGELIDLGVKEGLIEKAGAWYSHNGDRIGQGKDNVRNYLKEHPELAAELEKQIRDKLLPGRAPSSEAQGTESGQEA

SEQ ID NO: 100185 - DNA, 1071 bp, Hyphomonas neptunium ATCC 15444
  CDS (1)..(1071): transl_table=11
gtggacaaggaatccggtgtggataagcaaaaggccctcgaaacggcgctcggcaacattgagcggtcctttggcaagggctccgtcatgcgcctcggcgacaagaaaaccctggatatcgaggcggtttcgaccggctcgctggggctcgacattgcgctcggcattggcggtttgcccaaaggccggatcatcgagatttttggcccggaaagctccggcaagaccacgctgtcgctgcattgtgtagccgaagcccagaagaatggcggcgtctgcgcctttatcgacgcagaacatgcgcttgacccggtctatgcctcgaaactcggcgtcgatctggacgatctgctgatctctcagccagatactggcgaacaggcgcttgagattgccgatacgctcgtgcgttcgggcgctgtggaccttgtggtcatcgactcggttgcggccctcaccccgcgtgcggagattgaaggcgagatgggcgaccagcttcccggcctgcaggcccgcctgatgagccaggcgctgcgcaagctgaccggctcgatctccaagtcgaaatgcatggtcatcttcatcaaccagatccggatgaagatcggtgtgatgtttggcaacccggagacgacgacaggcggtaacgccttgaaattctactcttctgtacgcctcgacatccgccgcatcggccagatcaaggaccgcgaggaggtcatcggcaaccagacgcgcgtcaaggttgtgaagaacaaggtggctccgcctttccggcaggtcgaattcgatattatttatggtgagggcatctccaagacgggcgagcttgtggatctcggcgtcaaggcgaatgtcgtggaaaaatcgggctcctggttctcctataacggggagcgtattggccagggccgcgaaaaggcacggcaattcctcaaggataacccggcggtcgcaaacgagattgaagatgcggttcgccggaatgcgggtcttctcgcagaagagctcctgtctgccggtatggtggctggtgaaggcgatgatgacgccgaggccgccgagggctga

SEQ ID NO: 100186 - protein, 356 aa, Hyphomonas neptunium ATCC 15444
MDKESGVDKQKALETALGNIERSFGKGSVMRLGDKKTLDIEAVSTGSLGLDIALGIGGLPKGRIIEIFGPESSGKTTLSLHCVAEAQKNGGVCAFIDAEHALDPVYASKLGVDLDDLLISQPDTGEQALEIADTLVRSGAVDLVVIDSVAALTPRAEIEGEMGDQLPGLQARLMSQALRKLTGSISKSKCMVIFINQIRMKIGVMFGNPETTTGGNALKFYSSVRLDIRRIGQIKDREEVIGNQTRVKVVKNKVAPPFRQVEFDIIYGEGISKTGELVDLGVKANVVEKSGSWFSYNGERIGQGREKARQFLKDNPAVANEIEDAVRRNAGLLAEELLSAGMVAGEGDDDAEAAEG

SEQ ID NO: 100187 - DNA, 1095 bp, Rhizobium leguminosarum bv. viciae 3841
  CDS (1)..(1095): transl_table=11
atgtctcagaattcattgcggctggtagaggacaaatcggtggacaaaagcaaggcgcttgaagcggcactctcacagatagagcggtcgttcggcaagggctcgatcatgaaactcggctccaacgagaatgttgtcgagatcgagacgatctcgaccggctcgcttggtctcgatattgcactcggcgttggtggcctgccgaggggccgcatcatcgaaatctacgggccggaaagctccggtaagacgacgcttgcactgcagacgattgccgaagcgcagaagaagggcggcatctgcgccttcgtcgatgccgaacatgcgctcgatcccgtctatgcccgcaagcttggcgtcgacctgcagaaccttctgatctcgcagcccgataccggcgagcaggcgcttgaaatcaccgatacgctggtgcgctccggcgccgtcgacgttctcgtcgtcgactcggttgcggcattgacgccgcgcgccgaaatcgaaggcgaaatgggcgacagccttcccggcctgcaggcacgattgatgagccaggcgctgcgcaagctcaccgcttcgatctcgaagtcgaacactatggtgatcttcatcaaccagatccgcatgaagatcggcgtcatgttcggctcgccggaaacgacgacaggcggcaatgcgctgaaattctatgcttccgtgcgccttgacatccgccgcatcggcgctgtcaaggagcgcgaagaggtgatcggcaaccagacccgcgtcaaggtcgtcaagaacaagatggcgccacccttcaagcaggtcgagttcgacatcatgtatggcgagggtgtttccaagaccggcgaactggtcgatctcggcgtcaaggccggcatcgtcgaaaagtcgggcgcctggttctcctataacagccagcgtctcggccagggccgtgaaaacgccaagactttcctgcgcgacaatccggacctcgcccgcgagatcgaactgtcgctgcgccagaatgccggcctgatcgccgaccgtttcctgcagaacggtggaccggaccccgatgacggcgatggcgatgccactgcggaaatgtaa

SEQ ID NO: 100188 - protein, 364 aa, Rhizobium leguminosarum bv. viciae 3841
MSQNSLRLVEDKSVDKSKALEAALSQIERSFGKGSIMKLGSNENVVEIETISTGSLGLDIALGVGGLPRGRIIEIYGPESSGKTTLALQTIAEAQKKGGICAFVDAEHALDPVYARKLGVDLQNLLISQPDTGEQALEITDTLVRSGAVDVLVVDSVAALTPRAEIEGEMGDSLPGLQARLMSQALRKLTASISKSNTMVIFINQIRMKIGVMFGSPETTTGGNALKFYASVRLDIRRIGAVKEREEVIGNQTRVKVVKNKMAPPFKQVEFDIMYGEGVSKTGELVDLGVKAGIVEKSGAWFSYNSQRLGQGRENAKTFLRDNPDLAREIELSLRQNAGLIADRFLQNGGPDPDDGDGDATAEM

SEQ ID NO: 100189 - DNA, 1068 bp, Solibacter usitatus Ellin6076
  CDS (1)..(1068): transl_table=11
atggatgaaaaggagcgctcgcgcgctttagaaactgcactcggccagattgagaagcaatttggcaaaggctcgatcctgcgtctcggatcgaaagacgccattgtaccggtctctgtgatttcgacgggctcgatttcgctggacgctgcgctgggtgtcggcggctttcctcgcggccgtattaacgaaatcttcggaccggaatcgtcgggtaaaacgaccatcgcgctgcaggtggtggcggaggcacagaaggccggcgggatcgcggcgttcatcgacgtggaacacgcgctggacccgacgtacgcgcgcaaactcggcgtggacgtcgacaatctgctggtgtcgcagccagactatggcgaacaggcgctcgagatcacggcgcacctgatcgcgtccggacagatcgacgtgctggtggtggattcggtggcggcgctggtgccgaaatccgagctcgacggcgaaatgggcgatagccacatgggcgtgcaggcgcgcctgatgtcgcaggctctgcgcaaactgaccgggtcggtcaacaagtcgcgcacgtgcctgatcttcatcaaccagatccgcgagaagatcggcgtgatgttcggcaatccggaaaccactacgggcggccgcgcgctgaagttttattcgacggtaaggctcgacatccggcgcatcggggccattaaagatggcgacgcggtggtcggcaaccgcaccaaggtcaaggtggtgaagaacaaagtcgcgtcgccgttccgcgaggcggagttcgacatcatttacggcgaaggcgtctccaaggaaggcgacctgctcgatctcggggtcgcgcagaatctggtggagaagagcggctcgtggttcagctacaagggcgatcgcatcggccaggggcgcgagaacgcgcgccagttcctcaaggacaatcccgacatccgcaaggcggtcgatacggaactgcgcaagacgttgggcctggtgaagagcgacgcggctcctgtgccgccgactcccgctccggaacctgcggccgccaagccggccgcacgccgctga

SEQ ID NO: 100190 - protein, 355 aa, Solibacter usitatus Ellin6076
MDEKERSRALETALGQIEKQFGKGSILRLGSKDAIVPVSVISTGSISLDAALGVGGFPRGRINEIFGPESSGKTTIALQVVAEAQKAGGIAAFIDVEHALDPTYARKLGVDVDNLLVSQPDYGEQALEITAHLIASGQIDVLVVDSVAALVPKSELDGEMGDSHMGVQARLMSQALRKLTGSVNKSRTCLIFINQIREKIGVMFGNPETTTGGRALKFYSTVRLDIRRIGAIKDGDAVVGNRTKVKVVKNKVASPFREAEFDIIYGEGVSKEGDLLDLGVAQNLVEKSGSWFSYKGDRIGQGRENARQFLKDNPDIRKAVDTELRKTLGLVKSDAAPVPPTPAPEPAAAKPAARR

SEQ ID NO: 100191 - DNA, 1173 bp, Magnetococcus sp. MC-1
  CDS (1)..(1173): transl_table=11
atgcgactgccatcaaaaggaaacattatggctttggataaagataagagcaaagcactggatgccgcgctggctcaaattgaacgtcagtttggtaaaggcagcatcatgcgcatgagcgaaggtgccgcgaccgatattcctgtggtctccaccggttccctcggcttggatattgccttgggtgtgggcggcctgccccgtggccgtattgtcgaagtgtatggaccagaatcctccggcaaaaccaccatggccctgcatgtggccgcagaaattcagaaagtgggtggggtggccgctttcgtcgatgccgagcatgcactggatcctatctatgcgcgcaagttgggtgtcaatgtggatgagctgatcatctcccagcccgataccggggaacaggccctggaaattaccgatatgctggtacgctctggcgcggtggacttggtggtggtggactcggtggcggcgctgacgccacgggccgagttggaaggggagatgggggactctcacgtgggtctacaagcccgtctgatgtcccaagcgctgcgcaaattaaccggtagcattagccggtcgagctcattggtgctgtttattaaccagatccgtatgaaaatcggtgtcatgtttggtagcccagagaccaccaccggggggaatgccctcaagttctatgcctcggtacgtctggatattcgccgcattggctccattaaggataaagaagaggtggtgggcaaccgcacccgcgtcaaagtggtaaaaaataaaatggcccctcccttccgccagtgcgaatttgatatcacctatggacagggggtctctctgcatggcgaactgctggatatgggcgtggagatgggcgtggtcgaaaagtccggcgcttggtactcctatgacggtgagcgcatcggccaaggccgagaaaatgccaaacgctacatggcagaaaaccccagtgcagccatgaaactggaagatcaaatccgtcttaaagagggcttaagcgctaaacatggtgcgggccaaagccccgcaaccgaaaccaaaggcgtgcccagccccaagagtggttcctctgccaaaggctcgtcgagagcagccaaagccgccgcagccgaagaggattcaaccgaagatagctttgccgacgatgcctaa

SEQ ID NO: 100192 - protein, 390 aa, Magnetococcus sp. MC-1
MRLPSKGNIMALDKDKSKALDAALAQIERQFGKGSIMRMSEGAATDIPVVSTGSLGLDIALGVGGLPRGRIVEVYGPESSGKTTMALHVAAEIQKVGGVAAFVDAEHALDPIYARKLGVNVDELIISQPDTGEQALEITDMLVRSGAVDLVVVDSVAALTPRAELEGEMGDSHVGLQARLMSQALRKLTGSISRSSSLVLFINQIRMKIGVMFGSPETTTGGNALKFYASVRLDIRRIGSIKDKEEVVGNRTRVKVVKNKMAPPFRQCEFDITYGQGVSLHGELLDMGVEMGVVEKSGAWYSYDGERIGQGRENAKRYMAENPSAAMKLEDQIRLKEGLSAKHGAGQSPATETKGVPSPKSGSSAKGSSRAAKAAAAEEDSTEDSFADDA

SEQ ID NO: 100193 - DNA, 1074 bp, Shewanella sp. ANA-3
  CDS (1)..(1074): transl_table=11
atgaaagtcgatccaaacaaagagaaagcacttgctgcggtattgagccaaattgaaaagcaatttggtaaaggctccatcatgaagctgggcgaagaccgctctatggatgttgagactatttctactggttcactttcccttgacgtcgccttaggggctggcggtttaccaatgggacgtatcgttgagatctatggtcccgaatcatcaggtaaaacgacgctgacattagaagtgattgccgctgctcagcgcgaaggtaaaacctgtgcctttatcgatgccgagcacgcgctagaccctatctatgctaaaaagttaggcgtagatatcgataacttactgtgttcacaacccgataccggcgaacaagcccttgagatctgtgatgcgttaacccgttctggcgcggtagatgtgatcatcgttgactcggttgcggcattaacacccaaagcagaaattgaaggtgaaattggtgactcacacatgggcctagcggcgcgtatgatgagccaagcgatgcgtaagctcgcgggtaacctcaagcaatcgaatacactattaatcttcattaaccaaattcgtatgaagattggtgtgatgtttggtaacccagaaaccacaacgggcggtaacgcgctgaagttctacgcttctgttcgtctcgatattcgccgtactggtgctatcaaagaaggcgatgaagtggtgggtaacgagacgcgcgttaaagtggttaaaaacaaggttgccgcgccgtttaaacaagctgagttccaaattctttacggtcaaggtatcaaccgtactggtgagttagtcgatttaggtgttgcccataaactgattgaaaaagccggtgcatggtacagctacaagggtgacaagattggtcaaggtcgtgcaaatgccggtaaatatctgactgaaaacccagcaattgccgctgaaatcgataaaacactgcgtgagttactgctgagtaacccaagcgctatgtcttcatcttcatctgatgatgaaaacagcgaaggcaatgttgatttcgaaacaggcgaagtattctga

SEQ ID NO: 100194 - protein, 357 aa, Shewanella sp. ANA-3
MKVDPNKEKALAAVLSQIEKQFGKGSIMKLGEDRSMDVETISTGSLSLDVALGAGGLPMGRIVEIYGPESSGKTTLTLEVIAAAQREGKTCAFIDAEHALDPIYAKKLGVDIDNLLCSQPDTGEQALEICDALTRSGAVDVIIVDSVAALTPKAEIEGEIGDSHMGLAARMMSQAMRKLAGNLKQSNTLLIFINQIRMKIGVMFGNPETTTGGNALKFYASVRLDIRRTGAIKEGDEVVGNETRVKVVKNKVAAPFKQAEFQILYGQGINRTGELVDLGVAHKLIEKAGAWYSYKGDKIGQGRANAGKYLTENPAIAAEIDKTLRELLLSNPSAMSSSSSDDENSEGNVDFETGEVF

SEQ ID NO: 100195 - DNA, 1044 bp, Mycobacterium sp. KMS
  CDS (1)..(1044): transl_table=11
atggcaccgcaggcacccgatcgcgagaaggccctcgaactggcgctcgcgcagatcgagaagagtcacggtaaaggctcggtgatgcggctcggcgacgaggtgcgcgcgccgatctcggtcatcccgaccggctccatcgccctggacgtggcgctgggcatcggcggcctgccgcgcggccgcgtcatcgagatctacggtccggagtcctcgggtaagaccaccgtcgcattgcacgcggtggccaacgcccaggccgccggcggcatcgcggcgttcatcgacgccgagcacgcgctggatcccgactacgccaagaagctcggggtggacaccgactcgctgctggtctcccagcccgacaccggtgagcaggctctcgagatcgccgacatgctgatccgctccggtgcgctggacatcctggtcatcgactcggtcgccgcactggtgccccgcgccgagatcgagggtgagatgggcgacagtcacgtcggtctgcaggcccggttgatgagccaggcgctgcgcaagatcaccggcgcgctgagcaattcgggcaccaccgcgatcttcatcaaccagctccgcgagaagatcggcgtgatgttcggctctcccgagaccaccacgggcggtaaagcgctgaagttctatgcctcggtccgcatggatgtccgccgcatcgagaccctcaaggacggcaccgacgcggtgggtaaccgcacccgggtcaagatcgtcaagaacaaggtgtcgccgccgttcaagcaggccgaattcgacatcctctacggcaagggcatcagcaaggaaggctcgctcatcgacatgggcgtggagcacggcttcatccgcaagtccggttcctggttcacctacgagggggagcagttgggtcagggcaaggagaacgcccgtaagttcctgctggagaacggcgatgtggccaacgagatcgagaagaagatcaaagagaagctcaacatcggtgccgtggtgaccgctgatgacgtccttcccgcacccgtcgacttctga

SEQ ID NO: 100196 - protein, 347 aa, Mycobacterium sp. KMS
MAPQAPDREKALELALAQIEKSHGKGSVMRLGDEVRAPISVIPTGSIALDVALGIGGLPRGRVIEIYGPESSGKTTVALHAVANAQAAGGIAAFIDAEHALDPDYAKKLGVDTDSLLVSQPDTGEQALEIADMLIRSGALDILVIDSVAALVPRAEIEGEMGDSHVGLQARLMSQALRKITGALSNSGTTAIFINQLREKIGVMFGSPETTTGGKALKFYASVRMDVRRIETLKDGTDAVGNRTRVKIVKNKVSPPFKQAEFDILYGKGISKEGSLIDMGVEHGFIRKSGSWFTYEGEQLGQGKENARKFLLENGDVANEIEKKIKEKLNIGAVVTADDVLPAPVDF

SEQ ID NO: 100197 - DNA, 1047 bp, Neisseria meningitidis FAM18
  CDS (1)..(1047): transl_table=11
atgtcagacgacaaaagcaaagcacttgccgccgcactggcgcaaatcgaaaaaagtttcggcaaaggcgccatcatgaaaatggacggcagccagcaggaagaaaacctcgaagtcatttccaccggatcgctcggattagacctcgccctcggagtcggcggtctgccgcgcgggcgcatcgtcgaaatcttcggcccagaatcctccggcaaaaccaccctctgcctcgaagccgtcgcccaatgccagaaaaacggcggcgtgtgcgcctttgtcgatgccgaacacgccttcgatcccgtttacgcccgcaaactcggcgtaaaagtcgaagagctttacctgtcccagcccgataccggcgaacaggctttggaaatctgcgacacactcgtccgttcgggcggcatagatatggtagtcgtcgattccgtagccgcactcgtccccaaagccgaaatcgaaggcgatatgggggacagccatgtcggactgcaggcgcgcctgatgagccaggctttgcgcaaactgaccggacacatcaaaaaaaccaacacgctggttgtgttcatcaaccaaatccggatgaagatcggcgtaatgttcggcagccccgagaccacgaccggcggcaacgcgctgaaattctattcttccgtccgcctcgacatccgccgcaccggatccatcaaaaaaggtgaagaagtattgggcaacgaaacccgcgtcaaagtcatcaaaaacaaagtcgcgccgccgttccgtcaggcagagtttgacatcctctacggagaaggcatcagttgggaaggcgaattgatcgacatcggcgtgaaaaacgacatcatcaacaaatccggcgcgtggtacagctacaacggcgcgaaaatcggtcagggcaaagacaacgtccgcgtctggctgaaggaaaatcccgaaattgccgacgaaatcgacgcaaaaatccgcgccctcaacggcatagaaatgcacatcaccgaagggacgcaggacgaaaccgacggcgaacgccccgaagaataa

SEQ ID NO: 100198 - protein, 348 aa, Neisseria meningitidis FAM18
MSDDKSKALAAALAQIEKSFGKGAIMKMDGSQQEENLEVISTGSLGLDLALGVGGLPRGRIVEIFGPESSGKTTLCLEAVAQCQKNGGVCAFVDAEHAFDPVYARKLGVKVEELYLSQPDTGEQALEICDTLVRSGGIDMVVVDSVAALVPKAEIEGDMGDSHVGLQARLMSQALRKLTGHIKKTNTLVVFINQIRMKIGVMFGSPETTTGGNALKFYSSVRLDIRRTGSIKKGEEVLGNETRVKVIKNKVAPPFRQAEFDILYGEGISWEGELIDIGVKNDIINKSGAWYSYNGAKIGQGKDNVRVWLKENPEIADEIDAKIRALNGIEMHITEGTQDETDGERPEE

SEQ ID NO: 100199 - DNA, 1122 bp, Acidovorax sp. JS42
  CDS (1)..(1122): transl_table=11
atggacgccaccgtcaaaggcaacgcaaccgccgtcaacagcgaaaaggccaaggccctgcaagccgccctcgcgcagatcgaaaagcagttcggcaagggcaccatcatgcgcctgggcgagggcgaggccattgaggacatccaggtggtctccaccggctcgctgggcctggacatcgccctgggcgtgggcggcctgccgcgcggccgcgtgatcgagatctacggaccggaaagctcgggcaagaccacgctcacgctgcaggtcatcgccgagatgcagaagcaaggcggccagtgcgctttcgtggatgccgagcatgcgctggatgtgcagtacgccagcaagctcggcgttcagctcaccgacctgctcatcagccagccggacacgggcgagcaggcgctggagatcgtggacagcctggtgcgctcgggtgccgtggacctgatcgtggtggactcggtcgccgccctcacgcccaaggccgaaatcgagggcgagatgggcgacgccctgcccggcctgcaggcacgcctgatgagccaggcgctgcgcaagctcaccgccaccatcaagaagaccaactgcatggtcatcttcatcaaccagatccgcatgaagatcggcgtgatgttcggcagccccgagaccaccaccggcggcaacgcgctgaagttctacgcctcggtgcgcctggacatccgccgtaccggcaccatcaagaagggcgacgaggcgatcggcaacgagaccaaggtgaaggtggtgaagaacaaggtctcgcccccgttcaagacggccgaattcgacatcctgttcggcgagggcatctcgcgcgagggcgagatcatcgacatgggcgtgaacgcgcgcatcctggaaaagagtggcgcctggtatgcctacaacggcgaaaagatcggccagggccgcgacaacgcccgcgagttcctgcgcgagaaccctggcctggccgtggagatcgagaacaaggtgcgcgaaagcctgggcatcgcactgctgcccacgggccacgcgagcccggcggccgatctgcccgaagacaagcctgcgcgcggcaagaaggccgacaagacgggcgagatcgaggcgtaa

SEQ ID NO: 100200 - protein, 373 aa, Acidovorax sp. JS42
MDATVKGNATAVNSEKAKALQAALAQIEKQFGKGTIMRLGEGEAIEDIQVVSTGSLGLDIALGVGGLPRGRVIEIYGPESSGKTTLTLQVIAEMQKQGGQCAFVDAEHALDVQYASKLGVQLTDLLISQPDTGEQALEIVDSLVRSGAVDLIVVDSVAALTPKAEIEGEMGDALPGLQARLMSQALRKLTATIKKTNCMVIFINQIRMKIGVMFGSPETTTGGNALKFYASVRLDIRRTGTIKKGDEAIGNETKVKVVKNKVSPPFKTAEFDILFGEGISREGEIIDMGVNARILEKSGAWYAYNGEKIGQGRDNAREFLRENPGLAVEIENKVRESLGIALLPTGHASPAADLPEDKPARGKKADKTGEIEA

SEQ ID NO: 100201 - DNA, 1068 bp, Haemophilus somnus 2336
  CDS (1)..(1068): transl_table=11
atggcaaccccagaagaaaaagcaaaagcacttgaagccgctctaggacaaattgagaaacaatttggtaagggtgcaattatgaaattaggggaaacccaaaaactggatattgaagcaatttcaaccggctcacttagtttggatgttgctttaggtatcggcggcttaccaatgggacgtattgttgaaatttttggccccgagtcctcaggcaaaacgacattaacactatcggttatcgcacaagcacaaaaagcaggtaaaacctgtgcatttattgatgcagaacacgcacttgatccaatttatgcggctaaattaggtgttgacgttaaagagttattaatttctcaaccggataacggagagcaagcactggaaatctgtgatgctctcgttcgttccggtgcggtagacgttgtgattgttgactctgttgccgctttaacaccgaaagcagaaattgaaggtgaaatgggtgatactcatgttggtttacaagcaagacttatgtcacaagcattacgcaaattaacggggcagatcaaaaactcaaattgtttggtcgtctttatcaaccaaattcgcatgaaaattggtgttgtttttggtaatccagaaactaccacaggcggtaatgctttaaaattctacgcttctgttcgtcttgatattcgtcgtgttggcagtatcaaaaatggtgatgaagtcattggtaatgaaactcgtgtaaaagtggttaaaaataaagtcgcacctccgttccgccaagttgatttccaaattttatacggtgagggtatttcaagaaatggtgaacttattgaacttggcgtaaaacataagttagtaaataaatccggtgcttggttctcctatgagggcgaaaaaattggtcaagggaaaacaaatgcgatgaaatggttagctgaacatcctgagcaagctgctattttagagcaaaaattacgttcagaattattagcaaatccggaaaaagcactattagcggatcttgaagctgaatcagaatcaaacatatctgaagttgaaagtgatttttaa

SEQ ID NO: 100202 - protein, 355 aa, Haemophilus somnus 2336
MATPEEKAKALEAALGQIEKQFGKGAIMKLGETQKLDIEAISTGSLSLDVALGIGGLPMGRIVEIFGPESSGKTTLTLSVIAQAQKAGKTCAFIDAEHALDPIYAAKLGVDVKELLISQPDNGEQALEICDALVRSGAVDVVIVDSVAALTPKAEIEGEMGDTHVGLQARLMSQALRKLTGQIKNSNCLVVFINQIRMKIGVVFGNPETTTGGNALKFYASVRLDIRRVGSIKNGDEVIGNETRVKVVKNKVAPPFRQVDFQILYGEGISRNGELIELGVKHKLVNKSGAWFSYEGEKIGQGKTNAMKWLAEHPEQAAILEQKLRSELLANPEKALLADLEAESESNISEVESDF

SEQ ID NO: 100203 - DNA, 1131 bp, Actinobacillus pleuropneumoniae serovar 1 str. 4074
  CDS (1)..(1131): transl_table=11
atggcatcggataacaaaaaagcgcaaaagaacacagtaacaaaacaaatcgatccggaacaaaaagaaaaagcattagctgctgctcttgcccaaattgaaaaacaatttggtaaaggttctattatgcgcttaggcgacacgcaagcgcttgatattgaagcggtttcaaccggttcaatcggtttagacgccgcattaggtatcggtggcttaccgatgggacgtatcgttgagatctatgggccggaatcttcaggtaaaacgacgctgactttatcggtcattgcgcaagcacaaaaatcaggtaaaacttgtgcgtttattgatgcggaacacgcgcttgatccggtttatgcacgtaaattaggcgtggataccgatgcattgttaatttcacaaccggataacggtgaacaagcgctcgagatttgtgatgcgttggttcgttccggtgcggttgatgtaattattgtggactcggttgctgcattaacgccgaaagcggaaattgaaggcgatatgggcgattctcatatgggcttacaagcacgtttaatgtcacaagcgttacgtaaattaacggcaaacattaaggcgactaactgcttagtggtgtttatcaaccaaattcgtatgaagatcggtgtgatgttcggtaaccctgaaacaacaaccggcggtaacgcacttaaattctacgcttcggttcgtttagatattcgtcgttcaggtgtagtaaaagacggagatgaagtggtcggtagcgaaacgaaagtgaaaattgtgaaaaataaagttgcgccgccgttccgtgaagttcaattcgacattatgtatggtgaaggtatttcacgtatgaatgaactattaattcttgccgaagcgaatggctttatccaaaaagcgggtgcatggttctcatacgaaggtacgaaaatcggtcaaggtaaaaataatgcaattaaatggttaaaagaaaatccggagattgcagagaaaattgaacaagatattcgtgagcaacttatttcaacaccggaaaaaacatcggcaggtgaacaaaatgtgctagatgccgatgatgtgaatgactttgaagacgaagcgtttaacgaagaagaactataa

SEQ ID NO: 100204 - protein, 376 aa, Actinobacillus pleuropneumoniae serovar 1 str. 4074
MASDNKKAQKNTVTKQIDPEQKEKALAAALAQIEKQFGKGSIMRLGDTQALDIEAVSTGSIGLDAALGIGGLPMGRIVEIYGPESSGKTTLTLSVIAQAQKSGKTCAFIDAEHALDPVYARKLGVDTDALLISQPDNGEQALEICDALVRSGAVDVIIVDSVAALTPKAEIEGDMGDSHMGLQARLMSQALRKLTANIKATNCLVVFINQIRMKIGVMFGNPETTTGGNALKFYASVRLDIRRSGVVKDGDEVVGSETKVKIVKNKVAPPFREVQFDIMYGEGISRMNELLILAEANGFIQKAGAWFSYEGTKIGQGKNNAIKWLKENPEIAEKIEQDIREQLISTPEKTSAGEQNVLDADDVNDFEDEAFNEEEL

SEQ ID NO: 100205 - DNA, 1257 bp, Bifidobacterium longum DJO10A
  CDS (1)..(1257): transl_table=11
atggcatgtccgtcatacggtggaggcatccgattcgcacacgacttcgacaaggagaagatcatggcacttgagaccaagccggccaaggacccggcagccgaggacaagcacgagctcgatcccaagcgcaaggcggcgctggacaccgcgctggcgcaggtcgagaagagttttggcaaaggttccgcaatgcgactgggcgaccagcccgagcagaacgtcgaggtgattcccaccggttcgttggctctcgatatggcgctcggcatcggcggcctacccaagggccgcatcgtggagatctacggccccgaatcatccggtaagaccacgctcgcattgcatgtggtggccaatgcccagaagaagggcggcgtggcggcctacatcgatgccgaacacgcgctcgacccggcctacgcccgcaagctcggcgtggacaccgactcactcatcgtctcccagccggataacggcgagcaggccctcgaaatcgctgacatgctgattcgctccggtgcgcttgacgtcatcgtcatcgactcggtcgccgctttggtgccgaaggccgaaatcgaaggcgaaatgggagacagccatgttggtttgcaggcccgactcatgagtcaggcgctgcgcaagatgaccggcgcgttggctcaggccggcaccaccgccatcttcatcaaccagctgcgtgagaagatcggcgtgttcttcggcaaccctgaaaccaccaccggtggtaaagctctgaagttctacgcctccgtgcgtctcgacatccgccgcatccagaccttgaagaacggcgacgaagcggtgggcaaccgcacgcgcgtcaaggtggtcaagaacaagatggccccgcctttcaagtccgccgaattcgacatgctctacggtgaaggcatttcccgtgagggctcggtgatcgacatggcccagcaggttggcgtggttaagaagtccggttcgtggttcacctatgagggtgatcagctcggtcagggacgagagaaggtccgtcagttccttaaggacaacccggccatcaccgaggagattgagaacaaggtcaaggccgagttcggtctgatcggttccgccgatcagttcgcggaagatggcgaagccgcagcagcggccgccgtcagcgaggctgctgcggctgacgtggccaaggacagcaaggccgcagcggcgcctgctgccaaaacgacccgtgccaaggccggcacagctaaggcctga

SEQ ID NO: 100206 - protein, 418 aa, Bifidobacterium longum DJO10A
MACPSYGGGIRFAHDFDKEKIMALETKPAKDPAAEDKHELDPKRKAALDTALAQVEKSFGKGSAMRLGDQPEQNVEVIPTGSLALDMALGIGGLPKGRIVEIYGPESSGKTTLALHVVANAQKKGGVAAYIDAEHALDPAYARKLGVDTDSLIVSQPDNGEQALEIADMLIRSGALDVIVIDSVAALVPKAEIEGEMGDSHVGLQARLMSQALRKMTGALAQAGTTAIFINQLREKIGVFFGNPETTTGGKALKFYASVRLDIRRIQTLKNGDEAVGNRTRVKVVKNKMAPPFKSAEFDMLYGEGISREGSVIDMAQQVGVVKKSGSWFTYEGDQLGQGREKVRQFLKDNPAITEEIENKVKAEFGLIGSADQFAEDGEAAAAAAVSEAAAADVAKDSKAAAAPAAKTTRAKAGTAKA

SEQ ID NO: 100207 - DNA, 1044 bp, Exiguobacterium sibiricum 255-15
  CDS (1)..(1044): transl_table=11
gtgagtgatcgtaaagcagcacttgaaatggcattgcgtcagattgagaaacaatttggtaaaggttcaatcatgaaactaggtgaaagtgcagatcagagagtatccgtaatctcttctggatcaatcacattagatatagcactcggtgcaggtggatatccacgtggacgggtaatcgaagtctatggtccggaatcttccggtaaaacgacagtttcgcttcatgcgattgctgaagtccaaaaacaaggcggacaggcggcattcatcgatgccgagcacgcacttgatccggcttatgccagcaaactcggtgtcaacattgacgaattactgttatcacaaccggatacaggagagcaggcgcttgaaatcgcagaggcattagtccgttctggtgctgttgatatcctcgtcgtcgactcagtagcggcacttgtcccgaaagccgagatcgaaggcgaaatgggtgactcgcacatgggtctccaggctcgtttgatgagtcaggcgttgcgtaaattgtccggtgcgacaaacaaatccaaaacaatcgtcatcttcatcaaccagattcgtgaaaaaatcggtgtcatgttcggtaacccggaaacgactccaggtggacgtgccttgaaattctattcatcggtccgtcttgaagtccgtcgtgcagaagcactgaaaaacggaacagatatcgtcggaaaccggacgaaactgaaagtcgttaaaaacaagatcgctccgccgttcaaacaagcggaagtcgacatcatgtacggacaaggaatctctaaattcggcgagttgattgatcttggaacagatctcgatatcgtccaaaaaagtggtgcttggtattcatacaattcagagcgtcttggtcaaggacgtgaaaatgcgaaacaatacatgattgaacatccggatgttgcggatgaggtcgaacgattgattcgtgaacatcacggtctcgtcgaccggaaagaaccggttgactttgaagaaggtcaagacgaagatctgtttgcagaataa

SEQ ID NO: 100208 - protein, 347 aa, Exiguobacterium sibiricum 255-15
MSDRKAALEMALRQIEKQFGKGSIMKLGESADQRVSVISSGSITLDIALGAGGYPRGRVIEVYGPESSGKTTVSLHAIAEVQKQGGQAAFIDAEHALDPAYASKLGVNIDELLLSQPDTGEQALEIAEALVRSGAVDILVVDSVAALVPKAEIEGEMGDSHMGLQARLMSQALRKLSGATNKSKTIVIFINQIREKIGVMFGNPETTPGGRALKFYSSVRLEVRRAEALKNGTDIVGNRTKLKVVKNKIAPPFKQAEVDIMYGQGISKFGELIDLGTDLDIVQKSGAWYSYNSERLGQGRENAKQYMIEHPDVADEVERLIREHHGLVDRKEPVDFEEGQDEDLFAE

SEQ ID NO: 100209 - DNA, 1047 bp, Kineococcus radiotolerans SRS30216
  CDS (1)..(1047): transl_table=11
atgcccgctcctgcggaccgcgagaaggccctcgacgccgccctcgcagcgatcgacaagaacttcggcaagggctcggtcatgcggctgggcgacgaggtccgtccgccgatcgaggtcatcccgaccggctccatctccctggacgtcgccctcggcatcggcggcctgccccgcggtcgcgtggtggagatctacggcccggagtcctcgggcaagacgaccgtcgccctgcacgccgtggccagcgcccagaaggccggcggcatcgccgccttcatcgacgccgagcacgccctcgacccggactacgcggccaagctgggcgtcgacaccgacgcgctgctggtctcccagcccgacacgggggagcaggcgctggagatcgcggacatgctgatccgctccggcgccctcgacatcatcgtcatcgactccgtcgcggccctcgtgcccaaggccgagatcgagggcgagatgggcgacagccacgtcggtctgcaggcccgcctgatgtcgcaggccctgcgcaagatcaccggtgcgctgaaccactccggcaccacggccatcttcatcaaccagctgcgcgagaagatcggcgtcatgttcggctcgcccgagacgacgacgggcggcaaggcgctgaagttctacgcctcggtccgcctcgacgtccgccggatcgagacgctcaaggacgggacgaaccccgtcggcaaccggacccgcgtcaaggtcgtcaagaacaaggtcagcccgcccttcaagcaggccgagttcgacatcatctacggccagggcatctcccgcgagggtgggctcatcgacctcggcgtcgagcacggcttcgtgcgcaagtccggcgcctggtacacctacgagggcgatcagctcggccagggcaaggagaacgcccgcgccttcctgcgcgacaaccccgacctcggcgacgagatcgagaagcgcatcaaggagaagctcggcatcggcgcccgcctggacgccccggccgaggtcgacgtcgaggagaaggtcgacttctga

SEQ ID NO: 100210 - protein, 348 aa, Kineococcus radiotolerans SRS30216
MPAPADREKALDAALAAIDKNFGKGSVMRLGDEVRPPIEVIPTGSISLDVALGIGGLPRGRVVEIYGPESSGKTTVALHAVASAQKAGGIAAFIDAEHALDPDYAAKLGVDTDALLVSQPDTGEQALEIADMLIRSGALDIIVIDSVAALVPKAEIEGEMGDSHVGLQARLMSQALRKITGALNHSGTTAIFINQLREKIGVMFGSPETTTGGKALKFYASVRLDVRRIETLKDGTNPVGNRTRVKVVKNKVSPPFKQAEFDIIYGQGISREGGLIDLGVEHGFVRKSGAWYTYEGDQLGQGKENARAFLRDNPDLGDEIEKRIKEKLGIGARLDAPAEVDVEEKVDF

SEQ ID NO: 100211 - DNA, 1044 bp, Xylella fastidiosa Dixon
  CDS (1)..(1044): transl_table=11
atggatgagaacaagaaacgcgccctttctgtcgctttaagccagattgaaaaacagttcggcaaggggtctgtgatgcggatgggcgatcgcgtgatcgaagccgtagaggcgatcccgacaggttcgctcatgttggatctggccttggggataggtggtttgccaaagggacgtgtcgtggaaatctatgggccggaatcttctgggaagaccacattgactttgcaggcgatcgctcaatgccagaagaagggaggtacagcagcgttcattgatgctgagcatgccttggatccgatttatgcgggcaagttaggcgtcaatgttgatgatttgttgttgtctcagccagatactggggagcaggctctggaaatcgctgacatgctggtgcgctcgggctcaatcgatatcatggttattgattcggttgcggcactcacgccaaaggcggagattgagggtgagatgggagatcagttgcccggtcttcaggcgcgattgatgagccaggcgctgcgtaaattgaccggcaatatcaagcgctctaatacgctagtgatttttatcaaccagttgcgtatgaaaattgggatcatgatgccgggtcaaagccctgaaactacgacagggggtaatgcgctgaagttctatgcttcagtgcgtttggatattcgccgtattggcgcgatcaagaagggtgacgaaattatcgggaatcaaaccaaaatcaaggttgttaaaaacaagttggcgcctcccttcaaacaagtcgtgactgagattctctatggtgaaggcatcagtcgtgaaggggaattgattgaaatgggcgtggaggccaagttggttgagaaagccggcgcttggtatagctatggtggtgagcggatcgggcaaggaaaagataatgcgcgtggctatctacgcgaaaacccgcatcttgcggccaagcttgaggctgatttgcgtgagaaatttgagccgaccgagctttctcgagaagagggcgatgaagatgcgctcgaagatgcaatgtaa

SEQ ID NO: 100212 - protein, 347 aa, Xylella fastidiosa Dixon
MDENKKRALSVALSQIEKQFGKGSVMRMGDRVIEAVEAIPTGSLMLDLALGIGGLPKGRVVEIYGPESSGKTTLTLQAIAQCQKKGGTAAFIDAEHALDPIYAGKLGVNVDDLLLSQPDTGEQALEIADMLVRSGSIDIMVIDSVAALTPKAEIEGEMGDQLPGLQARLMSQALRKLTGNIKRSNTLVIFINQLRMKIGIMMPGQSPETTTGGNALKFYASVRLDIRRIGAIKKGDEIIGNQTKIKVVKNKLAPPFKQVVTEILYGEGISREGELIEMGVEAKLVEKAGAWYSYGGERIGQGKDNARGYLRENPHLAAKLEADLREKFEPTELSREEGDEDALEDAM

SEQ ID NO: 100213 - DNA, 1071 bp, Sulfitobacter sp. EE-36
  CDS (1)..(1071): transl_table=11
atggcaacggcagatcttttgactatggacaacaagaaacaagctgaaaagcaaaaggccctggacagcgcgctggcacagattgaacgccagttcggcaaagggtcgatcatgaagctgggggccgaaggggccattcaggacatcaaggcgagctcgaccggttcgttagggctggatatcgcacttggtatcggcggtctgcccatggggcggatcatcgagatttatggcccggaatcctcgggtaagaccacattgaccctgcattgtgttgcggagcagcagaaaaacggcggcgtttgtgcctttgttgacgcggaacacgcgcttgatccgcaatacgcgcgcaaattgggcgttgatatcgacgagctgctgatttcccagcctgacaccggcgaacaagcgcttgaaattacggatacgttggtccgctccggtgcggtgaatatggtggtggtcgactccgttgcggccttgacgcccaaatccgagttggaaggcgatatgggcgacagctctgtcggggtgcaggcccgtctgatgagccaggccatgcggaaactgacaggctcgatctcgcggtcgaactgcatggtgattttcatcaaccagatccggatgaaaatcggcgtcatgttcgggtcgcccgaaacgacgaccggcgggaacgcgttgaaattctattcttccgtgcgtctggacatccgccgcattggcgcgctcaaggatcgtgacgaggtggtcggcaacgccacacgggtcaagatcgttaagaacaaggtggccgcaccattcaagcaggtcgaattcgacatcatgtatggggaagggatctccaagatgggcgagctgctggatcttggggtcaaggctggcgtggttgataaatcgggatcgtggttcagctatggcgatgaacggatcgggcaggggcgtgaaaacgccaagaccttcctgaaagaaaacaccgccatggcaaatgagatcgaagacaagatccgcgcggcccatgggctggacttcgacggctccgacagcgacgacgcggatatcctcgaagcgtaa

SEQ ID NO: 100214 - protein, 356 aa, Sulfitobacter sp. EE-36
MATADLLTMDNKKQAEKQKALDSALAQIERQFGKGSIMKLGAEGAIQDIKASSTGSLGLDIALGIGGLPMGRIIEIYGPESSGKTTLTLHCVAEQQKNGGVCAFVDAEHALDPQYARKLGVDIDELLISQPDTGEQALEITDTLVRSGAVNMVVVDSVAALTPKSELEGDMGDSSVGVQARLMSQAMRKLTGSISRSNCMVIFINQIRMKIGVMFGSPETTTGGNALKFYSSVRLDIRRIGALKDRDEVVGNATRVKIVKNKVAAPFKQVEFDIMYGEGISKMGELLDLGVKAGVVDKSGSWFSYGDERIGQGRENAKTFLKENTAMANEIEDKIRAAHGLDFDGSDSDDADILEA

SEQ ID NO: 100215 - DNA, 1059 bp, Roseovarius nubinhibens ISM
  CDS (1)..(1059): transl_table=11
atggacagcaagcgtaaccccgacaagcaaaaggcgctggacagcgccctggcgcagatcgagcggcaatttggcaagggctcgatcatgaagctcggggccgacaacccggttcaggagatcgaggccacctcgaccggctcgctcgggctcgacatcgcgctcgggatcggcggcctgcccaaggggcggatcatcgaaatttacgggcccgaaagctcgggcaaaaccacgctgacactgcattgcgtggccgaagagcagaaaaaaggcggcgtttgcgcctttgtcgacgcggaacatgcgctcgacccgatctatgcgcggaaacttggcgtcgatctcgatgaattgctgatctcgcagcccgacaccggggaacaggcgctcgagattgtcgatacgctcgtccgctcgggcgcggtgagcatggttgtggtcgactcggttgcggcgctgacgccgaaatccgagcttgaaggtgacatgggcgacagcaatgtcggcgtgcaggcgcggctcatgagccaggcgatgcgcaagctgaccggctcgatcagccggtcgaaatgcacggtgatcttcatcaaccagatccgcatgaaaatcggcgttatgttcggcagccccgagaccacgacgggcggcaatgcgctcaaattctacagctcggttcggctcgacattcgtcgcatcggcgcgctcaaggatcgtgacgaggtggtcggcaacgcgacccgcgtcaaggtcgtcaaaaacaaggtcgcgccgcccttcaagcaggtggaattcgacatcatgtatggcgaaggtatctcgaaaatgggcgagctgctcgatctcggggtcaaggccggggtggtcgagaaatccggcagctggttcagctatggcgacgagcggatcgggcaggggcgtgagaacgccaagaccttcctgaaggaaaacagcgccattgcgctggccatcgaggataaaattcgcgcggcccatgggctcgaattcgacatgcccgagatcgagaaacagggtgacgaggacgacatcctcgaaggctga

SEQ ID NO: 100216 - protein, 352 aa, Roseovarius nubinhibens ISM
MDSKRNPDKQKALDSALAQIERQFGKGSIMKLGADNPVQEIEATSTGSLGLDIALGIGGLPKGRIIEIYGPESSGKTTLTLHCVAEEQKKGGVCAFVDAEHALDPIYARKLGVDLDELLISQPDTGEQALEIVDTLVRSGAVSMVVVDSVAALTPKSELEGDMGDSNVGVQARLMSQAMRKLTGSISRSKCTVIFINQIRMKIGVMFGSPETTTGGNALKFYSSVRLDIRRIGALKDRDEVVGNATRVKVVKNKVAPPFKQVEFDIMYGEGISKMGELLDLGVKAGVVEKSGSWFSYGDERIGQGRENAKTFLKENSAIALAIEDKIRAAHGLEFDMPEIEKQGDEDDILEG

SEQ ID NO: 100217 - DNA, 1080 bp, Oceanicola batsensis HTCC2597
  CDS (1)..(1080): transl_table=11
atggcaacggcagatcttctctccatggatagcaagcgcgacgcgaacaagcagaaggcgctcgacagtgcgctggcccagatcgaacgccagttcggcaagggctcgatcatgaaactgggcggcgacaacccgttccgggacatcgaggcgacctcgaccggctcgctcgggctcgacatcgccctcgggatcggcggcctgcccaagggccggatcatcgagatctacggccccgaatcctcgggcaagacgacgctcaccctgcattgcgtggccgaggaacagaaaaagggcggcgtctgcgccttcgtcgacgccgaacacgcgctcgacccgcaatacgcaaggaaactgggcgtcgatctcgacgagctgctgatctcgcagcccgataccggcgaacaggcgctggaaatcaccgacacgctggtccggtccggcgccgtgtcgatggtgatcgtagattccgtcgccgccctgaccccgaaatccgagctcgagggcgacatgggcgacagttccgtcggcgtccatgcccggctgatgtcccaggccatgcgcaagctgaccgggtccatcgcgcgctcgaactgcatggtgatcttcatcaaccagattcgcatgaagatcggcgtcatgttcggctcgcccgagaccaccaccggcggcaatgcgctcaagttctattcctcggtccgcctcgacatccgccgcatcggcgcgatcaaggaacgcgacgaggtcgtgggtaaccagacacgcgtcaaggtcgtcaagaacaaggtcgcaccgcccttcaagcaggtggaattcgacatcatgtacggcgagggcatctccaagaccggcgaattgctggacctcggcgtcaaagccggggtggtcgagaaatccggctcctggtattcttacggcgacgagcgcatcggacagggccgcgagaacgccaaggtcttcctcagggaaaacggcgaaatcgcctatgccatcgaagacaagatccgcgccgcgcatggcctggacttcggcatcgagggcgagggcggcgacagcgcggacgacgtgctggacgcctga

SEQ ID NO: 100218 - protein, 359 aa, Oceanicola batsensis HTCC2597
MATADLLSMDSKRDANKQKALDSALAQIERQFGKGSIMKLGGDNPFRDIEATSTGSLGLDIALGIGGLPKGRIIEIYGPESSGKTTLTLHCVAEEQKKGGVCAFVDAEHALDPQYARKLGVDLDELLISQPDTGEQALEITDTLVRSGAVSMVIVDSVAALTPKSELEGDMGDSSVGVHARLMSQAMRKLTGSIARSNCMVIFINQIRMKIGVMFGSPETTTGGNALKFYSSVRLDIRRIGAIKERDEVVGNQTRVKVVKNKVAPPFKQVEFDIMYGEGISKTGELLDLGVKAGVVEKSGSWYSYGDERIGQGRENAKVFLRENGEIAYAIEDKIRAAHGLDFGIEGEGGDSADDVLDA

SEQ ID NO: 100219 - DNA, 1065 bp, Erythrobacter sp. NAP1
  CDS (1)..(1065): transl_table=11
atggctaccaatctcaagctcgtagagaaggaaaaagacgtggaccgtcaaaaggcgctcgacgccgcccttgcacagattgatcgcgctttcggcaagggctcggcgatgaagctcggctcgaaagaggcgatgcaggttgaatcgatttcgaccgggtcgctgggcctcgatattgctcttggtattggcggcctgcctaaaggccgcgtgatcgaagtctacggcccggaaagctcgggtaagacgacgctcgcactgcactgcattgcagaggctcagaaagccggcggtacggcggccttcgtcgatgccgagcatgcgcttgacccggtctatgcgaagaagctgggcgtcgacatcgacgaactggtcgtctcgcagcccgacacgggtgagcaggcactcgaaattaccgacacgctggtccgctcgaacgcggttgacgtgctggtggtcgactcggtcgcggcgcttgtcccgcgcgcagaaattgaaggcgagatgggcgattcccacgtcggcctgcaagcgcgcctgatgtcccaatctctgcgcaagctgaccgggtcgatcaatcgttccaagtgcatggtgatcttcatcaaccagctgcggatgaagatcggcgtcatgtacggcaaccccgaaactacgaccggcggtaacgcgctcaagttctacgcttcggttcgcctcgacattcgccgcaccggccagatcaaggaccgcgacgaggtgatcggcaactcgactcgcgtgaaagtggtcaagaacaaggtcgccccgccgttcaagcaggtcgaattcgacatcatgtatggcgaaggcatctccaagatcggcgagattctcgatctcggcgtgaaggccggcatcgtcgagaagtcgggcagctggtattcctatgacagcgtccgcatcggccagggccgcgagaatgccaagacctacctcaaggaaaatcctgaagtttgcgacaagttggaagccgccattcgcggtaaaaccgacgaggtcgccgaggaaatgatgacgggcccggacgcggataccgacagctga

SEQ ID NO: 100220 - protein, 354 aa, Erythrobacter sp. NAP1
MATNLKLVEKEKDVDRQKALDAALAQIDRAFGKGSAMKLGSKEAMQVESISTGSLGLDIALGIGGLPKGRVIEVYGPESSGKTTLALHCIAEAQKAGGTAAFVDAEHALDPVYAKKLGVDIDELVVSQPDTGEQALEITDTLVRSNAVDVLVVDSVAALVPRAEIEGEMGDSHVGLQARLMSQSLRKLTGSINRSKCMVIFINQLRMKIGVMYGNPETTTGGNALKFYASVRLDIRRTGQIKDRDEVIGNSTRVKVVKNKVAPPFKQVEFDIMYGEGISKIGEILDLGVKAGIVEKSGSWYSYDSVRIGQGRENAKTYLKENPEVCDKLEAAIRGKTDEVAEEMMTGPDADTDS

SEQ ID NO: 100221 - DNA, 1062 bp, Pseudoalteromonas tunicata D2
  CDS (1)..(1062): transl_table=11
atgaacgataataaagaaaaagcattaagcgcagcactatctcaaattgaacgccaatttggtaaaggttcaattatgaaattaggtgatagtcaggcacttgatattgaatctatttcaactggctcacttggtattgatattgcgctgggtataggtggtttacctgctggtcgtattgttgaaatttttggtcctgaatcgtcaggtaaaacaacgttaacgttacaagttattgcagaagcccagaaaaaaggcaaaacatgtgcctttattgatgctgaacatgcccttgaccctgtttatgctgaaaagttgggtgtaaatattaaagatttactggtatctcagcctgataccggtgagcaagcgcttgagatttgtgacatgttagtgcgctctggtgctgttgatgtggtgatcattgactcggtggcagcattaacaccaaaagctgaaattgaaggcgatatgggtgatcaccatgttggcttacaagctcgtttaatgtcacaagcattacgtaagctaactggtaatatcaaacgttcaaatactttagttatttttatcaaccaaatacgtatgaaaattggcgtgatgtttggtaatccagaaacaaccacaggtggtaatgcactgaagttttatgcttcagttcgtatcgatattcgtcgtaccggctctgttaaagagggtgatgaagtggtaggtaatgagacgcgtgtaaaaattgttaaaaacaaagttgcgccgccatttaaacaagcagaatttattattatgtatggagaaggtatctctaaacatggtgagctaattgatttgggtgttcagcacaaatttgttgaaaaagccggtgcatggtacagctatcagggtaataaagttggtcaaggtaaatcaaactcaattaaattcttaaaagaaaatccagcaattgctgatgaaattgaaaagaaattacgcgatatgttgttattaaaagcaacaattaaaccagaggatgggattgcaagtttagctgctgaagccgaaggtagcattgaagaagacttttaa

SEQ ID NO: 100222 - protein, 353 aa, Pseudoalteromonas tunicata D2
MNDNKEKALSAALSQIERQFGKGSIMKLGDSQALDIESISTGSLGIDIALGIGGLPAGRIVEIFGPESSGKTTLTLQVIAEAQKKGKTCAFIDAEHALDPVYAEKLGVNIKDLLVSQPDTGEQALEICDMLVRSGAVDVVIIDSVAALTPKAEIEGDMGDHHVGLQARLMSQALRKLTGNIKRSNTLVIFINQIRMKIGVMFGNPETTTGGNALKFYASVRIDIRRTGSVKEGDEVVGNETRVKIVKNKVAPPFKQAEFIIMYGEGISKHGELIDLGVQHKFVEKAGAWYSYQGNKVGQGKSNSIKFLKENPAIADEIEKKLRDMLLLKATIKPEDGIASLAAEAEGSIEEDF

SEQ ID NO: 100223 - DNA, 1050 bp, Photobacterium sp. SKA34
  CDS (1)..(1050): transl_table=11
atggacgacaacaaacaaaaggctcttgccgcagcgttaggccagattgagaagcagttcggtaaaggttcaatcatgaagttgggcgataaccgtacgatggatatcgaaaccatttcaaccggttcattatcgctagatattgcactgggagctggtggtctaccaatggggcgtattgttgaaatttacggtccagaatcatcaggtaaaacaaccttaacccttgaaacgattgcagcagctcagcgtaaaggaaaaacctgtgctttcatcgatgctgaacacgcacttgatcctatttatgcacagaaactaggtgttgatatcgatcagctattagtttctcagccagatacaggtgagcaagcgcttgaaatttgtgatgcattagcacgctctggtgctgttgatttaatcgttgttgactcagtagcagctctaacacctaaagctgaaatcgaaggtgaaatgggcgactcacacatgggtctgcaagcacgtatgctttcacaagcgatgcgtaagttaacgggtaaccttaagcagtcaaactgtatgtgtatcttcatcaaccagatccgtatgaagatcggtgtgatgtttggtaacccagaaactacgacaggtggtaatgcactgaagttctacgcttctgttcgtcttgatatccgccgtactggcgcaatcaaagaaggtgacgaagttgttggtaacgaaactcgtattaaagtagttaaaaataaaattgcagcaccgtttaagcaagctgaaactcaaattctttatggtcaaggtttcaaccgtaatggtgagctaattgatttaggcgttaagcataagctagtagaaaaagcgggtgcttggtatagttaccaaggtaataaaattggtcaaggtaaggcaaactcttgtaagtaccttgtagaaaatcctgcgattgccgctgaaattgagaaaaaattacgtgacttgctgctaacacctgtaactgagggggatcaagttgacgagaataaggctgatattaaagaagacgaagcattctaa

SEQ ID NO: 100224 - protein, 349 aa, Photobacterium sp. SKA34
MDDNKQKALAAALGQIEKQFGKGSIMKLGDNRTMDIETISTGSLSLDIALGAGGLPMGRIVEIYGPESSGKTTLTLETIAAAQRKGKTCAFIDAEHALDPIYAQKLGVDIDQLLVSQPDTGEQALEICDALARSGAVDLIVVDSVAALTPKAEIEGEMGDSHMGLQARMLSQAMRKLTGNLKQSNCMCIFINQIRMKIGVMFGNPETTTGGNALKFYASVRLDIRRTGAIKEGDEVVGNETRIKVVKNKIAAPFKQAETQILYGQGFNRNGELIDLGVKHKLVEKAGAWYSYQGNKIGQGKANSCKYLVENPAIAAEIEKKLRDLLLTPVTEGDQVDENKADIKEDEAF

SEQ ID NO: 100225 - DNA, 1041 bp, Oceanospirillum sp. MED92
  CDS (1)..(1041): transl_table=11
atggacgcgaatcgtaaaaaagcacttgatgcggcgttgagtcagattgaacgtcagtttggtaaaggcgcagtcatgcgtatgggtgatcagccacgtgaagcgattccatcagtttccacgggttctcttgggctggatattgctctgggtataggtggtcttccctatggtcgtatcgttgagatctatgggcctgaatcttctggtaaaaccacgctgacccttcaggttgttgctgaagcccagaaacagggtaagacatgtgcctttgttgatgcggagcatgctctagatccgatttatgctgaaaagcttggcgttgatgtggatagcttgctggtatcacagcctgatacgggtgagcaggcgctagaaattaccgatatgctggttcgttccaatgctgttgatgtgatcattgttgactcggtagcagcgctaacgccaaaagctgagattgaaggcgatatgggtgattcacacgtaggtctccaggctcgtttgatgtctcaggcgctacgtaagttaaccggtaatgttaaaagctctaactgtttgcttgtctttatcaaccagattcgtatgaaaatcggggttatgtttggcaaccctgaaacaacaacgggtggtaatgcactgaaattctactcttctgttcgtctggatattcgccgtacgggtgcaatcaaacaaggcgatgaagtggttggtaacgagacgcgagtaaaggttgttaagaataaggtgtcaccgccattcaggcaggctgagttccagatcatgtatggtcagggtatctatcacatgggcgaagtgatcgacctgggtgttaaagaaggacttgtggataagtcaggtgcttggtacgcctataatggcgataagattggtcagggtaaggccaatgcctctaaattcctggaagagaacccgcagatcgctaacgagatagaaacggaactacgcagtcgtttgctatctaacccactggataagcctgctgaagaagatgagtcagaaaacctggatctgatctaa

SEQ ID NO: 100226 - protein, 346 aa, Oceanospirillum sp. MED92
MDANRKKALDAALSQIERQFGKGAVMRMGDQPREAIPSVSTGSLGLDIALGIGGLPYGRIVEIYGPESSGKTTLTLQVVAEAQKQGKTCAFVDAEHALDPIYAEKLGVDVDSLLVSQPDTGEQALEITDMLVRSNAVDVIIVDSVAALTPKAEIEGDMGDSHVGLQARLMSQALRKLTGNVKSSNCLLVFINQIRMKIGVMFGNPETTTGGNALKFYSSVRLDIRRTGAIKQGDEVVGNETRVKVVKNKVSPPFRQAEFQIMYGQGIYHMGEVIDLGVKEGLVDKSGAWYAYNGDKIGQGKANASKFLEENPQIANEIETELRSRLLSNPLDKPAEEDESENLDLI

SEQ ID NO: 100227 - DNA, 1086 bp, Xanthobacter autotrophicus Py2
  CDS (1)..(1086): transl_table=11
atgactcagtcgacactcagactcgtcgaaggttcttccatggataagaccaaggcgctggatgccgctctctcccagatcgagcggcacttcggcaagggctcgatcatgcggctcggcaagggcggcaaagccttggaaatcgagagcgttcccaccggctcgctcgggctggacatcgccatcggcatcggcggcctgcccaagggccgcgtcgtggagatcttcgggccggaatcctccggcaagaccaccctggcgctgcacacggtcgcggaagcgcagaagcggggcggcacctgcgccttcatcgatgccgagcacgcgctcgaccccatctatgcgcgcaagctgggcgtcaatctcgacgacctgctcatctcccagcccgacgcgggcgagcaggcgctggaaatcgccgacacgctggtgcgctcgggcgccatcgacgtgctggtggtcgattcggtggccgcgctcaccccgcgcgccgaactggatggcgagatgggcgacagccagcccggcatgcaggcgcgcctcatgagccaggcgctgcgcaagctcacggcctccatctccaagtccaacaccatggtcatcttcatcaaccagatccggatgaagatcggcgtcatgtacggctcgccggagaccaccaccggcggcaatgcgctcaagttctacgcctcggtgcggctcgatatccgccgtatcggcatgatcaaggagcgcgacgaggtggtgggcaaccagacccgcgtgaaggtggtgaagaacaagctggcgccgcccttcaagcaggtggaattcgacatcatgtacggcgaggggatttccaagaccggcgaactgctggatctcggggtcaaggccggcgtggtggagaagtccggcgcctggttctcccacgacagccagcgcctcggccagggccgcgagaacgccaagaccttcctgaagcagaatcaggagattgccggccgcatcgaggcggcgatccgccagaatgcgggcctcatcgccgagaagatcctcgccggcacgccggaggatgacgccgacggcgacccggctgacgcctga

SEQ ID NO: 100228 - protein, 361 aa, Xanthobacter autotrophicus Py2
MTQSTLRLVEGSSMDKTKALDAALSQIERHFGKGSIMRLGKGGKALEIESVPTGSLGLDIAIGIGGLPKGRVVEIFGPESSGKTTLALHTVAEAQKRGGTCAFIDAEHALDPIYARKLGVNLDDLLISQPDAGEQALEIADTLVRSGAIDVLVVDSVAALTPRAELDGEMGDSQPGMQARLMSQALRKLTASISKSNTMVIFINQIRMKIGVMYGSPETTTGGNALKFYASVRLDIRRIGMIKERDEVVGNQTRVKVVKNKLAPPFKQVEFDIMYGEGISKTGELLDLGVKAGVVEKSGAWFSHDSQRLGQGRENAKTFLKQNQEIAGRIEAAIRQNAGLIAEKILAGTPEDDADGDPADA

SEQ ID NO: 100229 - DNA, 1023 bp, marine gamma proteobacterium HTCC2207
  CDS (1)..(1023): transl_table=11
atggacgcgaacaagtcaaaagcactagaagccgcactggggcaaatcgaacgccagtttggtaaaggaaccgtcatgcgcatgggtgagggtactcgccaagccattccggctatttctactggttctctgggactggatatcgcgcttggcattggcggcttgccaaaaggccgtattgttgaaatctatggtcccgagtcgtcgggtaaaaccactttgaccctgcaagtgattgccgaagcgcaaaaagcaggcggaacctgtgcctttatcgatgcggagcatgcactggatccggtttatgcagagaagttgggtgtcagtgttgacgacttgattgtttcgcagccggataccggcgagcaagcactggaagttaccgatatgttagtccgctctggtgcctgtgatgtactggtagtggattcggttgcggcattgaccccaagggcagaaattgaaggcgatatgggcgaccaccacgttggtctgcaagcccgactgatgtctcaggcgctgcgtaagttgaccggtaatattaaaaatgccaactgcctggttatctttatcaaccagattcgtatgaagattggtgtgatgtttggcaaccctgaaacaacgactggcggcaacgcgctgaagttttactcctcagtgcgtctggatatccgccgtattggtgcggttaaagatggcgacgagattgtcggcaatgaaactcgcgttaaggtggttaaaaataaagtggcgccgccgtttaagcagaccgaatttcagattctctatggccgcggcatcaaccgcaacggtgagctggttgatctaggtgttaaaaatggtttgatcgataaatccggtgcctggtatgcctataagggcagcaagattggtcaaggtaaagccaatgtaggtatttacctcactgaaaaccctgagattgcggctgagattgaagccatgatccgtgagaaagagatgggtggcccagcgcctgttgctaaagagtctgtcgagaagtaa

SEQ ID NO: 100230 - protein, 340 aa, marine gamma proteobacterium HTCC2207
MDANKSKALEAALGQIERQFGKGTVMRMGEGTRQAIPAISTGSLGLDIALGIGGLPKGRIVEIYGPESSGKTTLTLQVIAEAQKAGGTCAFIDAEHALDPVYAEKLGVSVDDLIVSQPDTGEQALEVTDMLVRSGACDVLVVDSVAALTPRAEIEGDMGDHHVGLQARLMSQALRKLTGNIKNANCLVIFINQIRMKIGVMFGNPETTTGGNALKFYSSVRLDIRRIGAVKDGDEIVGNETRVKVVKNKVAPPFKQTEFQILYGRGINRNGELVDLGVKNGLIDKSGAWYAYKGSKIGQGKANVGIYLTENPEIAAEIEAMIREKEMGGPAPVAKESVEK

SEQ ID NO: 100231 - DNA, 1083 bp, delta proteobacterium MLMS-1
  CDS (1)..(1083): transl_table=11
atggcagtagcgagcgcggacaaaggcaagaccctggacagcgccatcaatcagatccagaaacagttcggcaagggcgccatcatgcgcctgggggccgatgagcgggtggcggtgccggccatctccaccggcattttaagccttgatatcgcctgcgggatcggtggtattccctgcggccggatcaccgaaatttacggccccgaatcctcgggtaaaaccaccctggctttgcagatcatcgcctcatcccagcagcggggcggctcggtggccttcattgatgccgagcacgccctggatgtcacctacgccgagcggctgggggtcaacgccgacgagttgctggtcagtcagcccgattatggcgagcaggccctggagatcgccgaggtgctgatccgcagcgccgccgttgatgtcatcgtggtcgattcggtggcggccctgacccccaaggcggaaatcgacggtaacatcggcgactcccatgtcggcctccaggccaggctgatgtcccaggcgatgcgcaagctggccagcctgctgcaacggaccaataccgccatcatcttcatcaaccagttgcggatgaagatcggggtgatgttcggcaaccccgaaaccaccaccggcggcaacgccctgaagttttacagctccatgcggatcgatatccggcggatttccaccatcaaggatggcgatgaaatgatcggcaaccgggtcaaggctaagctggtcaagaacaaggtggcgccgcccttcaagattgccgagttcgatatcatcttcggggagggctcctcccgggagggggatctgctggatctggcggtgggtcagaacatcgtcgacaagagcggcgcctggtattcctacaacggtgagcggatcggccagggtcgggaaaattccaagacctatctgaaagagcatccggaaatggccgatgagatcgaaaccaaggtgcggctgggtttcggcctggccatgcccggccaggaagcggacaaggaacaggcggcggccaacgccgccaaggccgaaccgctggcgaaaaagggagacaaggcttaa

SEQ ID NO: 100232 - protein, 360 aa, delta proteobacterium MLMS-1
MAVASADKGKTLDSAINQIQKQFGKGAIMRLGADERVAVPAISTGILSLDIACGIGGIPCGRITEIYGPESSGKTTLALQIIASSQQRGGSVAFIDAEHALDVTYAERLGVNADELLVSQPDYGEQALEIAEVLIRSAAVDVIVVDSVAALTPKAEIDGNIGDSHVGLQARLMSQAMRKLASLLQRTNTAIIFINQLRMKIGVMFGNPETTTGGNALKFYSSMRIDIRRISTIKDGDEMIGNRVKAKLVKNKVAPPFKIAEFDIIFGEGSSREGDLLDLAVGQNIVDKSGAWYSYNGERIGQGRENSKTYLKEHPEMADEIETKVRLGFGLAMPGQEADKEQAAANAAKAEPLAKKGDKA

SEQ ID NO: 100233 - DNA, 1056 bp, Rickettsiella grylli
  CDS (1)..(1056): transl_table=11
atgagtgatgcaactaattcacgagaaaaagcccttaaaatggcattaagtcagattaaaaagcagcatggtgaaggtgctgttatgcgcttgggtgattcaagtcgggtttctgtcgatgtaatctccaccggatctttaggactcgatattgctttaggaataggagggctaccacgcgggcgtatcgttgaaatctatggtcctgaatcttcggggaaaacaacactgaccttacaaaccattgcggaatgccaaaaaatggggggggtcgccgcattcgttgatgctgaacatgcacttgatgcgaattatgccgaaaaattaggcgtaaaaaaagatgatcttcttgtttctcagccggataccggagaacaggcattagaaattgttgatatgttagttcgttctaatgcaattgacattattgtcgttgactcggttgccgcacttactccgcgggctgaaattgaaggagagatgggcgattcgcacatgggtttgcaagcgcgtttaatgtcacaagcgttacgtaaacttgcaggaaatattaaacgctccaatacgctcgttatttttattaatcaaattcgtatgaaaattggcgttatgtttggtaaccctgaaacaacaacaggtggaaatgcattaaaattttatgcgtcagtacgtcttgatatacgtcgtacgggttcaatcaaaaaaagtgacgaagtcatcgggaatgaaacacgagtcaaagtcgttaaaaataaagtggctccccccttcaaacaagctgaatttgaaattctttataatcaaggtatctgtcacagaggagaaatcgttgatctgggtgtcgcgcaagggttaattgataaagccggcgcatggtatagctatcaaggggaacggattggtcaaggtaaggacaatgtaaagcagtttttacgcgatcgcattgaactttgtcaacaaatagaaacagaaatccgaaaaaatttattgggtaactccactaaagagagtcgacgtgaaacgccagaattggaaactgaaatcattgaaccttaa

SEQ ID NO: 100234 - protein, 351 aa, Rickettsiella grylli
MSDATNSREKALKMALSQIKKQHGEGAVMRLGDSSRVSVDVISTGSLGLDIALGIGGLPRGRIVEIYGPESSGKTTLTLQTIAECQKMGGVAAFVDAEHALDANYAEKLGVKKDDLLVSQPDTGEQALEIVDMLVRSNAIDIIVVDSVAALTPRAEIEGEMGDSHMGLQARLMSQALRKLAGNIKRSNTLVIFINQIRMKIGVMFGNPETTTGGNALKFYASVRLDIRRTGSIKKSDEVIGNETRVKVVKNKVAPPFKQAEFEILYNQGICHRGEIVDLGVAQGLIDKAGAWYSYQGERIGQGKDNVKQFLRDRIELCQQIETEIRKNLLGNSTKESRRETPELETEIIEP

SEQ ID NO: 100235 - DNA, 1089 bp, Oceanobacter sp. RED65
  CDS (1)..(1089): transl_table=11
atggaccagaatcgccaaaaagccctagacgcggctcttagtcagattgaacgtcaattcggtaaaggcgccatcatgaaaatgggcgagcaaccccgtgaggcgattccttctgtatcaaccggttcactatcattggacattgctctaggtataggcggcttgccatttggtcgtatcgttgagatttatggtcctgagtcttctggtaaaaccaccatgtgtttgtccgccatggcagaagcgcaaaaggatggtaaaacggttgcgatcgttgatgcggagcatgccttagatccttcttatgcggaaaagctgggtgtggatcttgatagcctgttggtatctcaaccggatactggtgaacaagctctagagattgttgatagcctagtgcgctccaatgcggtggatctgattgttgttgactctgtggcagcgttaacaccaaaagcagaaattgaaggtgacatgggtgactcccacgtaggcttgcaggctcgtcttatgtcacaagcgttacgtaaactaacggcgaatgtaaaaaatgctaactgtatggtgatcttcattaaccagattcgtatgaagattggtgtgatgtttggtaaccctgaaaccacaaccggtggtaacgcacttaagttctactcttctgtccgcttggatattcgtcgcacaggtgctgttaagaacggtgacgaagtggtaggtaacgaaactcgcgttaaagtagtgaaaaacaaggttgctccaccgtttaaacaagcggaattccaaatcatgtataaccaaggtatcaaccgtcaggcggaaatcattgatttgggtgtgaagcttggtttagtggataagtctggtgcttggtacgcttacaagggcgataagattggtcagggtaaagccaatgcttgtgtctatcttcaggagaacccagaagttagtaaagaacttgaaaagcaaatccgtgatcaactgttagtggttgctaagccagcagaagaaaaagcggaagcggaagcacaagcggaagcgcctgctgcagaggcgaaacccgcaaaaaagactaaagcgaaagaagaagcatag

SEQ ID NO: 100236 - protein, 362 aa, Oceanobacter sp. RED65
MDQNRQKALDAALSQIERQFGKGAIMKMGEQPREAIPSVSTGSLSLDIALGIGGLPFGRIVEIYGPESSGKTTMCLSAMAEAQKDGKTVAIVDAEHALDPSYAEKLGVDLDSLLVSQPDTGEQALEIVDSLVRSNAVDLIVVDSVAALTPKAEIEGDMGDSHVGLQARLMSQALRKLTANVKNANCMVIFINQIRMKIGVMFGNPETTTGGNALKFYSSVRLDIRRTGAVKNGDEVVGNETRVKVVKNKVAPPFKQAEFQIMYNQGINRQAEIIDLGVKLGLVDKSGAWYAYKGDKIGQGKANACVYLQENPEVSKELEKQIRDQLLVVAKPAEEKAEAEAQAEAPAAEAKPAKKTKAKEEA

SEQ ID NO: 100237 - DNA, 1041 bp, Desulfitobacterium hafniense DCB-2
  CDS (1)..(1041): transl_table=11
atggccggtaacgataaattaaaagccctggatatggctttaagtcagattgaaaagcaatttggaaaagggtcgattatgagattgggggaggcttctgccaaaatggcggtggaagtgattccgacgggctgtctggccattgatatagcccttggggtgggtggagtgcccagggggcgtgttatagaaatctatggacctgagtcttccggtaagaccaccgttgcattgcatattgcggcagaagcccagaagctgggcggcgttgctgcttttatcgatgcggagcatgctcttgacccggtctatgccaaggccttaggggtcaacatcgacaatcttctggtatcccagccggatacaggggagcaggctctggagatttgcgaagctttagtgcgcagtggggctatcgacgtcattatcattgactctgtggcagctcttgttccccgggcagagattgaaggagaaatgggagattcccatgtgggtttacatgcccgcttaatgtctcaagccttgagaaaattgaccggtgccatcagtaagagcaatacctgcgttatctttatcaaccaaattcgggaaaaagtgggaattatgtttggtaatccagagaccacaaccggcggacgggctttgaagttctatgcctccgtccgtttggaagtacgccgtgcggataccctgaagcaaggtcaggatatgattggcaaccgtaccaaagtcaaggttgttaagaataaggtggctccgccctttaaacaagccgaatttgacattatgtacggagaaggtatttcccgtgaaggcagcatggtggatgtgggtgcggagttggatatcattaataagtccggggcttggtactcttataaaggtgagcgcttaggtcagggaagagagaatgtcaaggagtttctgaagaagaatcctgagattgccgccgaaatcgaacaagggatccgggccagcattgctaacgtaagcgctccggttgcagatgatgtccaagaggagccggaagacatctaa

SEQ ID NO: 100238 - protein, 346 aa, Desulfitobacterium hafniense DCB-2
MAGNDKLKALDMALSQIEKQFGKGSIMRLGEASAKMAVEVIPTGCLAIDIALGVGGVPRGRVIEIYGPESSGKTTVALHIAAEAQKLGGVAAFIDAEHALDPVYAKALGVNIDNLLVSQPDTGEQALEICEALVRSGAIDVIIIDSVAALVPRAEIEGEMGDSHVGLHARLMSQALRKLTGAISKSNTCVIFINQIREKVGIMFGNPETTTGGRALKFYASVRLEVRRADTLKQGQDMIGNRTKVKVVKNKVAPPFKQAEFDIMYGEGISREGSMVDVGAELDIINKSGAWYSYKGERLGQGRENVKEFLKKNPEIAAEIEQGIRASIANVSAPVADDVQEEPEDI

SEQ ID NO: 100239 - DNA, 1044 bp, Alteromonadales bacterium TW-7
  CDS (1)..(1044): transl_table=11
atgaacgataacaaacaaaaagcgttagacgctgcactatcacaaattgagcgtcaatttggtaaaggttcaatcatgaagctgggcgacaataaagccctgaacattgatgcagtatctacaggttcattagggatcgacattgctttaggcataggcggtttaccaatgggtcgtattgttgaagtatatggtcctgaatcttcaggtaaaacaacactgactttgcaagttatcgcacaagctcaaaaagaaggtaaaacatgtgcctttgttgatgctgagcatgctctagatcctgtatacgctcaaaagctaggtgttaacattgatgagctgttagtttctcaaccagatacgggtgagcaagcgttagaaatttgtgacatgttagtgcgttcaagtgctgtagatgttgtgattgtcgattcagttgcagccctaacacctaaagctgaaattgaaggcgacatgggcgactcgcacatgggcttacaagcacgtttaatgtcgcaagcattacgtaagcttacgggtaatattaaacgttcaaatacattatgtattttcattaaccaaattcgtatgaaaattggtgtaatgtttggtaacccagaaacaacaaccggtggtaacgcgcttaagttttacgcatcagttcgtattgatattcgtcgtattggttcggtgaaagaaggtgatgaagttgttggtaacgaaacgcgcgttaaaattgttaaaaacaaagtagcgcctccgtttaaacaagccgaatttatcatcatgtatggtgaaggtatttctaagcaaggcgagctaattgatttaggtgttaagcacaaaattgttgaaaaagcaggtgcttggtacagctacaatggtaacaaggtaggccaaggtaaaaacaattcaattaaattcttaaaagaaaacgtagaaattgcaaacgaaattgaaggcaaactacgcgatatgttattgcttaaagcaacaattgaaccagaagatggtgaagatgtacttggtgatgacgctgacctttaa

SEQ ID NO: 100240 - protein, 347 aa, Alteromonadales bacterium TW-7
MNDNKQKALDAALSQIERQFGKGSIMKLGDNKALNIDAVSTGSLGIDIALGIGGLPMGRIVEVYGPESSGKTTLTLQVIAQAQKEGKTCAFVDAEHALDPVYAQKLGVNIDELLVSQPDTGEQALEICDMLVRSSAVDVVIVDSVAALTPKAEIEGDMGDSHMGLQARLMSQALRKLTGNIKRSNTLCIFINQIRMKIGVMFGNPETTTGGNALKFYASVRIDIRRIGSVKEGDEVVGNETRVKIVKNKVAPPFKQAEFIIMYGEGISKQGELIDLGVKHKIVEKAGAWYSYNGNKVGQGKNNSIKFLKENVEIANEIEGKLRDMLLLKATIEPEDGEDVLGDDADL

SEQ ID NO: 100241 - DNA, 1059 bp, marine gamma proteobacterium HTCC2143
  CDS (1)..(1059): transl_table=11
atgattatggacactaacaaagaaaaagcgcttcaagccgcacttgcccagattgagcggcagtttggtaaaggttcgatcatgaaaatgggagaggaggcgagagaagctattcctgccatttctactggttcattgggcttggatgttgctctgggaataggtggtttaccgaaaggtcggatcgttgaaatttatgggccagagtcctctggtaaaacaacgctgacgttaagtgtgattgccgaagcgcaaaaagcaggagcaacctgtgctttcatcgacgcggaacatgcacttgatcctggttacgccgagaagttgggggtgaatattgatgatatgttggtgtctcaacctgatacgggtgaacaggcattggaaattaccgatatgttggttcgctccggatcggttgatgtcatcgttgttgactcggttgcagcattaacacccaaagcagaaattgagggtgacattggcgattctcacatgggcttggcagcacgaatgatgtctcaagcgatgagaaaaatgaccgggaacattaagaatgctaattgtttggtaatctttatcaatcagattcgtatgaaaattggcgtgatgtttggtagcccggagacaacaacgggaggtaacgcgctaaagttttacgcctcagttcgtttggatatccgtcgtaccggtgcggttaaagacggcgacgaaattgttggcaatgaaacacgggttaaggttgttaagaacaaagtagcaccaccctttaaacaggctgaattccagattttatacggtaaaggcatttaccgtatgggtgaagtaatagacctcggtgtaaagcaaggactggttgataaagcgggtgcctggtatgcctacaatggtaataaaattggtcagggtaaggcgaatgctgcgaagtttttgttagacaaccctgacattgcaagcgttatcgaaggcaaaattcggcaggagttgctaggaagcaagaagtctcctgatctgcaggttgttgaagcctcgcttgatggtgctgcagaagtcgccgagtaa

SEQ ID NO: 100242 - protein, 352 aa, marine gamma proteobacterium HTCC2143
MIMDTNKEKALQAALAQIERQFGKGSIMKMGEEAREAIPAISTGSLGLDVALGIGGLPKGRIVEIYGPESSGKTTLTLSVIAEAQKAGATCAFIDAEHALDPGYAEKLGVNIDDMLVSQPDTGEQALEITDMLVRSGSVDVIVVDSVAALTPKAEIEGDIGDSHMGLAARMMSQAMRKMTGNIKNANCLVIFINQIRMKIGVMFGSPETTTGGNALKFYASVRLDIRRTGAVKDGDEIVGNETRVKVVKNKVAPPFKQAEFQILYGKGIYRMGEVIDLGVKQGLVDKAGAWYAYNGNKIGQGKANAAKFLLDNPDIASVIEGKIRQELLGSKKSPDLQVVEASLDGAAEVAE

SEQ ID NO: 100243 - DNA, 1044 bp, marine gamma proteobacterium HTCC2080
  CDS (1)..(1044): transl_table=11
atggatcccaataaagcgaaggcacttgacgctgcaatgtctcagattgaacggcagtttggtaaaggcactgtcatgcgaatgggtgatcaggagcgcgtggcaatcccatctatttctaccggttccttggggctagatattgcccttggcattggtggcctacccaaagggcgcatctgcgaaatatacggcccggagtcgtcgggtaaaaccactatgacgctgcaggtaattgcggaagcgcagaaaaaagggggcacggcagcctttattgacgcagaacatgctcttgacccgcagtacgcagagcggttgggagttcaagtagacgatatgatcgtgtcgcagcccgacaccggtgagcaggctctcgaggttgccgagatgttggttcgatcgggcgcagtcgacgtcttggtgatcgactctgtggcagcattgacccccaaagccgaaatcgaaggtgaaatgggacaatctcatgtgggcttgcaggcccggctattgagtcaggcgatgcgaaaactgacgggtgccatcaagcaaacgaactgtctcgttattttcattaaccagattcgcatgaaaatcggcgttatgtttggaagccctgagacgaccaccggtggtaatgcgctgaagttctacgcctcagttcgtctcgatatccgtcgaactggagcggtcaaagacggcgacgaggttgtcggtaacgaaacacgagtcaaagtggttaaaaacaaagtatcaccgccctttaagcaggctgaatttcagattatgtatggcgagggcatctaccacatgggcgaggtaattgattggggcgttaagctcaatctggtggataagagcggcgcctggtatgcctataagggcgataaaattgggcaaggtaaagcgaatgcctctcggtttttagaagagcaccccgatatcgccaatgaaattgagagccagattcgtcatcaaacaatgggaatgcctttggctgtcgtagaagcggcgccaattgagagtggagaggcttctgccgagtaa

SEQ ID NO: 100244 - protein, 347 aa, marine gamma proteobacterium HTCC2080
MDPNKAKALDAAMSQIERQFGKGTVMRMGDQERVAIPSISTGSLGLDIALGIGGLPKGRICEIYGPESSGKTTMTLQVIAEAQKKGGTAAFIDAEHALDPQYAERLGVQVDDMIVSQPDTGEQALEVAEMLVRSGAVDVLVIDSVAALTPKAEIEGEMGQSHVGLQARLLSQAMRKLTGAIKQTNCLVIFINQIRMKIGVMFGSPETTTGGNALKFYASVRLDIRRTGAVKDGDEVVGNETRVKVVKNKVSPPFKQAEFQIMYGEGIYHMGEVIDWGVKLNLVDKSGAWYAYKGDKIGQGKANASRFLEEHPDIANEIESQIRHQTMGMPLAVVEAAPIESGEASAE

SEQ ID NO: 100245 - DNA, 1077 bp, Candidatus Desulfococcus oleovorans Hxd3
  CDS (1)..(1077): transl_table=11
atgagtaacgcagaaaagaccaaggcggttgaaagcgcgattacccagatcgagcggcagttcggcaagggcgccatcatgaagctgggcaccggaaccgtgatcaatgttccgtccatatccaccggctccattgccctggatgtggccctgggcgtgggcgggcttcccaggggccgggtgaccgagatatacgggcaggagtcgtcgggcaagaccaccattgcccttcataccgttgccgaggcccagaaaaagggtggcattgccgcctttatcgacgccgagcacgctctggacacggcctatgccaaaaagctgggggtcaacaccgatgaactgctggtctcccagcccgacaccggcgagcaggccctggagatcgcggacatgctggtgagaagcggcgccatcgacatcctggtaatcgactcggtggcggccctggtgcccaaggccgagatcgagggcgagatgggcgactcccacatgggactgcaggcccggcttatgtcccaggccctgcgaaagctcaccggcgtgatcggcaaaaccaatacatccattatttttatcaaccagatccgtgaaaagatcggcgtgtttttcggcaaccccgagaccacgcccggcggcaacgccctgaagttttacgcgtctgtgcggctggacattcgccgcagcgcggccatcaaggacggccaggaggtggtgggcaaccgggtgcgggtcaaggtggtcaagaacaagatcgcgccccccttcaagaccgtggagtttgacatgatgtatggcgaaggcatatcgaaaaccggtgaactgctggacatcggcgtggaaaacaacattattgaaaagagcggctcgtggtactcatataacggcgagcgcatcggccagggccgggagaatgtgaagcagttttttgccgacaagcccgaggtgtttaacgaactctatgccaaagtgcgcgagagcgttggccttgccggcgggcagcccgccgcggtggagaaaccggacaaggccgacaaggccgataaggcggcaaaggccactgaagcggataaagcatag

SEQ ID NO: 100246 - protein, 358 aa, Candidatus Desulfococcus oleovorans Hxd3
MSNAEKTKAVESAITQIERQFGKGAIMKLGTGTVINVPSISTGSIALDVALGVGGLPRGRVTEIYGQESSGKTTIALHTVAEAQKKGGIAAFIDAEHALDTAYAKKLGVNTDELLVSQPDTGEQALEIADMLVRSGAIDILVIDSVAALVPKAEIEGEMGDSHMGLQARLMSQALRKLTGVIGKTNTSIIFINQIREKIGVFFGNPETTPGGNALKFYASVRLDIRRSAAIKDGQEVVGNRVRVKVVKNKIAPPFKTVEFDMMYGEGISKTGELLDIGVENNIIEKSGSWYSYNGERIGQGRENVKQFFADKPEVFNELYAKVRESVGLAGGQPAAVEKPDKADKADKAAKATEADKA

SEQ ID NO: 100247 - DNA, 1068 bp, Pseudomonas putida GB-1
  CDS (1)..(1068): transl_table=11
atggacgacaacaagaagcgcgccttggctgcggccctgggtcagatcgaacgtcaattcggtaaaggcgcggtcatgcgcatgggtgaccaggagcgtcaaggcattccggccatctccaccggctcgctgggcctggacatcgcccttggcatcggcggcctgccaaaaggccgtatcgtcgagatctacggcccggaatcgtcgggcaagaccacgctgaccctatcggtcatcgccgaagctcagaaaaacggtgccacctgcgccttcgtcgacgccgaacacgccctcgaccctgagtacgccggcaagctgggcgtcaacgtcgacgacctgctggtttcgcagccggacactggcgaacaggccctggaaatcaccgacatgctggtgcgctccaacgccgttgacgtgatcatcgtcgactccgtggccgcgttggtgccgaaggccgagatcgaaggcgagatgggtgacatgcacgtcggcctgcaggctcgcctgatgtcccaggcgctgcgcaagatcactggtaacatcaagaacgctaactgcctggtcatcttcatcaaccagatccgtatgaagattggcgtgatgttcggcagcccggaaaccaccaccggtggtaacgccctgaagttctacgcctcggtgcgtctggatatccgtcgtaccggcgcggtcaaggaaggcgacgaagtggtcggtagcgaaacccgcgtcaagatcgtcaagaacaaggtatcgcctccgttccgtcaggccgagttccagattctttacggcaaaggtatctaccgtaacggcgagatcattgacctgggtgtgtctcagggcctggtcgagaaatccggtgcctggtacgcctaccagggcaacaagatcggtcaaggtaaagccaacgctgccaagtatctggcggaaaacccggctattggtgccgagatcgagaagcagatccgtgaaaagctgttgaaagccggtgctgccgctgaagccggcaaggctgccgccgttgatgccagtgccgacgatgtggctgacgccgaagccggttattga

SEQ ID NO: 100248 - protein, 355 aa, Pseudomonas putida GB-1
MDDNKKRALAAALGQIERQFGKGAVMRMGDQERQGIPAISTGSLGLDIALGIGGLPKGRIVEIYGPESSGKTTLTLSVIAEAQKNGATCAFVDAEHALDPEYAGKLGVNVDDLLVSQPDTGEQALEITDMLVRSNAVDVIIVDSVAALVPKAEIEGEMGDMHVGLQARLMSQALRKITGNIKNANCLVIFINQIRMKIGVMFGSPETTTGGNALKFYASVRLDIRRTGAVKEGDEVVGSETRVKIVKNKVSPPFRQAEFQILYGKGIYRNGEIIDLGVSQGLVEKSGAWYAYQGNKIGQGKANAAKYLAENPAIGAEIEKQIREKLLKAGAAAEAGKAAAVDASADDVADAEAGY

SEQ ID NO: 100249 - DNA, 1116 bp, Marinobacter sp. ELB17
  CDS (1)..(1116): transl_table=11
atggaagacaaccgcaagaaagctttatccgccgctctgacccagattgaacgccagtttggtaaaggcgccatcatgaagatgggcgaccacccccgtgaggcaatcccgtccgtttctaccggttctcttggtctggacgttgctcttggcattggtggcctgccttatggccgggtttgtgaaatctacggccctgaaagctctggtaaaactacgctgactttgcaggttattgccgaagcccagaagcagggcaaaacgtgtgcttttgttgatgctgagcacgcccttgatcctcaatatgctgaaaagctgggcgtgaacgttgatgagctgctggtttcccagcccgacaccggtgagcaggcgttagaaatctgcgacatgctggtgcgctccaacgcggtggatgtcatcatcgtggactccgttgccgcattgacgccaaaagctgaaattgaaggcgaaatgggcgactctcatgttggtcttcaggcccgcctgatgtcacaggctctgcgcaaactgaatggcaacgtcaagaatgccaacgtcctgctgattttcatcaaccagatccgcatgaaaataggcgtgatgtttggcagccccgaaaccactaccggcggcaacgcgttgaaattctatgcctctgtgcgtctggatatccgccgcattggcgcagtgaaagacggcgacgaagtcaccggtaacgaaacccgggtgaaagtggttaaaaacaaagtggcaccgccgttccgccaggccgaattccaaattttgtacggcaagggcatttaccgcatggccgaagtggtggacatgggtgtaaaggaaggctttgtagataaggctggcgcctggtacgcctacaacggtgacaaaattggccaaggcaaagccaacgcttgcaaattcctggaagaaaacccggaaatggcgaaagaaattgaagccaaagtgcgcgacaagctgatgcccaaaccagtgaaaaaagacgcggcaaaggatgcagggaaagatgcagggaaagacgcaggaaagaatgtagggaaaaatgcaggaaaagatgccgcagtggcgcctgcagaagccagcgacgaactactgtaa

SEQ ID NO: 100250 - protein, 371 aa, Marinobacter sp. ELB17
MEDNRKKALSAALTQIERQFGKGAIMKMGDHPREAIPSVSTGSLGLDVALGIGGLPYGRVCEIYGPESSGKTTLTLQVIAEAQKQGKTCAFVDAEHALDPQYAEKLGVNVDELLVSQPDTGEQALEICDMLVRSNAVDVIIVDSVAALTPKAEIEGEMGDSHVGLQARLMSQALRKLNGNVKNANVLLIFINQIRMKIGVMFGSPETTTGGNALKFYASVRLDIRRIGAVKDGDEVTGNETRVKVVKNKVAPPFRQAEFQILYGKGIYRMAEVVDMGVKEGFVDKAGAWYAYNGDKIGQGKANACKFLEENPEMAKEIEAKVRDKLMPKPVKKDAAKDAGKDAGKDAGKNVGKNAGKDAAVAPAEASDELL

SEQ ID NO: 100251 - DNA, 1293 bp, Oryza sativa subsp
  CDS (1)..(1293)
atggccagggccctcctcctccggcgcggccaccccttcctccgccgcctcctgcggcctcccccgcctcccacctcctctgtactggaatcctgcaatagaaatgtgtcaccaagagttcagttgtggagattctctgcagaagggaaagaccagacaaattcaagtgaagatggttacagtgaggcaaacattaagaagaaggactttgcgctacaacaagctttggaccaaattaagtctgcatttggtgaggagtcaattatgtggctaaatcactcttacggtcctaaagaagttcctgtcatatctactggatcctttgcattggacatggctttaggaattggtgggctcccgaagggaagggttgttgaaatttatggtccagaggcatcaggaaaaaccactttagcacttcatatcatagctgaagcacagaagaatggaggatattgtgcttttattgatgccgagcatgccctggatccaacattagcagaatctataggtgttaaggcagaacacctgttattatctcaaccagactgtggtgaacaggcccttggtcttgctgatatcttaatccgaagtggctctattgatgttgtggttgtggacagtgtagcagctcttgttccaaaaactgaactggatggtgagatgggagatgcccatgttgcacttcaagcaaggcttatgagtcaagcacttcgcaagttgagccattctctttctcgctccaggacaatgttggtgtttattaatcaggtaagatcgaaattaagcacatttagtggattcggagcaccagcagaagtaacctgtggagggaatgccttaaagttctatgcttctgtccgcttgaacaccaaaaggattggtcttataaaaaagtcagaagaggttgtaggcacacaaattcaggtcaagattgtcaagaacaagcatgcacccccatttaagactgtacaccttgagcttgagtttggtaagggcctgagtcgtgaattggagattattgaattaggcttcaaacacaagttcataacaaaatcaggagtattctatcacttgaacgggcaaaatttccatggaaaggatgctcttaaatgttatctcgctgaaaacaagaatgtcctggaatctctgatgtcaatgataaaggaaagcataatgcaacaggagtcccatccagatagaaacatggaggatgccaacccagatacgagcataacagaagagttcgtttcagcaacagatgaacaagtacctgaagaggttgaggcctga

SEQ ID NO: 100252 - protein, 430 aa, Oryza sativa subsp
MARALLLRRGHPFLRRLLRPPPPPTSSVLESCNRNVSPRVQLWRFSAEGKDQTNSSEDGYSEANIKKKDFALQQALDQIKSAFGEESIMWLNHSYGPKEVPVISTGSFALDMALGIGGLPKGRVVEIYGPEASGKTTLALHIIAEAQKNGGYCAFIDAEHALDPTLAESIGVKAEHLLLSQPDCGEQALGLADILIRSGSIDVVVVDSVAALVPKTELDGEMGDAHVALQARLMSQALRKLSHSLSRSRTMLVFINQVRSKLSTFSGFGAPAEVTCGGNALKFYASVRLNTKRIGLIKKSEEVVGTQIQVKIVKNKHAPPFKTVHLELEFGKGLSRELEIIELGFKHKFITKSGVFYHLNGQNFHGKDALKCYLAENKNVLESLMSMIKESIMQQESHPDRNMEDANPDTSITEEFVSATDEQVPEEVEA

SEQ ID NO: 100253 - DNA, 1780 bp, Physcomitrella patens
  CDS (174)..(1481)
gaagcccggctgcactgccttggggaggggggttgtgttgtcgcggaagccatcgtcgtcgtcgtcgtctcgccccccgatcgatcgttctgatttctcactcggaagccccgcgcttctgcactaatcgctcccgaaccaatcttcaaacttgcaagaggagggggacagacatggcgggagctctgcgagtacttagatctcgccacctctttcagcgcgtatgtgctgcttgtgcggatccttccacctcctatgctctggagactgttaccattcccacgccaggttacttccgcaacaactctggctctgctacagagccaaagagaggcaggcgggtgaagaaggcagcgagggtaatcgaccctgacaaccccaatttggaccatgaatactcgaaacagagtctaatacaagccgcaatcgaccagattgctaagaagcatgggaaggagacagttatgtggcttgggcgggagagtcgtgactttattgatgtcgttcctactggctctctaaacctcgacattgctctaggtgttggcggtctgccaaagggccgggtagtggagatctttggtcaagaagcctctgggaagacgacgattgctcttcacgtgattgcacaggcccaaaaaatgggaaaaggacattgcctatttgtggatgcagagcatgcattagatatgcaatttgctgaaggcatcggtgtgaacacgaaagatcttttgtttgttcagccagattatgctgagcaggccctggatactgtcgatcacttcgttcgctctactggtgtcgatgttattgttgttgacagcgttgctgcacttgtaccgaaagctgaacttgaaggagacatgggtgattctcagatggctttgcaggctcgcctgatgagcaaagcgctccgcagacttactcactctcttaactcctccaattgtctgcttatcttcatcaatcagacacgagcaaagctcaatacgtatggaggtggtggaccaacagctgaggtgacagctggaggaaatgctcttaagttctatgcatccgtgcgcttacaagtcaggaaaaaagaacaactaagacgtggagatgtgccctttggaagttcggttattgtaaaagtggtgaagaacaaagtatcaccaccatttaggactgcggaattcgatattgaatatgggaaaggtatatctcgtgatggtgaagtcctcgatctaggtgtgaagcatggcttgctagggcaatcaggttcatggtattcgtacgagggtaagaacttcgcaaatggaagagaaggtgcgaagaagtacctgcaagaacacacagatctgactgatgctttggtggtagcaatcaaggagaagattttaggccaaccacgtgctagtggggatttggacgacgatgggttcattcaagaggaggacgcttttgaagccgatgctgataatctagaggtgacagggtaggagacagcatagtgtcgttaagtaattcaattttcacaacttcgaactcaacctgttcaacaaaagcatgggtgactaagcagcaggtattagggagttattgcgtatcttatgatattccttttgcttaggatggttgtgcgacctttcctgcctgacgagcgccatcagcaaaaagctcgtccattttggtgttagcttgccacgtgattcagcaccaatggcatgttgtagaacctttcgagccgcgttttgaagggagatctatgtgcttaagagaattaggcgaggattcctcc

SEQ ID NO: 100254 - protein, 435 aa, Physcomitrella patens
MAGALRVLRSRHLFQRVCAACADPSTSYALETVTIPTPGYFRNNSGSATEPKRGRRVKKAARVIDPDNPNLDHEYSKQSLIQAAIDQIAKKHGKETVMWLGRESRDFIDVVPTGSLNLDIALGVGGLPKGRVVEIFGQEASGKTTIALHVIAQAQKMGKGHCLFVDAEHALDMQFAEGIGVNTKDLLFVQPDYAEQALDTVDHFVRSTGVDVIVVDSVAALVPKAELEGDMGDSQMALQARLMSKALRRLTHSLNSSNCLLIFINQTRAKLNTYGGGGPTAEVTAGGNALKFYASVRLQVRKKEQLRRGDVPFGSSVIVKVVKNKVSPPFRTAEFDIEYGKGISRDGEVLDLGVKHGLLGQSGSWYSYEGKNFANGREGAKKYLQEHTDLTDALVVAIKEKILGQPRASGDLDDDGFIQEEDAFEADADNLEVTG

SEQ ID NO: 100255 - DNA, 1569 bp, Physcomitrella patens
  CDS (162)..(1544)
gtgtttctgacctcgctgctatgtgtcgaagcagtgcttgtagttgatgtcgcctgctgtaatttagattaaatttgcaggatcagcgtttgctgtggaatctcggacacggtaggcgggtagaagaccttgagagtgagagaattgtatctgcaattggcatggcagcaatagctgtgcagtcgaattgctgctccttcagctccgactgctgctctcagcgatgggatccattcaaaggcaatgggagggtacagcgtggactcttagctggtcccatcaacctgcgcatgccaagcccgtctcagctagtccaacaaggatcatgttccatcagctgcaaggctggcggaacttcaaagcagtctggctctgctcttcgagcaaaagccaagaaaggatcctctgatattaatcctgatgactacctatctgatgaccagttgcaatatgtcgaccggcaaaaggcattagaagccgcgatgagcgacatcaatggctcatttggcaaaggaagtgtgaccaggcttggtagtgctggcggagcgcttgtagagaccttccccagtggttgcctcactttggaccttgcattaggtggtggttttcccaaaggacgtattgtggagatatttggtcccgaaagtagtgggaaaaccacgttagcgcttcatgccatagctgagatacagaagaaaggtgggaacgcaatgttggtggatgctgagcactgttttgatccgtattattcgaaggctctcggtgttgacgtggaaagcttgattgtttgtcaacccgacaatggtgaaatggctttagaaactgctgacaggatgtgcagatctggtgctgtggacataatcgtcattgactctgtatctgcacttaccccccgagctgagattgagggagagattgggatgcaacaaatgggactacaggcccggttaatgagtcaagctcttcgtaagatgtctgccaatgctgcacgcgctaactgcacgattattttcttgaatcagattcgatacaagatagctgttatgtacggaaatcctgaagttacaagtggtggtcttgctctcaagttttttgcttctttgcgccttgacattcgcaacacgggcaagattaagtcgccaagaggtgaggatgatattggcataagggctcgagttcgagtacagaagagcaaggtttcaagaccttacaaacaagcagaattcgatataatatttggcgaaggcatttgcaaattggggagcttactggactcagcagagacagtcggtgttgttgtgaggaaaggtgcttggtacagttatggagaaaccaggttaggtcaagggcgagataaagttgttcaattcctccgagactacccggaagtgtgtgcagacattgagaaggtcgttcgagaaagaattgcagaaatcatgacaacaaagcgagattataacggtcccaatgggagtgctgtggttcatgctggaatggacatcgaggaaatgatgggcgaagacaatttgggagagcttgactgaatggttgctgtggttgtaggatttc

SEQ ID NO: 100256 - protein, 460 aa, Physcomitrella patens
MAAIAVQSNCCSFSSDCCSQRWDPFKGNGRVQRGLLAGPINLRMPSPSQLVQQGSCSISCKAGGTSKQSGSALRAKAKKGSSDINPDDYLSDDQLQYVDRQKALEAAMSDINGSFGKGSVTRLGSAGGALVETFPSGCLTLDLALGGGFPKGRIVEIFGPESSGKTTLALHAIAEIQKKGGNAMLVDAEHCFDPYYSKALGVDVESLIVCQPDNGEMALETADRMCRSGAVDIIVIDSVSALTPRAEIEGEIGMQQMGLQARLMSQALRKMSANAARANCTIIFLNQIRYKIAVMYGNPEVTSGGLALKFFASLRLDIRNTGKIKSPRGEDDIGIRARVRVQKSKVSRPYKQAEFDIIFGEGICKLGSLLDSAETVGVVVRKGAWYSYGETRLGQGRDKVVQFLRDYPEVCADIEKVVRERIAEIMTTKRDYNGPNGSAVVHAGMDIEEMMGEDNLGELD

SEQ ID NO: 100257 - DNA, 1098 bp, Medicago truncatula
  CDS (1)..(1098)
atgtctaagaaagatttggccctacaacaagccatggatcagatcacctctacatttggaaagggatcgatcatgtggcttggtcgtactgtctcacccaaaaatgtacctgtggtgtcaaccggttcttttgctcttgatatagcgctaggaattttcggtcttcccaagggacgtgttgtggaaatattcggtccagaggcttctgggaaaacaactcttgctttgcatgttattgcagaggcgcagaagcaaggaggctattgtgcctttattgatgctgagcatgcacttgacaagtcacttgcagaatctattggcgtaaatactgagaacttgcttctctcacaaccagattgtggtgaacaggcacttagcctcgtggataccttaattcggagtggttcgattgatgtcattgttgtcgacagcgtggctgctcttgttcctaaaggtgagcttgatggtgagatgggtgatgctcacatggcaatgcaagctaggttgatgagccaggctcttcggaaattgtgccactccttgtcactttcacagtgtatattgatttttataaaccaggtaaggtcgaagatttctacttttggcggattcggtgggcctactgaagttacttgtggtggtaatgctttgaaattctattcttctgtgaggctaaatatcaaaagagtagggtttgtcaagaagggtgaagagactgtaggaagtcaggttcttgtcaaggttgtgaagaacaagcacgcccctccatttaaaactgcacaatttgagcttgagtttggcaagggcatatgcagagaagcagagattatagagctgagcataaaacacaaattcataaaaaagagtggttcgttttacgaatataatggcaagaattaccatggcaaggatgcactaaaaagtcacctgatcaacggcgatggcttacaagatttaactacaaagcttcgagaaaagcttctcaatgctgagacggaaaccgtttcagaatcacaagagatggttggagatgttacggaagaaatgttatcacccgattctactgatgaagaaactgctgttgttgcagaagcttga

SEQ ID NO: 100258 - protein, 365 aa, Medicago truncatula
MSKKDLALQQAMDQITSTFGKGSIMWLGRTVSPKNVPVVSTGSFALDIALGIFGLPKGRVVEIFGPEASGKTTLALHVIAEAQKQGGYCAFIDAEHALDKSLAESIGVNTENLLLSQPDCGEQALSLVDTLIRSGSIDVIVVDSVAALVPKGELDGEMGDAHMAMQARLMSQALRKLCHSLSLSQCILIFINQVRSKISTFGGFGGPTEVTCGGNALKFYSSVRLNIKRVGFVKKGEETVGSQVLVKVVKNKHAPPFKTAQFELEFGKGICREAEIIELSIKHKFIKKSGSFYEYNGKNYHGKDALKSHLINGDGLQDLTTKLREKLLNAETETVSESQEMVGDVTEEMLSPDSTDEETAVVAEA

SEQ ID NO: 100259 - DNA, 1077 bp, Magnetospirillum gryphiswaldense
  CDS (1)..(1077): transl_table=11
atgtctcaggctgcgttgcgtctcgtggataaggacaccatggatcgtcagaaggcactggaagccgccgtcagccagattgagcgggcgttcggcaagggctccatcatgaagatggggcaaaaggaaacggtcgagaccgaggtggtttccaccggctcgctgggtttggacatcgctttgggcatcggcggcttgccgcgcggtcgcatcatcgagatttacggaccggaaagctcgggcaagaccaccttggccctgcacgttctggccgaggcgcagaaaaagggcggcacctgcgccttcatcgatgccgaacatgcccttgacccgtcctatgcccgcaagctgggggtcaacctggatgatctgctgatcagccagcccgacgccggcgaacaggccttggaaatctgcgataccctggtgcgatccggcgccgtcgacgtgctggtggtcgattcggtcgccgccttggtgccgcgtgccgaacttgaaggcgagatgggcgattcccacgtcggtctgcacgcccgcctgatgagccaggccttgcgcaagctgaccggttcggtgtccaaatccaagaccatcgtcatcttcatcaaccagatccgcatgaagatcggcgtcatgttcggcaacccggaaaccaccactggcggcaacgcgctgaagttctatgcctcggtgcgcatggaaatccgccgtgtcggcgccatcaaggaccgcgacgaggtggtgggcaaccagacccgcgtcaaggtggtcaagaacaagctggcgccgccctttaaggtggttgatttcgacatcatgtatggcgagggcatttccaagaccggcgaattgatcgatctgggcgtcaaggccaacgtggtggaaaagtcgggcgcctggttctcgtacaactcgacccgtgtcggtcagggccgcgagaacgccaagcaattcctgcgtgacaacccggccatggctggcgagatcgaagccaccatccgcgccaatgccggtctggtggccgaagccctggccgccggccccggtgacctggacggcaacgccgccgaggattga

SEQ ID NO: 100260 - protein, 358 aa, Magnetospirillum gryphiswaldense
MSQAALRLVDKDTMDRQKALEAAVSQIERAFGKGSIMKMGQKETVETEVVSTGSLGLDIALGIGGLPRGRIIEIYGPESSGKTTLALHVLAEAQKKGGTCAFIDAEHALDPSYARKLGVNLDDLLISQPDAGEQALEICDTLVRSGAVDVLVVDSVAALVPRAELEGEMGDSHVGLHARLMSQALRKLTGSVSKSKTIVIFINQIRMKIGVMFGNPETTTGGNALKFYASVRMEIRRVGAIKDRDEVVGNQTRVKVVKNKLAPPFKVVDFDIMYGEGISKTGELIDLGVKANVVEKSGAWFSYNSTRVGQGRENAKQFLRDNPAMAGEIEATIRANAGLVAEALAAGPGDLDGNAAED

SEQ ID NO: 100261 - DNA, 1191 bp, Ostreococcus tauri
  CDS (1)..(1191)
atggtcgcgcgaacgctcacgacgacgcgcggtggggtcgtcatggccaaggcgcgagcgagcaaggcgagcaacgcggatgacgcgaaatctggctcgccagacgcgaagaagaaggcgctgcaacgcgtgctggatgagattgatagtaatttcggcgcgggcgcgatcatgcgcctgggcgaggctggcaaggcgaaagtggcgacgtttccgtccggggcgctgacgctggacatggcgctcggtggtggactcccgagaggacgtatcgttgaggtgtatggaccagagagctcggggaagaccacgctggcgctgcacgcgatggcggagatgcaggcgatcggcggtacggtggcaatcatcgacgcggagcacgcgttcgatccggagtactcggcgagactggggttgaacctggatgatgtcatcgtgtgtcagccagaaacgggcgagatggcgctcgaggtcgtggacacgctcgtgcgatcgtcggctgttgatttgatcgtcgtggactctgtcgccgcgctcgtgccgcgaagcgaaatcgaaggcgagatcggcatggtccaggtcggtgcgcacgcacgattgatgtctcaggcgctgagaaagattaacgtcaacgccgccaaggctggaacgacgatcatcttcttgaaccagctccgctcaaaggttggggtgatttacggaagcccggaggtgacgacgggcggcaatgcgctcaagtactacgcgagcgttcgtctcgacattcgacgcaaggaggtcatcaagggtaagagcggcgaggacgacctcggcgtgagatgcaaggtcaaggtggcgaagaacaaggtggcaccgccgtacaaggtggctgagtttgacatgcttttcggccgcggaatctccaaggacggctgcctcctggacgccggcgagcaagtcggtgtcgtcgaccgcaagggtgcttattactactacaacggtgaaaagctcggccaaggccgcgagaagacgctcgcgttcttggacgaaaacctcccggtgaagggcaccatcgaagcggatgttcgccgaaaggtggctgagaagatggccggtctctcgaacaagcccgtcgccgaggaagaggaagagattcccgatgacgccttcttcggcgatgacgaagagatcgtcgctgccgaggcgcgataa

SEQ ID NO: 100262 - protein, 396 aa, Ostreococcus tauri
MVARTLTTTRGGVVMAKARASKASNADDAKSGSPDAKKKALQRVLDEIDSNFGAGAIMRLGEAGKAKVATFPSGALTLDMALGGGLPRGRIVEVYGPESSGKTTLALHAMAEMQAIGGTVAIIDAEHAFDPEYSARLGLNLDDVIVCQPETGEMALEVVDTLVRSSAVDLIVVDSVAALVPRSEIEGEIGMVQVGAHARLMSQALRKINVNAAKAGTTIIFLNQLRSKVGVIYGSPEVTTGGNALKYYASVRLDIRRKEVIKGKSGEDDLGVRCKVKVAKNKVAPPYKVAEFDMLFGRGISKDGCLLDAGEQVGVVDRKGAYYYYNGEKLGQGREKTLAFLDENLPVKGTIEADVRRKVAEKMAGLSNKPVAEEEEEIPDDAFFGDDEEIVAAEAR

SEQ ID NO: 100263 - DNA, 1074 bp, Anaplasma centrale
  CDS (1)..(1074): transl_table=11
atgtcaggcagtaagaaagatgttgaatctgacaagcaaaaggcgttggatgccgctataagtcagatagaaagagcgttcgggcgcggcgccatcatgaagttgaaacagcaccctgcagagaaaatggatagtgtatctactggctcaatagctctggatgcagcgctgggtattggaggcctaccaaagggtaggatagtggaaatcttcggtccagaaagctcaggaaaaaccacacttgcacttcatgttattgctgaagcacagaaacaaggaggtaactgtgccttcatcgatgcagaacacgcattggacactgtgtatgccaggaagttgggtgtgagcgtgggtgatttgatagtctcgcagcccgacactggtgagcaggctttgcacattgttgagtacctggtgtgttctggtgctatagatgtgatagtggtggattctgttgcggcgcttacccctagggctgaaatagagggtgatatgggtgatcagcacatggggttgcaggctaggttgcttagccacgcgcttcgtaagctgacttctgtggtatccaaggctaactgcatactggtgttcataaaccagatacgcataaagataggtgtgatgtacggcaacccggaagtaacaacgggcggcagtgcgctcaagttctacacatcgatacggcttgacattcgcaaggtgagtgcaattaaagacaaagacagcgttataggaaatcagacgagagtgaaagtagtcaaaaacaaggttgcgcccccgttcaagcaggcagagtttgacatcgtatacaatgaaggcatatcaaagttgggtgaaatagttgatatgggtgtcaagttcggttttgtcgagaagtctggtgcctactactcctatggcgcagttaagttggggcaagggagggagaatgccaaggcttacctgaagagcagcccagatgttgcgaatgagttggaacaaaaaatcagagcgtaccttgcggagagtatgcacaacaacgatctgtttgctgcagacgggcgtaccgatgtgctggaggaggaggttttctag

SEQ ID NO: 100264 - protein, 357 aa, Anaplasma centrale
MSGSKKDVESDKQKALDAAISQIERAFGRGAIMKLKQHPAEKMDSVSTGSIALDAALGIGGLPKGRIVEIFGPESSGKTTLALHVIAEAQKQGGNCAFIDAEHALDTVYARKLGVSVGDLIVSQPDTGEQALHIVEYLVCSGAIDVIVVDSVAALTPRAEIEGDMGDQHMGLQARLLSHALRKLTSVVSKANCILVFINQIRIKIGVMYGNPEVTTGGSALKFYTSIRLDIRKVSAIKDKDSVIGNQTRVKVVKNKVAPPFKQAEFDIVYNEGISKLGEIVDMGVKFGFVEKSGAYYSYGAVKLGQGRENAKAYLKSSPDVANELEQKIRAYLAESMHNNDLFAADGRTDVLEEEVF

SEQ ID NO: 100265 - DNA, 1131 bp, Streptomyces argillaceus
  CDS (1)..(1131): transl_table=11
atggcaggcaccgaccgcgagaaggccctggacgccgcactcgcacagattgaacggcaattcggcaagggcgcggtcatgcgcatgggcgaccgctcgaaggagcccatcgaggtcatcccgaccgggtcgaccgcgctcgacgtggccctcggcgtcggcggtctgccgcgcggccgtgtcatcgaggtctacggacccgagtcctccggcaagacgaccctgaccctgcacgcggtggcgaacgcccagagggccggcggccaggtggcgttcgtggacgccgagcacgccctcgaccccgagtacgcgcagaagctcggcgtggacatcgacaacctgatcctgtcccagccggacaacggcgagcaggccctggagatcgtggacatgctcgtccgctccggggccctcgacctgatcgtcatcgactccgtcgccgcgctcgtcccgcgtgcggagatcgagggcgagatgggcgacagccacgtgggtctgcaggcccgtctgatgagccaggccctgcggaagatcaccagcgcgctcaaccagtccaagaccaccgcgatcttcatcaaccagctccgcgagaagatcggtgtgatgttcggctccccggagaccacgaccggtggccgggcgctgaagttctacgcctccgtgcggctcgacatccggcgcatcgagacgctgaaggacggcaccgacgcggtcggcaaccgcacccgcgtcaaggtcgtcaagaacaaggtcgcgccgcccttcaagcaggccgagttcgacatcctctacgggcagggcatcagccgtgagggcggcctgatcgacatgggcgtggagcacggcttcgtccgcaaggccggcgcctggtacacgtacgagggcgaccagctcggccagggcaaggagaacgcccgcaacttcctcaaggacaaccccgacctcgccaacgagatcgagaggaagatcaaggagaagctgggggtgggcgtacgccccgagcagcccgccgaggccccgagtgcggatgacgcggccgccccgggcgcaccggcggctgacgcggccaaggcggttcccgcttccgcagccaaggccaccaagaccaaggccgcggctgccaagagctga

SEQ ID NO: 100266 - protein, 376 aa, Streptomyces argillaceus
MAGTDREKALDAALAQIERQFGKGAVMRMGDRSKEPIEVIPTGSTALDVALGVGGLPRGRVIEVYGPESSGKTTLTLHAVANAQRAGGQVAFVDAEHALDPEYAQKLGVDIDNLILSQPDNGEQALEIVDMLVRSGALDLIVIDSVAALVPRAEIEGEMGDSHVGLQARLMSQALRKITSALNQSKTTAIFINQLREKIGVMFGSPETTTGGRALKFYASVRLDIRRIETLKDGTDAVGNRTRVKVVKNKVAPPFKQAEFDILYGQGISREGGLIDMGVEHGFVRKAGAWYTYEGDQLGQGKENARNFLKDNPDLANEIERKIKEKLGVGVRPEQPAEAPSADDAAAPGAPAADAAKAVPASAAKATKTKAAAAKS

SEQ ID NO: 100267 - DNA, 1050 bp, Moraxella catarrhalis
  CDS (1)..(1050): transl_table=11
atggacgaaaataaagaaaaagcactcaaagccgccttggctcaaattgaaaaacagtttggtaaaaataccatcatgcatttgggtgatgaaacagccaagcttgatgtggatgtggtctcaacaggttcgcttgggcttgatattgcattgggtatcggtggcttgccaaaaggtcgaattattgagatttttgggcctgaaagctctggtaaaaccacactgaccttacaaaccattgccgagtgccaaaagcaaggcggtacttgtgcctttattgatgctgaacatgcacttgatccgatttatgccaaaaagcttggcgtcaatattgatgatttgcttgtctcgcagcctgacaatggcgaacaggcacttgagattgccgatatgctcgtacgctcaggtgccattgatctgattgtcgtagactcggtggctgctttgactccaaaagctgaaattgaaggtgaaatgggcgacagccacatgggtctgcaagcacgcttgatgagccaagcactgcgtaaaattactggcaacgccaagcgttcaaattgtatggtgatttttattaaccaaatccgtatgaaaattggcgtcatgtttggcagtccagaaacgaccacaggtggtaatgccctaaaattctatgcctctgtgcgtcttgatattcgacgcattggctctgtcaaagatggcgatgagattattggttcagaaacacgcgtcaaagtcatcaaaaataagatggcaccgccatttcgccaaaccgaatttcaaattatgtacggtgagggcattaaccgcctaggcgaggtgatcgatttgggtgttgatattggtgctgttggtaagtcaggtgcttggtacagttatggtgatggtaaaattggtcaaggtaaagccaatacggtcaaatatctgcaagaaaatcctgccattgccagcgaaatcgaagccaaagttcgtgagattaaattagccacagtcacacccatcgtagaatcagatgagcctgaagagcatttagaagatgataatttctaa

SEQ ID NO: 100268 - protein, 349 aa, Moraxella catarrhalis
MDENKEKALKAALAQIEKQFGKNTIMHLGDETAKLDVDVVSTGSLGLDIALGIGGLPKGRIIEIFGPESSGKTTLTLQTIAECQKQGGTCAFIDAEHALDPIYAKKLGVNIDDLLVSQPDNGEQALEIADMLVRSGAIDLIVVDSVAALTPKAEIEGEMGDSHMGLQARLMSQALRKITGNAKRSNCMVIFINQIRMKIGVMFGSPETTTGGNALKFYASVRLDIRRIGSVKDGDEIIGSETRVKVIKNKMAPPFRQTEFQIMYGEGINRLGEVIDLGVDIGAVGKSGAWYSYGDGKIGQGKANTVKYLQENPAIASEIEAKVREIKLATVTPIVESDEPEEHLEDDNF

SEQ ID NO: 100269 - DNA, 1047 bp, Propionibacterium acnes
  CDS (1)..(1047): transl_table=11
atggcagcgaccgctgaccgcgaaaaggcccttgccacggccttgcagcagatcgagaagcagcacggcaaaggctctatcatgcgccttggcgagcaggagaccgttaagatcgccgctatccccacgggctcggtggccctcgacgtcgcgttgggtgtcggaggcctcccacgtggcaggatcgtggagatctatggtcccgaatcctctggcaagacgacggtggctttgcacgcaatcgctaatgcccaggctgaaggcggcatctgtgcctttattgacgccgagcacgctctcgacccggaatacgcacgcaaactcggggtcgatacagattccctgctggtgagccagcctgacaatggtgagcaggctctcgagattgctgacaccctcgtccgctcgggtgccttggagctcgtcgttgttgactcggtggccgctctgaccccgaaggctgagatcgagggcgagatgggtgattcccatgttggtttgcaggcccgccttatgagccaggccctgcgcaagatgaccggtgcgttaaatgcggccggtaccactgccatcttcattaatcagctgcgcgagaagatcggtgtcatgtttggctccccggagacaacgacaggtggtcgcgccctcaagttctactcgtccgtgcgcctcgacgtgcggcgtgtcgaaactcttaaagacggatcagagatggtcggtaaccgcactcgtgtcaaggttgccaagaacaaggtcgccccaccttttaagcaggcagagtttgacatcctctacggacagggcatttctcgcgagggaagcctcatcgacatgggcgtagattgcggcatcatcaccaaatccggttcgtggttcagctacaacaatgagcagttgggtcagggtaaggagaacgtccgaaagttcctcaaaggtaacccggatgttgccaatgagattgaggacaagatcctgactcacctcggcctgcgcgaagccgaggttcctgagggtgtcgatccccgaactggcgaggtggaattctga

SEQ ID NO: 100270 - protein, 348 aa, Propionibacterium acnes
MAATADREKALATALQQIEKQHGKGSIMRLGEQETVKIAAIPTGSVALDVALGVGGLPRGRIVEIYGPESSGKTTVALHAIANAQAEGGICAFIDAEHALDPEYARKLGVDTDSLLVSQPDNGEQALEIADTLVRSGALELVVVDSVAALTPKAEIEGEMGDSHVGLQARLMSQALRKMTGALNAAGTTAIFINQLREKIGVMFGSPETTTGGRALKFYSSVRLDVRRVETLKDGSEMVGNRTRVKVAKNKVAPPFKQAEFDILYGQGISREGSLIDMGVDCGIITKSGSWFSYNNEQLGQGKENVRKFLKGNPDVANEIEDKILTHLGLREAEVPEGVDPRTGEVEF

SEQ ID NO: 100271 - DNA, 1050 bp, Mycobacterium wolinskyi
  CDS (1)..(1050): transl_table=11
atggcgccccaggcccccgatcgcgaaaaagccctcgagctggcgatggcccagatcgacaagaacttcggcaaaggttcggtgatgcgcctcggtgacgaggtgcgccagccgatctcggtcatcccgaccggttcgatcgcgttggatgtggcactcggtatcggcggtctgccgaggggccgtgtcgtcgagatctacggcccggagtcctcgggtaagacgacggtcgcgctgcatgcggtggccaacgcgcaagccgcaggcggcatcgcggcgttcatcgacgccgagcacgcgctcgatccggagtacgccaagaagctcggcgtggacaccgactcgctgttggtctctcagcccgacaccggtgagcaggcgctggagatcgccgacatgctggtgcgctcgggtgcgctggacatcctggtgatcgactcggtcgccgccctggtgccccgcgccgagatcgaaggcgagatgggcgacagtcacgtcggtctgcaggcccgcctgatgagccaggcgctgcggaagatgaccggtgcgctcaacaactccggcaccaccgcgatcttcatcaaccagctccgcgagaagatcggcgtgatgttcggctcgcccgagaccacaacgggcggtaaggcgctgaagttctacgcctcggtccggatggacgtccgccgcatcgagacactcaaggacggcaccgacgccgtgggtaaccgcacccgcgtcaagatcgtcaagaacaaggtgtcgccgccgttcaagcaggccgagttcgacatcctctacggccagggcatcagccgcgaaggctcgctcatcgacatgggtgtcgagcacggcttcatccgcaagtcgggctcgtggttcacctatgagggtgagcagctgggccagggcaaggagaacgcccgcaagttcttgctggagaacgtcgatgccgccaacgagatcgagaagaggatcaaagagaagctcggcatcggtgccgacgtgaccgccgcggctgatgaagcactcccggccccagttgacttctga

SEQ ID NO: 100272 - protein, 349 aa, Mycobacterium wolinskyi
MAPQAPDREKALELAMAQIDKNFGKGSVMRLGDEVRQPISVIPTGSIALDVALGIGGLPRGRVVEIYGPESSGKTTVALHAVANAQAAGGIAAFIDAEHALDPEYAKKLGVDTDSLLVSQPDTGEQALEIADMLVRSGALDILVIDSVAALVPRAEIEGEMGDSHVGLQARLMSQALRKMTGALNNSGTTAIFINQLREKIGVMFGSPETTTGGKALKFYASVRMDVRRIETLKDGTDAVGNRTRVKIVKNKVSPPFKQAEFDILYGQGISREGSLIDMGVEHGFIRKSGSWFTYEGEQLGQGKENARKFLLENVDAANEIEKRIKEKLGIGADVTAAADEALPAPVDF

SEQ ID NO: 100273 - DNA, 1056 bp, Mycobacterium porcinum
  CDS (1)..(1056): transl_table=11
atggcgcagcaagcccctgatcgcgaaaaagcgctcgaactggcgatggcccagatcgacaagaacttcggtaaaggctcggtgatgcgcctcggcgaggaggtgcgccagccgatctcggtgatccccaccggttcgatctccctggacgtggccctcggcatcggcggcctgccgcgcggccgcgtggtcgagatctacggcccggaatcctcgggtaagaccactgtggcgctgcacgcggtggccaacgcccaggccgccggcggcatcgcggcattcatcgacgccgagcacgccctggatcccgagtacgccaagaagctcggtgtggacaccgattccctgttggtgagccagccggacaccggtgagcaggcgctggagatcgccgacatgctggtgcgctcgggtgcgctggacatcctggtgatcgactcggtggcagccctggtgccccgcgccgagatcgagggcgagatgggtgacagccacgtcggcctgcaggcccgcctgatgagccaggcgctgcgcaagatgaccggtgcgctgaacaactcgggcaccaccgcgatcttcatcaaccagctccgcgagaagatcggtgtgatgttcggctcgcccgaaaccaccacgggtggtaaggctttgaagttctacgcctcagtccgcctggacgtgcgtcgtatcgagacgctcaaggacggcaccgacgcggtcggtaaccgcacccgcgtcaaggtcgtcaagaacaaggtgtcgccgccgttcaagcaggctgagttcgacatcctgtacggccagggcatcagccgcgaaggctcgctcatcgacatgggtgtcgagcacggcttcatccgcaagtccgggtcctggttcacctacgaaggtgagcagctgggccagggcaaggagaacgcccgcaagttcctgctggagaacgtcgacgtcgccaacgagatcgagaagaagatcaaggaaaagctcggcatcggtgctgtcgtgacggccgaggcgaaggctgatgaagtccttcccgccccggttgatttctga

SEQ ID NO: 100274 - protein, 351 aa, Mycobacterium porcinum
MAQQAPDREKALELAMAQIDKNFGKGSVMRLGEEVRQPISVIPTGSISLDVALGIGGLPRGRVVEIYGPESSGKTTVALHAVANAQAAGGIAAFIDAEHALDPEYAKKLGVDTDSLLVSQPDTGEQALEIADMLVRSGALDILVIDSVAALVPRAEIEGEMGDSHVGLQARLMSQALRKMTGALNNSGTTAIFINQLREKIGVMFGSPETTTGGKALKFYASVRLDVRRIETLKDGTDAVGNRTRVKVVKNKVSPPFKQAEFDILYGQGISREGSLIDMGVEHGFIRKSGSWFTYEGEQLGQGKENARKFLLENVDVANEIEKKIKEKLGIGAVVTAEAKADEVLPAPVDF

SEQ ID NO: 100275 - DNA, 1041 bp, Mycobacterium immunogenum
  CDS (1)..(1041): transl_table=11
atggcgcaggcaccggatcgcgagaaggctctcgagctcgcgctcgcacaaatcgacaagagtttcggtaaaggctcggtcatgcggttgggcgacgaggtgcgccagcccatctccgtgatccccaccggatccatcgcgctggacgtggcactcggtatcggtggcctgcctcgcggccgcgtcatcgagatctacggtccggaatcttcgggtaagaccacggtggcgttgcatgccgtggccaacgcacaacgtgccggcggcatcgcggcgttcatcgatgccgagcacgctctggatcccgagtacgccaagaagctcggtgtcgacaccgattcgctgctggtatcacagcccgacaccggtgagcaggcgctggagatcgccgacatgctggtgcgctccggcgctatcgacctcatcgtcatcgactcggtggccgcgctggtgccacgcgctgagatcgagggcgagatgggcgacagccacgtcggtctgcaggctcgtctgatgagccaggcgttgcgcaagatgaccggcgcgctcaacaactccggtaccaccgcgatcttcatcaaccagctgcgtgagaagatcggcgtgatgttcggttcgcccgaaaccactactggtggtaaggctttgaagttctattcctccgtgcgcctggatgtgcgtcgtatcgagactctcaaggacggtaccgaggcggtgggtaaccgcacccgcgtcaaggttgtcaagaacaaggtgtcgccgccgttcaagcaggccgagttcgacatcctctacggcaagggcatctccaaggagggctcactcatcgacatgggtgtggagcaaggctttatccgtaagtccggttcctggttcacgtatgaaggtgaacagctgggccagggcaaggaaaatgcccgcaacttcttgctggagaacgtcgatgtcgccaatgagatcgagaagaagatcaaggaaaagcttggtatcggagcggtgctgaccgatgacgaagtcgtcccggccccagtcgatttctga

SEQ ID NO: 100276 - protein, 346 aa, Mycobacterium immunogenum
MAQAPDREKALELALAQIDKSFGKGSVMRLGDEVRQPISVIPTGSIALDVALGIGGLPRGRVIEIYGPESSGKTTVALHAVANAQRAGGIAAFIDAEHALDPEYAKKLGVDTDSLLVSQPDTGEQALEIADMLVRSGAIDLIVIDSVAALVPRAEIEGEMGDSHVGLQARLMSQALRKMTGALNNSGTTAIFINQLREKIGVMFGSPETTTGGKALKFYSSVRLDVRRIETLKDGTEAVGNRTRVKVVKNKVSPPFKQAEFDILYGKGISKEGSLIDMGVEQGFIRKSGSWFTYEGEQLGQGKENARNFLLENVDVANEIEKKIKEKLGIGAVLTDDEVVPAPVDF

SEQ ID NO: 100277 - DNA, 1041 bp, Mycobacterium chelonae
  CDS (1)..(1041): transl_table=11
atggcgcaggcaccggatcgcgagaaggcgcttgaactcgcgctcgcacaaatcgacaagagcttcggtaagggctcggtcatgcggctgggtgacgaggtgcgtcagcccatctccgtgatcccgaccggatccatcgcgctggatgtggcgcttggtatcggtggcctgcctcgtggccgcgtggtcgagatctatggaccggaatcctcgggtaagaccaccgtcgcgctgcacgcggtcgccaacgcgcaagccgccggcggtatcgctgcgttcatcgacgccgagcatgcgctcgaccccgaatacgccaagaagctcggtgtcgataccgactcgctgctcgtctctcagccggataccggtgagcaggctctagaaatcgccgacatgctggtgcgctccggcgccatctctcttatcgtgatcgactcggtggcggccttggtgcctcgtgccgaaatcgagggtgagatgggtgacagccatgtcggtctgcaggctcgtctgatgagccaggccctgcgcaagatgaccggtgcactcaacaactcgggtaccaccgcgatcttcatcaaccagctccgcgagaagatcggtgtgatgtttggttcgcccgaaaccaccaccggtggtaaggctttgaagttctactcgtcggtgcgtcttgatgtgcgccgtatcgagaccctcaaggacggcaccgatgcggtgggtaaccgcactcgcgtcaaggtggtcaagaacaaggtgtcgccgccgttcaagcaggccgagttcgacatcctctacggcaagggcatctccaaggaggggtcgctcatcgacatgggcgtggagcagggcttcatccgcaagtccggttcctggttcacctacgagggtgagcagttgggtcagggcaaggaaaatgcccgcaacttcctgttggagaacgtcgatgtcgccaacgagatcgagaagaagatcaaggaaaagctgggtatcggagcggtgctgaccgatgacgaagtcgtcccggccccagtcgatttctga

SEQ ID NO: 100278 - protein, 346 aa, Mycobacterium chelonae
MAQAPDREKALELALAQIDKSFGKGSVMRLGDEVRQPISVIPTGSIALDVALGIGGLPRGRVVEIYGPESSGKTTVALHAVANAQAAGGIAAFIDAEHALDPEYAKKLGVDTDSLLVSQPDTGEQALEIADMLVRSGAISLIVIDSVAALVPRAEIEGEMGDSHVGLQARLMSQALRKMTGALNNSGTTAIFINQLREKIGVMFGSPETTTGGKALKFYSSVRLDVRRIETLKDGTDAVGNRTRVKVVKNKVSPPFKQAEFDILYGKGISKEGSLIDMGVEQGFIRKSGSWFTYEGEQLGQGKENARNFLLENVDVANEIEKKIKEKLGIGAVLTDDEVVPAPVDF

SEQ ID NO: 100279 - DNA, 1056 bp, Mycobacterium fortuitum
  CDS (1)..(1056): transl_table=11
atggcgcagcaggcccctgatcgcgaaaaagcgctcgaactggcgatggcccagatcgacaagaacttcggtaaaggctcggtgatgcgcctcggcgaggaggtgcgccagcccatctcggtgatccccaccgggtccatctccctggatgtggcactcggcatcggcgggctgccgcgcggccgcgtggtcgagatctacggtccggaatcctcgggtaagaccacggtggcgctgcatgcggtggccaacgcccaggccgcaggcggtatcgcggcattcatcgatgccgagcatgcactggatcccgagtacgccaagaagctcggtgtggacaccgattcactgctggtcagccagcccgacaccggtgagcaggcactcgagatcgccgacatgctggtgcgctcgggcgcgctggacatcctggtgatcgactcggtggccgcgctggtaccccgcgccgagatcgagggcgagatgggggacagccacgtcggtctgcaggcgcgcctgatgagccaggcactgcgcaagatgaccggtgcgctgaacaactcgggcaccaccgcgatcttcatcaaccagctccgcgagaagatcggcgtgatgttcggctcacccgaaaccaccacgggcggtaaggctttgaagttctacgcctcggtccggctggacgttcggcgcatcgagacgctcaaggacggcaccgacgcggtcggtaaccggacccgcgtcaaggtcgtcaagaacaaggtctcgccgccgttcaagcaggccgagttcgacatcctgtacggccagggcatcagccgcgagggttcgctcatcgacatgggcgtcgagcacgggttcatccgcaagtcagggtcctggttcacctacgagggtgaacagctgggtcagggcaaggagaacgcccgcaagttcctgttggagaacgtcgatgtcgccaacgagatcgagaagaagatcaaggaaaagctcggtatcggtgctgtcgtgacggccgaggccaaggctgatgacgtcctccccgccccggttgacttctga

SEQ ID NO: 100280 - protein, 351 aa, Mycobacterium fortuitum
MAQQAPDREKALELAMAQIDKNFGKGSVMRLGEEVRQPISVIPTGSISLDVALGIGGLPRGRVVEIYGPESSGKTTVALHAVANAQAAGGIAAFIDAEHALDPEYAKKLGVDTDSLLVSQPDTGEQALEIADMLVRSGALDILVIDSVAALVPRAEIEGEMGDSHVGLQARLMSQALRKMTGALNNSGTTAIFINQLREKIGVMFGSPETTTGGKALKFYASVRLDVRRIETLKDGTDAVGNRTRVKVVKNKVSPPFKQAEFDILYGQGISREGSLIDMGVEHGFIRKSGSWFTYEGEQLGQGKENARKFLLENVDVANEIEKKIKEKLGIGAVVTAEAKADDVLPAPVDF

SEQ ID NO: 100281 - DNA, 1050 bp, Mycobacterium farcinogenes
  CDS (1)..(1050): transl_table=11
atggcgcaacaggcccctgatcgcgaaaaagcgctcgaactggcgatggcccagatcgacaagaatttcggtaaaggctcggtgatgcgcctcggcgacgaggtccgccagcccatctcggtgattcccaccggctccatcgcactggatgtggcgctcggtatcggtggcctgccgcgtggccgcgtggtcgagatctacggcccggaatcctcgggtaagacgacggtggcactgcatgcggtggccaacgcccaggccgccggcggcatcgcggcgttcatcgacgccgagcacgccctggatcccgagtacgccaagaagctcggcgtcgataccgactcactgctggtgagccagcccgacaccggtgagcaggcgttggagatcgccgacatgctggtgcgctcgggcgcgctcgacatcctggtcatcgactcggtggcggcgctggtgccccgcgctgagatcgagggcgagatgggtgacagccacgtcggtctgcaggcccgcctgatgagtcaggcgctgcgcaagatgaccggcgcgctgaacaactcgggtaccaccgcgatcttcatcaaccagctgcgcgagaagatcggtgtgatgttcggctcgcccgaaaccaccacgggcggtaaggcattgaagttctacgcctcggtccggatggatgtccggcgtatcgagacgctcaaggacggcaccgacgcggtcggcaaccggacccgcgtcaagatcgtcaagaacaaggtctcgccgccgttcaagcaggccgagttcgacatcctctacggccagggcatcagccgcgaaggctcactcatcgacatgggtgtcgagcacggcttcatccgcaagtccggctcctggttcacctacgagggcgagcagctgggccagggcaaggagaacgcccgcaagttcctgctggagaacgttgacgtcgccaacgagatcgagaagaagatcaaggaaaagctcggtatcggtgccgtcgtgaccgctgaagctgatgacgtccttcccgctccggtcgacttctga

SEQ ID NO: 100282 - protein, 349 aa, Mycobacterium farcinogenes
MAQQAPDREKALELAMAQIDKNFGKGSVMRLGDEVRQPISVIPTGSIALDVALGIGGLPRGRVVEIYGPESSGKTTVALHAVANAQAAGGIAAFIDAEHALDPEYAKKLGVDTDSLLVSQPDTGEQALEIADMLVRSGALDILVIDSVAALVPRAEIEGEMGDSHVGLQARLMSQALRKMTGALNNSGTTAIFINQLREKIGVMFGSPETTTGGKALKFYASVRMDVRRIETLKDGTDAVGNRTRVKIVKNKVSPPFKQAEFDILYGQGISREGSLIDMGVEHGFIRKSGSWFTYEGEQLGQGKENARKFLLENVDVANEIEKKIKEKLGIGAVVTAEADDVLPAPVDF

SEQ ID NO: 100283 - DNA, 1044 bp, Bacillus amyloliquefaciens
  CDS (1)..(1044): transl_table=11
atgagtgatcgtcaggcagccttagatatggctcttaagcaaatagaaaaacaattcggcaaaggttccatcatgaagctcggagaaaaaacggatacaagaatttcaacggtgccaagcggttcccttgcacttgataccgctctcggaataggcggatacccgcgcggacggattattgaagtatacggacctgaaagctcaggtaaaacgactgtagcgcttcacgcaatcgctgaggttcaggaaaaaggcggacaggcagcatttattgatgctgagcatgctcttgatcctgtttacgcgcaaaagctcggtgtcaatatcgaagagcttctgctttctcagccggatacgggagagcaggcgctagagattgctgaagcgctggtgcgaagcggagctgttgatatcgtagtcgttgactctgttgcggcgcttgttccaaaagctgaaattgaaggtgacatgggtgattcacacgtcggtttacaggcgcgtctcatgtctcaggcgctccgtaagctttccggcgccatcaataaatctaaaacaatcgcaatctttattaaccagattcgtgaaaaagtcggcgttatgttcggaaatccggagacgacaccgggcggccgcgcgctgaaattctattcttccgtgcgccttgaagtgcgccgtgccgagcaattaaagcagggcaacgacgtcatggggaataaaacgagaattaaagtcgtaaaaaacaaagtcgctcctccgttccgtacggctgaagtggacattatgtacggtgaaggaatctccaaagaaggggaaatcatcgaccttggaactgaactggatatcgtgcaaaaaagcggttcgtggtattcttatgaagaagaacgcctcggtcagggccgtgaaaacgccaagcagttcttaaaagaaaataaagatatcatgctgatgattcaggaacaaatccgtgaatattacggtttagacaataacggtgtaacggacaaagcggaagaagttcaggaagagatggaattagaagaataa

SEQ ID NO: 100284 - protein, 347 aa, Bacillus amyloliquefaciens
MSDRQAALDMALKQIEKQFGKGSIMKLGEKTDTRISTVPSGSLALDTALGIGGYPRGRIIEVYGPESSGKTTVALHAIAEVQEKGGQAAFIDAEHALDPVYAQKLGVNIEELLLSQPDTGEQALEIAEALVRSGAVDIVVVDSVAALVPKAEIEGDMGDSHVGLQARLMSQALRKLSGAINKSKTIAIFINQIREKVGVMFGNPETTPGGRALKFYSSVRLEVRRAEQLKQGNDVMGNKTRIKVVKNKVAPPFRTAEVDIMYGEGISKEGEIIDLGTELDIVQKSGSWYSYEEERLGQGRENAKQFLKENKDIMLMIQEQIREYYGLDNNGVTDKAEEVQEEMELEE

SEQ ID NO: 100285 - DNA, 1660 bp, primary endosymbiont of Sitophilus oryzae
  CDS (11)..(1078): transl_table=11
aggagtaaaaatggctattgatgagaataaacaaaaggcgttagcggcagcactgggtcaaattgaaaagcaattcggcaagtgttcgatcatgcgcctgggtgaagatcgctccatggatgttgaaacgatctccacaggttctctgtctctggatattgcgttgggcgccggtgggctgcccatgggccgtatcgttgaaatctacggcccggaatcatcgggtaaaaccactctgaccctgcaggttatcgccgcggcgcagcgcgaaggcaaaacctgcgcctttatcgatgccgagcatgccctggaccctatctacgccaaaaagctgggcgtcgatatcgataatctgttgtgctcccagccggacaccggcgaacaggcgctggaaatctgcgatgctctgacccgctccggcgctgtagacgtcatcatcgtcgactccgtggcggcactgacgccgaaagcggaaatcgagggtgagatcggcgattcccatatgaggctggccgcccgtatgatgagccaggcgatgcgcaaactggcgggtaatttgaaaaacgccaatacgctgctgattttcattaaccagatccgcatgaagatcggcgtcatgttcggtaacccggagaccacgaccggtggtaatgcgcttaagttttacgcatcggttcgtctggatattcgccgtatcggctcggtgaaagaaggcgatgtggtggtgggcagtgaaacccgcgtcaaagtcgtgaagaacaaagtcgccgcgccgtttaaacaggccgaattccagatcatgtacggcgaaggcatcaacattcgcggtgagctggtcgatctgggcgtcaagcacaagctgatagagaaagcgggcgcctggtacagctataacggcgagaagatcggtcagggcaaggccaatgcctgcacctttctgaaggaccatcccgaactggcggcggagctggacaaaaagctgcgcgacatgctgctgcatagcgccgatggcaacagcctggtcagcgacgtggaaagcgaggacgaaagcgccagcgagagcaatgaagagttttaatcgacgggcggtgaagacgacggcgcaacccgcgaccgcggtaagccaggacgagatcgaccaggcgatcgcttattgtcatgaccacgactggcttgacgatgggcgcttcgcacggcgctatgtcagccgccgcagcaaacaaggctatggcgaacagcgcattcgtatggaactgctgcagaaaggaatcaacagggacgacatcaatgcggccttcgccgaagcggagatcgatcgtacggcgcaggcgttcgccgtggcggtgaaaaagttcgggcagccactgccggccgagccgcagtccaaaatcaaagtgcagagttatctactctcccgcggcttttcctttgacgaaatccggtctatttatacaaatttataaatagatggcgtgcgggattttacttcgcaccaaagaaaatttatcttattcccactttttacgatcctgaacgctactgcagcgccttactactgcgctattctgttcacgattcgatcttttttttgcatgattccgggacaactatgagcaagagcactgctgagatccgtcaggcgtttctcgactttttccat

SEQ ID NO: 100286 - protein, 355 aa, primary endosymbiont of Sitophilus oryzae
MAIDENKQKALAAALGQIEKQFGKCSIMRLGEDRSMDVETISTGSLSLDIALGAGGLPMGRIVEIYGPESSGKTTLTLQVIAAAQREGKTCAFIDAEHALDPIYAKKLGVDIDNLLCSQPDTGEQALEICDALTRSGAVDVIIVDSVAALTPKAEIEGEIGDSHMRLAARMMSQAMRKLAGNLKNANTLLIFINQIRMKIGVMFGNPETTTGGNALKFYASVRLDIRRIGSVKEGDVVVGSETRVKVVKNKVAAPFKQAEFQIMYGEGINIRGELVDLGVKHKLIEKAGAWYSYNGEKIGQGKANACTFLKDHPELAAELDKKLRDMLLHSADGNSLVSDVESEDESASESNEEF

SEQ ID NO: 100287 - DNA, 1044 bp, Bacillus amyloliquefaciens
  CDS (1)..(1044): transl_table=11
atgagtgatcgtcaggcagccttagatatggctcttaagcaaatagaaaaacaattcggcaaaggttccatcatgaagctcggagaaaaaacggatacaagaatttcaacggtgccgagcggttcccttgcacttgataccgctctcggaataggcggatacccgcgcggacggattattgaagtatacggacctgaaagctcaggtaaaacgactgtagcgcttcacgcaatcgctgaggttcaggaaaaaggcggacaggcagcatttattgatgccgagcatgctcttgatcctgtgtacgcgcaaaagctcggtgtcaatatcgaagagctgctgctttctcagccggatacgggagagcaggcgctggagattgctgaagcgctggtgcgaagcggagctgtcgatatcgtagtcgttgactctgttgcggcgcttgttccaaaagctgaaattgaaggtgacatgggtgattcacacgtcggtttacaggcgcgtctcatgtctcaggcgctccgtaagctttccggcgccatcaataaatctaaaacaatcgcaatctttattaaccagattcgtgaaaaagtcggcgttatgttcggaaatccggagacgacaccgggcggccgcgcgctgaaattctattcttccgtgcgtcttgaagtgcgccgtgccgagcaattaaagcagggcaacgacgttatggggaataaaacgagaattaaagtcgtaaaaaacaaagtcgctcctccgttccgtacggctgaagtggacattatgtacggtgaaggaatctccaaagaaggggaaatcatcgaccttggaactgaacttgatatcgtgcagaaaagcggctcgtggtattcttatgaagaagaacgcctcggacagggccgtgaaaacgccaagcagttcttaaaagaaaataaagacatcatgctgatgattcaagaacaaatccgtgaacattacggtttggacaataacggtgttacggaaaaagcggaagaagttcaggaagagcttgaattcgaagaataa

SEQ ID NO: 100288 - protein, 347 aa, Bacillus amyloliquefaciens
MSDRQAALDMALKQIEKQFGKGSIMKLGEKTDTRISTVPSGSLALDTALGIGGYPRGRIIEVYGPESSGKTTVALHAIAEVQEKGGQAAFIDAEHALDPVYAQKLGVNIEELLLSQPDTGEQALEIAEALVRSGAVDIVVVDSVAALVPKAEIEGDMGDSHVGLQARLMSQALRKLSGAINKSKTIAIFINQIREKVGVMFGNPETTPGGRALKFYSSVRLEVRRAEQLKQGNDVMGNKTRIKVVKNKVAPPFRTAEVDIMYGEGISKEGEIIDLGTELDIVQKSGSWYSYEEERLGQGRENAKQFLKENKDIMLMIQEQIREHYGLDNNGVTEKAEEVQEELEFEE

SEQ ID NO: 100289 - DNA, 1487 bp, Chlamydomonas reinhardtii
  CDS (121)..(1365)
cgtagacgcacctgccaggacggatttgcgagctcgcttccaacgcacaacgagagagaacaaagtcacgtcaatttttccgcgacccgctagctccttttactcggttcgcttgaagccatgcagaccgcaattcaaatgcctagtggtggctgcttgagcagtggggcccgggcccggagcagcgcacgggccactcaacagattctttgcgcgccacgtcgcgacgtcgttgcgaaggcgcggcgcaccaaaactgccacgacaacctatactcagggcgaacgcccggatgccgataccaaggccaagctcttcaacgagacagtcgaccgcatcactcgccgctttggtgacgggtccatcatgcgtctcagcgacagcgtcacggcgaacattgagaccttccccagcggctcactcacgctggacgcggccctgggcggcggctacccccgcggccgcattatcgaggtgtacggtccggaggccagcggcaagaccacgctggccatgcacggctgcggcgagatccagcgcctgggcggcacggtcgcctacatagacgtggagcacgccttcgaccgcacctacgcgagcgctgggcatcacctgaacaacttctggtacgcgcagcccatgacgggcgaggaggcgctggaggtgatggacgagctgtgccgcagcaacgtgtgcgacctggtggtcatcgactcggtggcggcgctggtgccgagggccgagctggagggagacatcggcagcgtgcagatcggcagccaggcccgcctgctgagccaggccctgcgcaagctgtccgcctccgcctccaaaagcaagaccaccctgttcttcatcaaccagctgcggaacaagattggcgtcatgttcggcaaccccgagaccacctcgggcggcaacgcgctcaagtactacagcagcgtgcgcatcgacatccgcaagaaggagacactcagcgagtcggaccaggcctacgccaaccgggtccgcgccaaggtggtgaagaacaaggtggcctcgccgcataaggaggctctgtttgagatctactacggccgtggcattgacttcctgggcggactcatcgacaccgcggagcgcctcaaggtgctcacccgccgcggtgccttctactactacggcgaccagcggctgggccagggccgggagaaggtgttggcggcgctgcgcgaggacgcggagcgcacagccgccattgaggccgcggtgcgggacgtgctgcgggccaaccccgacgcggcgctggtggacacggaggagggcgacgacgacgacggcctgggcaccgcctccaccgtggcgctggacatggacgacgtgtagggggaggcaggagggctggcaggcagggaggccagtgctgttatggggggggggctgtggtagtacacagctgggcggcagtgggcagcgccaggacgccacctgagcccaattcgccctat

SEQ ID NO: 100290 - protein, 414 aa, Chlamydomonas reinhardtii
MQTAIQMPSGGCLSSGARARSSARATQQILCAPRRDVVAKARRTKTATTTYTQGERPDADTKAKLFNETVDRITRRFGDGSIMRLSDSVTANIETFPSGSLTLDAALGGGYPRGRIIEVYGPEASGKTTLAMHGCGEIQRLGGTVAYIDVEHAFDRTYASAGHHLNNFWYAQPMTGEEALEVMDELCRSNVCDLVVIDSVAALVPRAELEGDIGSVQIGSQARLLSQALRKLSASASKSKTTLFFINQLRNKIGVMFGNPETTSGGNALKYYSSVRIDIRKKETLSESDQAYANRVRAKVVKNKVASPHKEALFEIYYGRGIDFLGGLIDTAERLKVLTRRGAFYYYGDQRLGQGREKVLAALREDAERTAAIEAAVRDVLRANPDAALVDTEEGDDDDGLGTASTVALDMDDV

SEQ ID NO: 100291 - DNA, 1077 bp, Myxococcus xanthus
  CDS (1)..(1077): transl_table=11
atggccgtgaatcaggagaaggaaaaggcgatcgaactggcgatgtccgcggtggagcgccagttcggcaaggggtccatcatgcggctcggcaacgacgagccaatgatgcgagacgttcaggccatcccgacgggctccatctcgctggacatcgccctgggcgtgggtggcgtgcccaagggccgcatcatcgaaatcttcgggccggagtcgtccggtaagacgacgctgtgtctccacatcgtcgccgaagcgcagaagcgcggcggcatctgcggctacgtggacgcggagcacgcgctggacgtgggctacgcgcgcaagctgggcgtgcgcaccgatgacctgctgctgagccagccggacaccggtgagcaggcgctggaaatcgcggagatgctggtgcgctcgggcgccatcgacgtgctggtggtggactcggtggccgcgctcgtgccgaaggcggagctcgagggtgagatgggcgacgcgcacatgggtgtgcaggcccgcctcatgagccaggcgctccgcaagctgacgggcaccatcgccaagagccagacgtgcgtcatcttcatcaaccagattcgcatgaagattggcgtgatgttcggcaacccggagacgacgacgggcggtaacgcgctgaagttctacgcgtcgcagcgcctggacatccgccgcatcggcgccatcaagaatggcgacaacgtggtgggcagccgcacccgcgtgaaggtggtgaagaacaaggtcgcgccgccgttcaaggaagtcgagttcgacatcatgtacggcacgggcatctcccgtgagggcgacctcatcgacctcgcctccaacgagaacatcgtggagaagagcggcagctggttctccttcaatggtgagcgcatcggccagggccgggagaacgtgaaggagtacctgcgcgagcacccggagatcgcgaaggacatcgaaggccgcgtgctggagaagtacggcatcggcaagtcgggtgcgccgtcgccgcggcgccggacgagtccgcgccggccgaaggtggcagcgagaagcgcggccgtgtga

SEQ ID NO: 100292 - protein, 358 aa, Myxococcus xanthus
MAVNQEKEKAIELAMSAVERQFGKGSIMRLGNDEPMMRDVQAIPTGSISLDIALGVGGVPKGRIIEIFGPESSGKTTLCLHIVAEAQKRGGICGYVDAEHALDVGYARKLGVRTDDLLLSQPDTGEQALEIAEMLVRSGAIDVLVVDSVAALVPKAELEGEMGDAHMGVQARLMSQALRKLTGTIAKSQTCVIFINQIRMKIGVMFGNPETTTGGNALKFYASQRLDIRRIGAIKNGDNVVGSRTRVKVVKNKVAPPFKEVEFDIMYGTGISREGDLIDLASNENIVEKSGSWFSFNGERIGQGRENVKEYLREHPEIAKDIEGRVLEKYGIGKSGAPSPRRRTSPRRPKVAARSAAV

SEQ ID NO: 100293 - DNA, 1293 bp, Arabidopsis thaliana; identical to SEQ ID NO: 100113
  CDS (163)..(1293)

SEQ ID NO: 100294 - protein, 376 aa, Arabidopsis thaliana
MSKKEIALQQALDQITSSFGKGSIMYLGRAVSPRNVPVFSTGSFALDVALGVGGLPKGRVVEIYGPEASGKTTLALHVIAEAQKQGGTCVFVDAEHALDSSLAKAIGVNTENLLLSQPDCGEQALSLVDTLIRSGSVDVIVVDSVAALVPKGELEGEMGDAHMAMQARLMSQALRKLSHSLSLSQTLLIFINQVRSKLSTFGGFGGPTEVTCGGNALKFYASMRLNIKRIGLIKKGEETTGSQVSVKIVKNKLAPPFRTAQFELEFGKGICKITEIIDLSIKHKFIAKNGTFYNLNGKNYHGKEALKRFLKQNESDQEELMKKLQDKLIADEAADKETESESEEEDSLRVVVSPDNTDDESPALVVGAAAVVVEAA

SEQ ID NO: 100295 - DNA, 1351 bp, Arabidopsis thaliana
  CDS (1)..(1320)
atggattcacagctagtcttgtctctgaagctgaatccaagcttcactcctctttctcctctcttccctttcactccatgttcttctttttcgccgtcgctccggttttcttcttgctactcccgccgcctctattctccggttaccgtctacgccgcgaagaaactctcccacaaaatcagttctgaattcgatgacagaatcaacggcgctctctctcccgacgctgattcccgcttcctcgaccgccaaaaggctttagaggcagctatgaatgacattaacagttcatttggtaaaggaagtgtaacaagattggggagtgctggtggagcattagtggagaccttttcgagtggtattttgactcttgatcttgctttaggtggaggcctaccaaagggtcgggtagtcgaaatatatggaccagaaagtagtggcaagaccacgctagcactccatgctattgctgaagtgcagaagcttggaggcaatgcaatgcttgttgatgcagagcatgcctttgatccagcgtattctaaagcattaggtgttgatgtagaaaatttgatagtgtgccagccagataatggcgagatggctttagaaactgcagaccgtatgtgtcgctcaggtgcggttgaccttatatgtgttgattctgtttcagcacttactccacgagctgagattgaaggtgagattggaatgcagcaaatgggtttgcaagctcgtcttatgagtcaagctcttcgtaaaatgtcaggaaacgcctctaaagctgggtgtactcttattttcctaaaccaaataagatacaagattggtgtgtactatgggaatccagaggtgactagcggaggaattgcgttaaagttcttcgcgtcggtccgtctagaaattcgttctgctgggaagatcaaatctagcaaaggggatgaagatattggtcttcgggctcgtgtaagagtgcagaagagcaaggtttcaagaccgtataagcaagcagagtttgagattatgtttggggaaggagtcagtaaactgggatgcgttcttgattgtgctgaaattatggaagttgtggtcaagaaaggttcctggtacagctacgaagaccaaaggctcgggcaaggaagagagaaagcactgcagcacttaagggaaaaccctgctcttcaagacgaaattgagaagaaagtgagattgttgatgttagatggagaagttcatcgatcaactcctttgatgagcagcagctcttcctcggcttcacatcgcgaagaagaagaagaagactcgcttgacgatttccaatgacataacacttaagcttgagactttcggatct

SEQ ID NO: 100296 - protein, 439 aa, Arabidopsis thaliana
MDSQLVLSLKLNPSFTPLSPLFPFTPCSSFSPSLRFSSCYSRRLYSPVTVYAAKKLSHKISSEFDDRINGALSPDADSRFLDRQKALEAAMNDINSSFGKGSVTRLGSAGGALVETFSSGILTLDLALGGGLPKGRVVEIYGPESSGKTTLALHAIAEVQKLGGNAMLVDAEHAFDPAYSKALGVDVENLIVCQPDNGEMALETADRMCRSGAVDLICVDSVSALTPRAEIEGEIGMQQMGLQARLMSQALRKMSGNASKAGCTLIFLNQIRYKIGVYYGNPEVTSGGIALKFFASVRLEIRSAGKIKSSKGDEDIGLRARVRVQKSKVSRPYKQAEFEIMFGEGVSKLGCVLDCAEIMEVVVKKGSWYSYEDQRLGQGREKALQHLRENPALQDEIEKKVRLLMLDGEVHRSTPLMSSSSSSASHREEEEEDSLDDFQ

SEQ ID NO: 100297 - DNA, 1170 bp, Arabidopsis thaliana
  CDS (1)..(1170)
atgggtcgactctcatgggccagtccgattcagagattccgtttcttctcttacttatctcagctgaatggaagaagaagcgttttggcttgctctggctatgaaaatcgttatctttcgtctttagttgaagcttcagattgtgaacttgatgaagttccagatgatagaaaagtagcggagaaagacactgctctacatttagcattgtcacagctttcaggtgattttgataaagactctaagttgtcattgcagcggttttacagaaaaaggagagtttctgtgatatccacgggttccctcaaccttgatctagctcttggagttggaggattgccaaagggaagaatggttgaggtttacggaaaagaagcatctggaaagacaactctagctctgcatatcatcaaggaagctcaaaagcttggaggttattgcgcttatcttgatgcagagaatgccatggatccttctctagcagaatcaataggtgtgaacacagaagagcttctgatatcacgacctagttctgctgaaaagatgctaaatattgttgatgtgctgaccaagagtgggtcagtagacgtaattgtggtagacagtgttgctgctcttgcccctcaatgtgaacttgatgctcctgtaggagaaagatacagagacacacaatcaagaataatgacacaggcgctcagaaaaatccattactcagttggctattctcagacactgatcgtttttcttaatcaggtcagatcacatgtgaaatctaacatgcatttcccgcacgccgaagaagtgacttgtggaggaaacgcattaccgtttcatgcagctatacgtctcaaaatgataagaaccgggctaataaagactgccaataagataagtggtctcaatgtctgcgtccaagtggtgaagaataaactggcgcccggaaagaagaaatctgaattggggattcactttggtcatggtttctacgtggagcgagaggtattagaattggcttgtgagcatggagttatcttaagagaaggaactagctatttcattgaaggcgaggtcattgaagggaaagacgcagctgagaagtatctggtggaaaataaagaggctctcgatactgtcgttgcaatcctgaggaaccagctcttcaagatgtga

SEQ ID NO: 100298 - protein, 389 aa, Arabidopsis thaliana
MGRLSWASPIQRFRFFSYLSQLNGRRSVLACSGYENRYLSSLVEASDCELDEVPDDRKVAEKDTALHLALSQLSGDFDKDSKLSLQRFYRKRRVSVISTGSLNLDLALGVGGLPKGRMVEVYGKEASGKTTLALHIIKEAQKLGGYCAYLDAENAMDPSLAESIGVNTEELLISRPSSAEKMLNIVDVLTKSGSVDVIVVDSVAALAPQCELDAPVGERYRDTQSRIMTQALRKIHYSVGYSQTLIVFLNQVRSHVKSNMHFPHAEEVTCGGNALPFHAAIRLKMIRTGLIKTANKISGLNVCVQVVKNKLAPGKKKSELGIHFGHGFYVEREVLELACEHGVILREGTSYFIEGEVIEGKDAAEKYLVENKEALDTVVAILRNQLFKM

SEQ ID NO: 100299 - DNA, 1050 bp, Acinetobacter sp
  CDS (1)..(1050): transl_table=11
atggatgataataaaagcaaggcattacaagctgctttaagtcagattgaaaaacaatttggcaaaaatacagtaatgcgtttaggtgataataccgttcaagctgttgaagccgtttcgacaggctctcttactctagatattgcattaggtattggtggcttacctaaagggcgtattgtagagatttacggtcctgaatcttctggtaaaacaaccatgactttgcaagcaattgcacaatgtcagaaagcaggtggtacctgtgcttttattgatgcagaacatgcattagaccctcagtatgcccgtaagctgggtgtagacatagacaatcttttggtatcgcagcctgatcatggtgaacaagctctggaaattgcagatatgcttgtacgctctggtgcgattgatctgattgtagtcgactctgtagcagcattaaccccaaaagccgaaattgaaggtgaaatgggcgactcccacatgggtttacaagcccgcttaatgagtcaagccttacgtaaaatcacgggtaatgctaaacgttcgaattgcatggtaatcttcattaaccagattcgtatgaaaattggcgtaatgtttggcagcccagaaaccacaactggtggtaatgcactaaaattctatgcatctgtacgtctagatatacgccgtattggtcaagttaaagaaggtgatgaaatcattggttctgaaaccaaagtcaaagtcgttaaaaataaaatggcccctcctttccgtgaagcaatcttccaaattttatatggcaagggtgtcaatcaacttggcgaattggttgatcttgcagttcaacaaaatattgtacaaaaagctggtgcttggtattcataccaaggcaataaaattggtcagggtaagaataacgtgattcgttatcttgaagagaaccctcagatttctacagaaattgaagcggttatccgtgaacaattattgactaaggcatcagatcagaccgctgctcacgatgaaactgaagaagaaccagatttactggaaagttaa

SEQ ID NO: 100300 - protein, 349 aa, Acinetobacter sp
MDDNKSKALQAALSQIEKQFGKNTVMRLGDNTVQAVEAVSTGSLTLDIALGIGGLPKGRIVEIYGPESSGKTTMTLQAIAQCQKAGGTCAFIDAEHALDPQYARKLGVDIDNLLVSQPDHGEQALEIADMLVRSGAIDLIVVDSVAALTPKAEIEGEMGDSHMGLQARLMSQALRKITGNAKRSNCMVIFINQIRMKIGVMFGSPETTTGGNALKFYASVRLDIRRIGQVKEGDEIIGSETKVKVVKNKMAPPFREAIFQILYGKGVNQLGELVDLAVQQNIVQKAGAWYSYQGNKIGQGKNNVIRYLEENPQISTEIEAVIREQLLTKASDQTAAHDETEEEPDLLES

SEQ ID NO: 100301 - DNA, 1059 bp, Actinobacillus actinomycetemcomitans
  CDS (1)..(1059): transl_table=11
atggcaactcaagaagaaaagcaaaaagcactcgacgcggcgttaggtcaaattgaaaaacaatttggtaaaggcgccatcatgaaactcggcgacagccaaaaactggacattgaagcgatttccaccggttctttcggtcttgacctagcactaggcatcggcggtttgccgatggggcgtatcgtggagattttcgggccggaatcttcaggtaaaactaccttaaccctttctgtgattgcggaagcgcaaaaaaccggcaaaacctgtgcctttattgatgcggaacatgctttagacccgatttatgcctccaaactcggcgtggatgtaaaagaacctttagtttcccagccggacaacggcgaacaggcgctggaaatttgtgatgcgttggtgcgttccggtgcggtggatgtaattatcgttgactccgttgccgccttaacgccgaaagcggaaattgaaggcgacatgggcgattcccacatgggattacaagcgcgtttaatgtctcaagcattgcgtaaacttaccagccaaattaaaaacgccaactgcttggtgattttcatcaaccaaattcggatgaaaatcggcgtgatgttcggtaatccggaaaccaccaccggcggtaacgcgttgaaattctatgcctccgtgcgtttggatattcgccgcgtgggttctatcaaagagggtgatgaagttatcggtaatgaaactcgtgtgaaagtggtgaaaaacaaagtggcgccaccgttccgccaagtggatttccaaattctgtacggcgaaggtatttccaaagaaagcgaactgattgagctcggcgtgaaacataaactcatcagcaaagcaggtgcgtggtacgcttaccaaaacgagaaaatcggtcagggcaaaaccaatgctatgaaatggttgaaagacaatcctgaacaagccaaatttatcgaaagcaccttgcgtgatgaattgttggcacatccggaatctgccatcactgcggaagtagaagacgaagcgggtaatggcgaaggcgatttcgaataa

SEQ ID NO: 100302 - protein, 352 aa, Actinobacillus actinomycetemcomitans
MATQEEKQKALDAALGQIEKQFGKGAIMKLGDSQKLDIEAISTGSFGLDLALGIGGLPMGRIVEIFGPESSGKTTLTLSVIAEAQKTGKTCAFIDAEHALDPIYASKLGVDVKEPLVSQPDNGEQALEICDALVRSGAVDVIIVDSVAALTPKAEIEGDMGDSHMGLQARLMSQALRKLTSQIKNANCLVIFINQIRMKIGVMFGNPETTTGGNALKFYASVRLDIRRVGSIKEGDEVIGNETRVKVVKNKVAPPFRQVDFQILYGEGISKESELIELGVKHKLISKAGAWYAYQNEKIGQGKTNAMKWLKDNPEQAKFIESTLRDELLAHPESAITAEVEDEAGNGEGDFE

SEQ ID NO: 100303 - DNA, 1092 bp, Agrobacterium tumefaciens
  CDS (1)..(1092): transl_table=11
atggcacaaaattctttgcgtctcgtagaggataaatcggtggataaaagcaaggcactggaagcggcgctctcccagatcgaacggtcgttcggcaagggatcgatcatgaagctcggttccaatgaaaatgtggttgaagtggaaaccgtttcgacgggctcgctcagcctggatatcgcgctcggcatcggcggcttgccgaaggggcgtatcattgagatttacggcccggaaagctccggtaaaacgacgctggcgctgcagacgatcgcggaagcccagaagaagggcggcatctgcgccttcgtggacgccgaacacgcgctcgatccggtttatgcccgcaagctcggtgtggatttgcagagccttctgatctcgcagcccgataccggcgagcaggcgcttgagatcaccgatacgctggtgcgttcgggcgctgtggacgttcttgtcatcgattcggttgcggccttgacgccgcgggcggaaatcgaaggtgaaatgggcgatagcctgccgggtcttcaggcccgtctgatgagccaggcgctgcgcaagctgaccgcctcgatctccaagtcgaagtgcatggtgatcttcatcaaccagattcgcatgaagatcggcgtcatgtttggttcgccggaaacgacgacgggcggtaacgctctcaagttctatgcgtccgtccgcctcgacatccgccgtatcggcgccgtcaaggagcgcgaagaggttgtcggcaaccagacgcgcgtcaaggtcgtcaagaacaagatggcgccgcccttcaaacaggttgaattcgacatcatgtatggcgaaggtgtttccaagaccggtgagctggtcgatctcggcgtgaaggccggtatcgtcgagaagtccggcgcatggttctcctataacagccagcgtctggggcaggggcgtgaaaacgccaagacctttctgcgcgacaatccggatacggccaatgagatcgaactggcgttgcgccagaatgccggtctgattgccgaccgcttcctgcagaatggtggcccggacgccggtgaaggcgacgacggcagcgacgagggctga

SEQ ID NO: 100304 - protein, 363 aa, Agrobacterium tumefaciens
MAQNSLRLVEDKSVDKSKALEAALSQIERSFGKGSIMKLGSNENVVEVETVSTGSLSLDIALGIGGLPKGRIIEIYGPESSGKTTLALQTIAEAQKKGGICAFVDAEHALDPVYARKLGVDLQSLLISQPDTGEQALEITDTLVRSGAVDVLVIDSVAALTPRAEIEGEMGDSLPGLQARLMSQALRKLTASISKSKCMVIFINQIRMKIGVMFGSPETTTGGNALKFYASVRLDIRRIGAVKEREEVVGNQTRVKVVKNKMAPPFKQVEFDIMYGEGVSKTGELVDLGVKAGIVEKSGAWFSYNSQRLGQGRENAKTFLRDNPDTANEIELALRQNAGLIADRFLQNGGPDAGEGDDGSDEG

SEQ ID NO: 100305 - DNA, 1047 bp, Amycolatopsis mediterranei
  CDS (1)..(1047): transl_table=11
atgcctgcagcacccgacaaggacaaggcgctcgagctcgcgctcgcgcagatcgacaagcagtacggcaagggctcggtcatgcgcctcggcgaagagggccgcgcccccatcgccgtgatccccaccggcgcgatcgccctcgacgtcgcgctcggcatcggcggcctgccccgcggccgggtcatcgaggtctacggcccggagtcctccggtaagaccacggtcgccctgcacgcggtggcgaacgcccagcgcaacggtggcatcgcggccttcatcgacgcggagcacgcgctggacccggactacgccaagaagctcggcgtggacaccgacgccctgctcgtctcccagcccgacaccggtgagcaggccctggagatcgcggacatgctggtccgctccggcgcgctcgacatcctggtcatcgactccgtggccgcgctcgtgccccgcgccgagatcgaaggcgagatgggcgactcgcacgtcggtctccaggcccggctgatgagccaggcgctgcgcaagatgaccggtgcgatgaacaactccggcaccaccgcgatcttcatcaaccagctgcgcgagaagatcggcgtcatgttcggctccccggaaaccaccaccggtggcaaggcgctgaagttctacgcgtcggtccggctcgacgtccgccgcatcgagacgctcaaggacggcggcgaggcggtcggcaaccgcacccgcgtcaaggtcgtgaagaacaagatggccccgcccttcaagcaggccgaattcgacatcctgtacggccacggcatctcccgcgagggttcgctcatcgacatgggggtcgaccaggccatcctgcgcaagtccggcgcctggtacacctacgagggcgaccagctcggccagggcaaggagaacgcccggaagttcctgcgcgacaacccggacatcgccaacgagatcgagaagcggatcaaggagaagctcggtatcggtgcgcagctcgacgcggaagccgtcgaggccgttccggcaccggtcgacttctag

SEQ ID NO: 100306 - protein, 348 aa, Amycolatopsis mediterranei
MPAAPDKDKALELALAQIDKQYGKGSVMRLGEEGRAPIAVIPTGAIALDVALGIGGLPRGRVIEVYGPESSGKTTVALHAVANAQRNGGIAAFIDAEHALDPDYAKKLGVDTDALLVSQPDTGEQALEIADMLVRSGALDILVIDSVAALVPRAEIEGEMGDSHVGLQARLMSQALRKMTGAMNNSGTTAIFINQLREKIGVMFGSPETTTGGKALKFYASVRLDVRRIETLKDGGEAVGNRTRVKVVKNKMAPPFKQAEFDILYGHGISREGSLIDMGVDQAILRKSGAWYTYEGDQLGQGKENARKFLRDNPDIANEIEKRIKEKLGIGAQLDAEAVEAVPAPVDF

SEQ ID NO: 100307 - DNA, 1080 bp, Anaplasma marginale
  CDS (1)..(1080): transl_table=11
gtgtccatgtcaggcagtaagaaagatgttgaatctgagaagcagaaggcgttggatgcggccataagccagatagaaagggcgtttgggcggggtgccattatgaagttgaagcagcatcctgccgagaagatggatagcgtgtctacaggttctatagctctggatgcggcgttgggtattggagggttgccgaaaggtaggatagtagagatttttggtcctgagagctccgggaagactacacttgcgcttcacgtcattgcagaggcccaaaagcagggcggtaactgtgcttttattgatgccgaacatgcgttggacaccgtgtacgccagaaagctgggcgtaaatgtgggggatttgatagtctcacagcccgacaccggcgagcaggctttgcacattgttgaatacttagtgtgctccggtgccatagatgtgatagtagtggattccgtcgccgcgctcactcccagggcggaaatagagggtgacatgggtgaccagcacatggggttgcaggctaggttgctgagccacgcgcttcgcaagctgacctcggtggtctccaaggctaactgtatattggtgtttatcaaccagatacgcataaagataggtgtgatttacggcaacccggaagtgacaacgggtggtagtgcgctcaagttctacacgtcaatacggcttgacattcgcaaagtaagcgcgattaaagacaaagacaacgttatagggaaccagacgagagtaaaggtcgtcaaaaacaaggttgcacccccgttcaagcaggcggagtttgacatcgtgtacaatgagggcatatcgaagctgggcgagatagtcgacatgggcgtcaagttcggttttgtcgagaagtctggtgcgcactattcctacggcgcggtaaagttgggacaaggtagggagaatgccaagggttatttgaaaagcaacccagatgtcgcgaatgagttagagcagaaaatcagagcatgccttgcggaaagtatgcacaatagcgatctgttcgctgtagatgagcgtaccgatgtgttggaggaggaggttttctag

SEQ ID NO: 100308 - protein, 359 aa, Anaplasma marginale
MSMSGSKKDVESEKQKALDAAISQIERAFGRGAIMKLKQHPAEKMDSVSTGSIALDAALGIGGLPKGRIVEIFGPESSGKTTLALHVIAEAQKQGGNCAFIDAEHALDTVYARKLGVNVGDLIVSQPDTGEQALHIVEYLVCSGAIDVIVVDSVAALTPRAEIEGDMGDQHMGLQARLLSHALRKLTSVVSKANCILVFINQIRIKIGVIYGNPEVTTGGSALKFYTSIRLDIRKVSAIKDKDNVIGNQTRVKVVKNKVAPPFKQAEFDIVYNEGISKLGEIVDMGVKFGFVEKSGAHYSYGAVKLGQGRENAKGYLKSNPDVANELEQKIRACLAESMHNSDLFAVDERTDVLEEEVF

SEQ ID NO: 100309 - DNA, 1110 bp, Azospirillum lipoferum
  CDS (1)..(1110): transl_table=11
atgtcgtccgcacagcttcgtttggtcgagaaggattccatggacaagcagaaggcgctcgatgccgccctgagccagatcgaacgcgcgttcggcaagggctcgatcatgaagctcggcgcccgtgagaacctggtcgagacggaggtcatttccaccggctccctgggtctcgatatcgcgctgggcatcggtggcctgccgaagggccgcatcgtcgaaatctacgggccggaaagctcgggcaagaccacgctggcgctgcacgccatcgcccaggcccagaaggccggcggcacctgcgccttcgtggacgccgaacacgcgctcgacccgtcctatgcccgcaagctgggcgtcaacatcgacgagttgctgatctcccagccggatgccggcgagcaggcgctggagatcgccgatacactggtgcgctccggcgccatcgacgtgctggtcgtcgactcggttgccgcgctggttccgcgcgccgaactggaaggcgagatgggtgacgccatgtcgggcctgcatgcccgcctgatgagccaggcgctgcgcaagctgaccggctcgatctccaagtcgaattgcctggtgatcttcatcaatcagatccgcctgaagatcggcgtgatgttcggcaacccggagacgacgaccggcggcaacgcgctgaagttctacgcctccgttcgtctcgacatccgccgcatcggctcgatcaaggaccgcgacaccgtcgtcggcaaccagacccgcgtcaaggtggtgaagaacaagatggccccgccgttccgcgtggtcgagttcgacatcatgtatggcgagggtgtgtcgaaggtcggcgagttgctcgacctcggcatccaggccggtgtggtcgataagtcgggtgcgtggttcagctatgacggcacccgcatcggccagggccgcgagaatgccaagacctacctgcgcaacaaccccgagatggccgatgcgatcgaggccaagatccgcggcaacgccggtctggtcgccgacgccatgatgggcacccggaagccgacggcgaagcctccacaccggagtgaggttcccagcgagcaggaagcccgctgctga

SEQ ID NO: 100310 - protein, 369 aa, Azospirillum lipoferum
MSSAQLRLVEKDSMDKQKALDAALSQIERAFGKGSIMKLGARENLVETEVISTGSLGLDIALGIGGLPKGRIVEIYGPESSGKTTLALHAIAQAQKAGGTCAFVDAEHALDPSYARKLGVNIDELLISQPDAGEQALEIADTLVRSGAIDVLVVDSVAALVPRAELEGEMGDAMSGLHARLMSQALRKLTGSISKSNCLVIFINQIRLKIGVMFGNPETTTGGNALKFYASVRLDIRRIGSIKDRDTVVGNQTRVKVVKNKMAPPFRVVEFDIMYGEGVSKVGELLDLGIQAGVVDKSGAWFSYDGTRIGQGRENAKTYLRNNPEMADAIEAKIRGNAGLVADAMMGTRKPTAKPPHRSEVPSEQEARC

SEQ ID NO: 100311 - DNA, 1041 bp, Azoarcus sp
  CDS (1)..(1041): transl_table=11
atggacgacaacaaggccaaggccctcgccgccgcgctctcgcagatcgagaagcagttcggcaaaggctcgatcatgcggatgggcgacggcaccatcgaacgtgacatccagacggtgtcgaccggctcgctcggtctcgacatcgcgctcggtctgggcggtttgccgcgcggccgggtcgtcgaaatctacggcccggaatcctccggcaagacgacgttgacgctgcaggtcatcgccgaaatgcagaagctcggcggcaccgccgcattcatcgatgccgagcatgcgctcgacgtcggctacgccgagaagctcggcgtgaacatccaggacctcctgatctcgcagccggacaccggtgagcaggcgctcgagatcgccgacatgctggtgcgttcgggaggcgtcgagatcgtcgtcatcgactcggtcgcggcgctgactccgaaagccgagatcgaaggcgagatgggcgaccagctgcccggcctgcaggcccgcctgatgagccaggcgctcaggaagctcaccgcgaacatcaagcgcaccaacaccctggtgatcttcatcaaccagatccgcatgaagatcggcgtgatgttcggtagcccggagaccacgaccggcggcaacgcgctgaagttctacgcctcggtacggctcgacatccgccgcactggcgcgatcaagaaaggcgacgaagtggtcggctccgagacgcgctgcaaggtcgtcaagaacaaggtcgcgccgccgttcaaggaagcgcatttcgacatcctctacggcgaaggcatctcgcgcgaaggcgagatcatcgacctcggcgtgcagcacaagatcgtcgacaagtccggcgcatggtatgcgtacaagggcgagaagatcggccagggcaaggacaattcacgcgaattcctgcgcgcgaacccggctctcgcgcgcgagatcgaaaacaaggtccgcgcgcaggtcggcctgaacgcgatggctgtcgaggctgcacccgccggggtggctccggtcgagccctga

SEQ ID NO: 100312 - protein, 346 aa, Azoarcus sp
MDDNKAKALAAALSQIEKQFGKGSIMRMGDGTIERDIQTVSTGSLGLDIALGLGGLPRGRVVEIYGPESSGKTTLTLQVIAEMQKLGGTAAFIDAEHALDVGYAEKLGVNIQDLLISQPDTGEQALEIADMLVRSGGVEIVVIDSVAALTPKAEIEGEMGDQLPGLQARLMSQALRKLTANIKRTNTLVIFINQIRMKIGVMFGSPETTTGGNALKFYASVRLDIRRTGAIKKGDEVVGSETRCKVVKNKVAPPFKEAHFDILYGEGISREGEIIDLGVQHKIVDKSGAWYAYKGEKIGQGKDNSREFLRANPALAREIENKVRAQVGLNAMAVEAAPAGVAPVEP

SEQ ID NO: 100313 - DNA, 1433 bp, Azotobacter vinelandii
  CDS (311)..(1360): transl_table=11
tgccggccccgatggcggctcgccggaaaccccggtcggcaccgtctggctggccgggcagatggcgagcgcttgttgcggtgcgccagcagtttcccggcgaccgcggcgaggtacgtcgacggacggtgcaggccgccctggccggtctgatccgcctggttgccgatgggacgctcgaatgaggtgctggacatcacggaaatggatcggcccaggggtaggcgcccgagcttttcctatgctctaatactgtctacttatacagtgtatggcgccgcaaggccctcctgaatacgtgaggtcttcaatggacgagaacaagaagcgcgccttggctgcggccttgggccagatcgaaaagcagttcggcaagggcgcggtgatgcgcatgggcgatcacgagcggcaggcgattccggccatttccaccggttccctggggctggacatcgcgctcggcatcggcggcctgcccaaggggcggatcgtcgagatctacggccccgaatcctccggcaagaccaccctgaccctgtcgaccatcgccgaggctcagaagcagggtgccacctgcgccttcgtcgacgccgagcacgcgctcgatccggactacgccgccaagctcggggtgaacgtcgacgacctcctggtttcccagcccgataccggcgagcaggcgctggagatcaccgacatgctggtgcgttccaacgcggtggacgtgatcatcgtcgactccgtggcggcgctggtgcccaaggcggagatcgagggcgagatgggcgaccagcacgtcggtctgcaggcccgtctgatgtcccaggccctgcgcaagatcaccggcaacatccagaacgccaactgcctggtcatcttcatcaaccagatccgcatgaagatcggtgtgatgttcggcaacccggaaaccaccaccggcgcgaatgccctgaagttctacgcctcggtgcgtctggacatccgccgcaccggcgcggtgaaggagagcgacgaggtgatcggcagcgagacccgcgtcaaggtggtgaagaacaaggtggcgccgccgttccgtcaggccgagttccagattctctacggcaagggcatctaccgtaacggtgagatcatcgacctcggtgtgcaactcggcctgctggagaagtccggcgcctggtacagctaccagggcagcaagatcggccagggcaaggccaatgcggccaagtttctcgaggacaacccggaggtcgccgcagcggtcgagaagagcatccgcgatcagttgctcgccgcgccggccagcgcccgtccggcagccttggccgacgagccggccgacgcggatctcgattattgatgagtgcgtcgatgccggggctcgacagtcccgccgccgtgcgccgggccgccatggacctgctggcgcgtcg

SEQ ID NO: 100314 - protein, 349 aa, Azotobacter vinelandii
MDENKKRALAAALGQIEKQFGKGAVMRMGDHERQAIPAISTGSLGLDIALGIGGLPKGRIVEIYGPESSGKTTLTLSTIAEAQKQGATCAFVDAEHALDPDYAAKLGVNVDDLLVSQPDTGEQALEITDMLVRSNAVDVIIVDSVAALVPKAEIEGEMGDQHVGLQARLMSQALRKITGNIQNANCLVIFINQIRMKIGVMFGNPETTTGANALKFYASVRLDIRRTGAVKESDEVIGSETRVKVVKNKVAPPFRQAEFQILYGKGIYRNGEIIDLGVQLGLLEKSGAWYSYQGSKIGQGKANAAKFLEDNPEVAAAVEKSIRDQLLAAPASARPAALADEPADADLDY

SEQ ID NO: 100315 - DNA, 1032 bp, Bacillus anthracis
  CDS (1)..(1032): transl_table=11
atgagtgatcgtcaagcagcgttagatatggcgttaaaacaaatagagaagcaattcggtaaaggttcaattatgaaattaggagaacaagcagagcgcaaagtttctacggtttctagtggttctttagcacttgatgtggcattaggggtaggcggatacccacgcggccgtattatcgaaatttacggacctgaaagttcaggtaaaacaacagtttcattacacgcaattgcagaagtacagcgtcaaggtggacaagcagcgttcattgatgctgagcatgcaatggatcctgtatatgcacaaaaactaggtgttaacatcgatgaattactattatcacaacctgatacaggggagcaaggtttagaaatcgcagaagcacttgtacgaagtggtgcggttgatattatcgtaattgactctgtagcagctcttgtaccgaaagctgaaattgaaggagacatgggtgactcacacgtaggtttacaagctcgtctaatgtctcaagcacttcgtaaactttcaggtgcaatcaataaatcaaaaacaatcgcaatctttattaaccaaattcgtgaaaaagttggggttatgttcggaaatccagaaacaactccaggtggtcgtgcgttgaaattctattcaactgttcgtcttgaagtgcgtcgtgcggagcaattaaaacaaggtaacgacatcgttggtaataaaacaaaagtaaaagtagttaaaaataaagtggcaccaccattccgtgttgcggaagttgatattatgtacggagaaggtatttcaagagaaggtgaaatcttagatatggcctctgaacttgatatcgttcaaaagagcggtgcttggtactcttataatgaagaacgcttaggacaaggtcgtgaaaattcgaagcagttcttaaaagaaaatacggatttaagagaagaaattgccttctttattcgtgagcatcacggaattagcgaagattctggtgctgaaggtatggaagatccaaatcttcttgattaa

SEQ ID NO: 100316 - protein, 343 aa, Bacillus anthracis
MSDRQAALDMALKQIEKQFGKGSIMKLGEQAERKVSTVSSGSLALDVALGVGGYPRGRIIEIYGPESSGKTTVSLHAIAEVQRQGGQAAFIDAEHAMDPVYAQKLGVNIDELLLSQPDTGEQGLEIAEALVRSGAVDIIVIDSVAALVPKAEIEGDMGDSHVGLQARLMSQALRKLSGAINKSKTIAIFINQIREKVGVMFGNPETTPGGRALKFYSTVRLEVRRAEQLKQGNDIVGNKTKVKVVKNKVAPPFRVAEVDIMYGEGISREGEILDMASELDIVQKSGAWYSYNEERLGQGRENSKQFLKENTDLREEIAFFIREHHGISEDSGAEGMEDPNLLD

SEQ ID NO: 100317 - DNA, 1053 bp, Bacillus clausii
  CDS (1)..(1053): transl_table=11
atgagtgatagaaaacaagcgcttgacatggctttacgccatattgaaaaacaatttggcaaaggctctattatgaagctaggtgaacaggctgaacagcgcgtatcgacggtatcaagcggcaccctcgcccttgatattgctttgggcgtaggtggctatccaaaaggaagagtcattgaagtatatggaccagaatcttccggtaaaacaaccgttgctctccatgcaattgctgaagtgcagcgcaatggtggccaagccgcttttattgatgctgagcatgccctggatcctgtctatgcgagcaaactaggcgttaatatcgatgaactcttgctgtcccaacctgatacaggcgaacaggcacttgaaattgcggaagcacttgtgcgcagcggtgcccttgatatcattgtcattgatagtgtagctgcgcttgtaccaaaagcggaaattgaaggggaaatgggcgactcgcatgtcggcttgcaagcacgtttaatgtcacaagcgctacggaaattatccggagcgatcaataagtcgaaaacgattgcgatcttcatcaaccaaatccgtgaaaaagtcggcgttatgttcggcaatccagaaacgacgccagggggacgcgcccttaaattttactcgtccgtccgcttggaagtgcgccgtgccgaggcgttaaagcaagggaatgagattgtcggcaaccgaaccaaaatcaaagtcgtcaaaaacaaagtcgctccgcctttccgtttagcggaagtcgacattatgtacggagaaggtatttccagggaaggttcgatgcttgacattgcctcggaactcgacattgtcgaaaaaagcggtgcttggtattcttacaaaggcgaccgcctcgggcaaggccgcgagaattcaaaacaatttttgaaagaaaacccggaaattacagccgaaattgagcgtttgattcgtgaccaccacgggctcgacggggaagcgaagctggaagaggcagctgaagaacaagcttttgaagatgtgcctttagatttaaaataa

SEQ ID NO: 100318 - protein, 350 aa, Bacillus clausii
MSDRKQALDMALRHIEKQFGKGSIMKLGEQAEQRVSTVSSGTLALDIALGVGGYPKGRVIEVYGPESSGKTTVALHAIAEVQRNGGQAAFIDAEHALDPVYASKLGVNIDELLLSQPDTGEQALEIAEALVRSGALDIIVIDSVAALVPKAEIEGEMGDSHVGLQARLMSQALRKLSGAINKSKTIAIFINQIREKVGVMFGNPETTPGGRALKFYSSVRLEVRRAEALKQGNEIVGNRTKIKVVKNKVAPPFRLAEVDIMYGEGISREGSMLDIASELDIVEKSGAWYSYKGDRLGQGRENSKQFLKENPEITAEIERLIRDHHGLDGEAKLEEAAEEQAFEDVPLDLK

SEQ ID NO: 100319 - DNA, 1044 bp, Bacillus subtilis
  CDS (1)..(1044): transl_table=11
atgagtgatcgtcaggcagccttagatatggctcttaaacaaatagaaaaacagttcggcaaaggttccattatgaaactgggagaaaagacagatacaagaatttctactgtaccaagcggctccctcgctcttgatacagcactgggaattggcggatatcctcgcggacggattattgaagtatacggtcctgaaagctcaggtaaaacaactgtggcgcttcatgcgattgctgaagttcagcagcagcggacaagcgcgtttatcgatgcggagcatgcgttagatccggtatacgcgcaaaagctcggtgttaacatcgaagagcttttactgtctcagcctgacacaggcgagcaggcgcttgaaattgcggaagcattggttcgaagcggggcagttgacattgtcgttgtcgactctgtagccgctctcgttccgaaagcggaaattgaaggcgacatgggagattcgcatgtcggtttacaagcacgcttaatgtctcaagcgcttcgtaagctttcaggggccattaacaaatcgaagacaatcgcgattttcattaaccaaattcgtgaaaaagtcggtgttatgttcgggaacccggaaacaacacctggcggccgtgcgttgaaattctattcttccgtgcgtcttgaagtgcgccgtgctgaacagctgaaacaaggcaacgacgtaatggggaacaaaacgaaaatcaaagtcgtgaaaaacaaggtggctccgccgttccgtacagccgaggttgacattatgtacggagaaggcatttcaaaagaaggcgaaatcattgatctaggaactgaacttgatatcgtgcaaaaaagcggttcatggtactcttatgaagaagagcgtcttggccaaggccgtgaaaatgcaaaacaattcctgaaagaaaataaagatatcatgctgatgatccaggagcaaattcgcgaacattacggcttggataataacggagtagtgcagcagcaagctgaagagacacaagaagaactcgaatttgaagaataa

SEQ ID NO: 100320 - protein, 347 aa, Bacillus subtilis
MSDRQAALDMALKQIEKQFGKGSIMKLGEKTDTRISTVPSGSLALDTALGIGGYPRGRIIEVYGPESSGKTTVALHAIAEVQQQRTSAFIDAEHALDPVYAQKLGVNIEELLLSQPDTGEQALEIAEALVRSGAVDIVVVDSVAALVPKAEIEGDMGDSHVGLQARLMSQALRKLSGAINKSKTIAIFINQIREKVGVMFGNPETTPGGRALKFYSSVRLEVRRAEQLKQGNDVMGNKTKIKVVKNKVAPPFRTAEVDIMYGEGISKEGEIIDLGTELDIVQKSGSWYSYEEERLGQGRENAKQFLKENKDIMLMIQEQIREHYGLDNNGVVQQQAEETQEELEFEE

SEQ ID NO: 100321 - DNA, 1044 bp, Bartonella henselae
  CDS (1)..(1044): transl_table=11
gtggataaaataaaagctctcgatgctgctctctcacaaattgaacgttccttcggtaaaggctcaattatgcgtcttgggcaaaaagagcaggttgttgaaattgaaacaataccaactggttcattatctttggatattgctttgggtgttggtggattaccaaaggggcgtattgttgaaatttatggaccagaaagttctggaaaaacaacattagctctccatgctattgctgaggcacagaaaaatggtggagtttgtgcttttattgatgcggaacatgctcttgatcctatttatgcgcgtaagcttggtgttgatttagaaaatttattcatttctcaaccagatacgggtgaacaggcgttagaaattacagaaacattggttcgttctggtgctgttgatgtgctcgttgttgattccgtagccgctttgacaccgcgtgcggaaattgatggtgaaatgggagatgctttgcctggattgcaagctcggttaatgagcaaagctttgcggaaactcactgcatcgattttccgctctaactgtatggtcatttttattaatcaaattcgtatgaaaattggggtgatgtttggttctcctgaaacgacaacgggcggaaatgctttaaagttttatgcttctgttcgtttggatattcgccgcattggctctattaaagatagggatatgatcgttggaaatcagacccgtgttaaagtggtcaaaaataagttggcacctccattcaaacaggttgagtttgatattatttatggtgaaggtatttccaaattaggtgagttgattgatttgggggtcaaagttggtactgtagaaaaatctggttcgtggttctcttataattctcaacgtttagggcagggacgagagaatgcgaagcagtttttacgcgaacatccagaaatagctacagagatcgaaacggctttgcgtcaaaatgctggtttaattgcaattgaattgttagaaaatgcaggatcagaaaatacagaaagtgatgaggtcatttga

SEQ ID NO: 100322 - protein, 347 aa, Bartonella henselae
MDKIKALDAALSQIERSFGKGSIMRLGQKEQVVEIETIPTGSLSLDIALGVGGLPKGRIVEIYGPESSGKTTLALHAIAEAQKNGGVCAFIDAEHALDPIYARKLGVDLENLFISQPDTGEQALEITETLVRSGAVDVLVVDSVAALTPRAEIDGEMGDALPGLQARLMSKALRKLTASIFRSNCMVIFINQIRMKIGVMFGSPETTTGGNALKFYASVRLDIRRIGSIKDRDMIVGNQTRVKVVKNKLAPPFKQVEFDIIYGEGISKLGELIDLGVKVGTVEKSGSWFSYNSQRLGQGRENAKQFLREHPEIATEIETALRQNAGLIAIELLENAGSENTESDEVI

SEQ ID NO: 100323 - DNA, 1044 bp, Bartonella quintana
  CDS (1)..(1044): transl_table=11
gtggataaaacaaaagctctcgatgctgctctctcacaaattgaacgttcttttggtaaaggctcaattatgcgtcttgggcaaaaagagcaggttgttgaaattgaaacaatcccaactggttcattatctttggatattgctttgggtgttggtggattaccgaaggggcgtattgttgaaatttatggaccagaaagttctggaaaaacaacattagctcttcatgctattgctgaagcacaaaaaaatggtggggtttgcgcttttattgatgcggagcacgctcttgatcctatttatgcgcgtaaacttggtgttgatttagagaacttgttcatttctcagccagataccggtgaacaggcattggaaattaccgagacacttgttcgttctggtgcggttgatgtactcgttgttgattccgtagccgctttgacgccgcgtgcggaaattgatggtgaaatgggtgatgctttgcccggattgcaagctcggttgatgagcaaagctttgcgaaaattaaccgcatcgattttccgctctaactgtatggtgatctttattaaccaaattcgtatgaaaattggggtgatgtttggttctcctgaaacgacaacaggcggaaacgctttaaagttttatgcttctgttcgtttggacattcgccgcgttggctccattaaagatcgggatatgattgttggtaatcagacacgtgttaaagtggtcaaaaataaattggcacctccatttaaacaggttgagtttgacattatttatggtgaaggtatttctaaattaggtgagttgattgatttgggtgtcaaagttggcattgtggaaaaatcaggttcgtggttctcttataattctcaacgtttaggacaagggcgagaaaatgcgaagcagtttttacgcgaacacgcagagatagcaacagagatcgaaacggctttgcgtcaaaatgctggtttgattgcgattgagttgttagaaaatgcaggatcagaaaatacagaaagcaatgaagcaatttga

SEQ ID NO: 100324 - protein, 347 aa, Bartonella quintana
MDKTKALDAALSQIERSFGKGSIMRLGQKEQVVEIETIPTGSLSLDIALGVGGLPKGRIVEIYGPESSGKTTLALHAIAEAQKNGGVCAFIDAEHALDPIYARKLGVDLENLFISQPDTGEQALEITETLVRSGAVDVLVVDSVAALTPRAEIDGEMGDALPGLQARLMSKALRKLTASIFRSNCMVIFINQIRMKIGVMFGSPETTTGGNALKFYASVRLDIRRVGSIKDRDMIVGNQTRVKVVKNKLAPPFKQVEFDIIYGEGISKLGELIDLGVKVGIVEKSGSWFSYNSQRLGQGRENAKQFLREHAEIATEIETALRQNAGLIAIELLENAGSENTESNEAI

SEQ ID NO: 100325 - DNA, 1134 bp, Bdellovibrio bacteriovorus
  CDS (1)..(1134): transl_table=11
atggcaaacgctactgtagacaacaaagcgaactcagaaaaaatcaaagctcttgaattggctgtttcgactatcgaaaagcaattcggtaaaggctccatcatgcgtttgggcgcgaacgaatctttggttaaagacgttgaagcgatcagcacgggtgcattgagcttggatatcgctttgggtatcggcggtcttcctaaaggtcgtatctgtgaaatctatggaccagagtcctctggtaaaacaactctgtgcttgtctgttatcgctcaagctcagaaaaagggcggcgttgtcgctttcgttgatgccgaacacgctttggatatcaactatgctcgtaaactgggtgtgaacacggaagatcttttgatctctcagccagacactggtgaacaagctttggaaatcactgaaacacttgttcgttccggcgcgattgacgtattggttgtcgactccgtagcagccttggttcctcgtgcagagatcgaaggtgacatgggtgattcccacgttggtttgcaggctcgtttgatgtcccaggctttgcgtaagctgactgcggcgatcaaccgttccaacactcttgttatctttattaaccaaatccgtatgaaaatcggtgttatgttcggtaaccctgaaacaactacgggtggtaacgctttgaaattctactcttctgttcgtttggatgtacgccgtgtgggcgcgatcaaaaacggtgaggacgtgactggtaaccgtactgcggtgaaagttgttaagaataaaatggcgcctccgttcaccaaagttgaattcgacttgatgtacggtgaaggtatctctgaagagggtgaccttctggatctggcagtgactgcgaacatggttgaaaaatccggtgcgtggttctctatcaatggtgagcgcatgggccaaggccgtgatgctgcgaagaacttcctgaaagagcacccagaatacatggttgaacttcgtaagaaaatccttgcagcaaacggtatcggcaaacttttggttgataccaacggcaacaacggtgaagaccacgaaggtacagagccagttgaaatcgaagcagaagatgctgctccgaaaaaaggcaaaaaaggcaaacactag

SEQ ID NO: 100326 - protein, 377 aa, Bdellovibrio bacteriovorus
MANATVDNKANSEKIKALELAVSTIEKQFGKGSIMRLGANESLVKDVEAISTGALSLDIALGIGGLPKGRICEIYGPESSGKTTLCLSVIAQAQKKGGVVAFVDAEHALDINYARKLGVNTEDLLISQPDTGEQALEITETLVRSGAIDVLVVDSVAALVPRAEIEGDMGDSHVGLQARLMSQALRKLTAAINRSNTLVIFINQIRMKIGVMFGNPETTTGGNALKFYSSVRLDVRRVGAIKNGEDVTGNRTAVKVVKNKMAPPFTKVEFDLMYGEGISEEGDLLDLAVTANMVEKSGAWFSINGERMGQGRDAAKNFLKEHPEYMVELRKKILAANGIGKLLVDTNGNNGEDHEGTEPVEIEAEDAAPKKGKKGKH

SEQ ID NO: 100327 - DNA, 1179 bp, Bifidobacterium breve
  CDS (1)..(1179): transl_table=11
atggcacttgagaccaagccggcccaagatccggcaaccgagatcaagcacgagctcgatcccaagcgcaaggcggcgctggacactgctttggcgcaggtcgaaaaaagcttcggcaagggctcggccatgcgcctcggcgatcagcccgtgcaaaatgtcgaagtaatccctaccggttcgctcgcgctcgacatggcgttgggcattggcggcctgccgaagggccgcatcgtggaaatctatggtcccgaatcgtccggtaaaaccacgcttgccctgcatgtggtggccaatgcccagaagaagggtggcgtggccgcctacattgacgccgagcacgcgctcgatccggcctatgctcgcaaacttggcgtggacactgattcgcttatcgtttctcagccggacaacggcgaacaggctcttgagattgcggacatgctgattcgttccggtgcgcttgatgtcatcgttatcgattcggtggcggctctggtgccaaaggccgagatcgaaggcgagatgggagacagccacgtcggtttgcaggcccgactcatgagccaggctctgcgcaagatgaccggtgccttggcccaagcaggtaccaccgccatcttcatcaaccagctacgcgaaaagatcggcgtgttcttcggtaatcccgaaaccactaccggtggcaaggctctgaagttctatgcctccgtgcgtcttgacattcgccgtatccagaccttgaagaacggtgatgaagcggtgggcaaccgtacgcgcgtcaaggtggtcaagaacaagatggccccgcctttcaagtccgccgaattcgacatgctttacggcgaaggtatctcccgcgaaggttcggtcatcgacatggcccaacaggtcggcgtggtcaagaagtccggctcgtggttcacctatgagggcgaccagcttggtcagggtcgagagaaggttcgtcagttcctcaaggacaacccggccatcaccgaagagattgaaaacaaggtcaaggcagaatttggtttgatcggttccgccgatcagtttgccgaagacgaagacgctgctgcagctgccgcagtcagcgaggccgccgcggccgatgccgccaaggacaccaaggccactgcagcgcctgccgccaagtcgtctcgcgccaaggcctga

SEQ ID NO: 100328 - protein, 392 aa, Bifidobacterium breve
MALETKPAQDPATEIKHELDPKRKAALDTALAQVEKSFGKGSAMRLGDQPVQNVEVIPTGSLALDMALGIGGLPKGRIVEIYGPESSGKTTLALHVVANAQKKGGVAAYIDAEHALDPAYARKLGVDTDSLIVSQPDNGEQALEIADMLIRSGALDVIVIDSVAALVPKAEIEGEMGDSHVGLQARLMSQALRKMTGALAQAGTTAIFINQLREKIGVFFGNPETTTGGKALKFYASVRLDIRRIQTLKNGDEAVGNRTRVKVVKNKMAPPFKSAEFDMLYGEGISREGSVIDMAQQVGVVKKSGSWFTYEGDQLGQGREKVRQFLKDNPAITEEIENKVKAEFGLIGSADQFAEDEDAAAAAAVSEAAAADAAKDTKATAAPAAKSSRAKA

SEQ ID NO: 100329 - DNA, 1194 bp, Bifidobacterium longum
  CDS (1)..(1194): transl_table=11
atggcacttgagaccaagccggccaaggacccggcagccgaggacaagcacgagctcgatcccaagcgcaaggcggcgctggacaccgcgctggcgcaggtcgagaagagttttggcaaaggttccgcaatgcgactgggcgaccagcccgagcagaacgtcgaggtgattcccaccggttcgttggctctcgatatggcactcggcatcggcggcctacccaagggccgcatcgtggagatctacggccccgaatcatccggtaagaccacgctcgcattgcatgtggtggccaatgcccagaagaagggcggcgtggcggcctacatcgatgccgaacacgcgctcgacccggcctacgcccgcaagctcggcgtggacaccgactcactcatcgtctcccagccggataacggcgagcaggccctcgaaatcgctgacatgctgattcgctccggtgcgcttgacgtcatcgtcatcgactcggtcgccgctttggtgccgaaggccgaaatcgaaggcgaaatgggagacagccatgttggtttgcaggcccgactcatgagtcaggcgctgcgcaagatgaccggcgcgttggctcaggccggcaccaccgccatcttcatcaaccagctgcgtgagaagatcggcgtgttcttcggcaaccctgaaaccaccaccggtggtaaagctctgaagttctacgcctccgtgcgtctcgacatccgccgcatccagaccttgaagaacggcgacgaagcggtgggcaaccgcacgcgcgtcaaggtggtcaagaacaagatggccccgcctttcaagtccgccgaattcgacatgctctacggtgaaggcatttcccgtgagggctcggtgatcgacatggcccagcaggttggcgtggtcaagaagtccggttcgtggttcacctatgagggtgatcagctcggtcagggacgagagaaggtccgtcagttccttaaggacaacccggccatcaccgaggagattgagaacaaggtcaaggccgagttcggtctgatcggttccgccgatcagttcgcggaagatggcgaagccgcagcagcggccgccgtcagcgaggctgctgcggctgacgtggccaaggacagcaaggccgcagcggcgcctgctgccaaaacgacccgtgccaaggccggcacagctaaggcctga

SEQ ID NO: 100330 - protein, 397 aa, Bifidobacterium longum
MALETKPAKDPAAEDKHELDPKRKAALDTALAQVEKSFGKGSAMRLGDQPEQNVEVIPTGSLALDMALGIGGLPKGRIVEIYGPESSGKTTLALHVVANAQKKGGVAAYIDAEHALDPAYARKLGVDTDSLIVSQPDNGEQALEIADMLIRSGALDVIVIDSVAALVPKAEIEGEMGDSHVGLQARLMSQALRKMTGALAQAGTTAIFINQLREKIGVFFGNPETTTGGKALKFYASVRLDIRRIQTLKNGDEAVGNRTRVKVVKNKMAPPFKSAEFDMLYGEGISREGSVIDMAQQVGVVKKSGSWFTYEGDQLGQGREKVRQFLKDNPAITEEIENKVKAEFGLIGSADQFAEDGEAAAAAAVSEAAAADVAKDSKAAAAPAAKTTRAKAGTAKA

SEQ ID NO: 100331 - DNA, 1062 bp, Bordetella bronchiseptica
  CDS (1)..(1062): transl_table=11
atggacgacaaaaccagcaaggccgccgcggccgagaaagccaaggcgctggccgccgcgctgtcgcagatcgaaaagcagttcggcaagggctcgatcatgcgctatggcgacaacgaggtcgaacacgacatccaggtcgtgtccaccggttcgctggggctggacatcgcgctgggcgtcggcggcctgccgcgcggccgcgtgatcgaggtctacggccccgagtcgtccggcaagaccacgctcacgctgcaggtcatcgccgaaatgcagaagctgggcggcacctgcgccttcgtcgacgccgaacacgcgctggacgtgcaatacgcctccaagctgggcgtcaacctgaccgacctgctgatctcccagccggacacgggcgagcaggccctcgagatcaccgacgcgctggtgcgctcgggctcggtcgacctgatcgtcatcgactcggtcgcggcgctggtgcccaaggccgaaatcgaaggcgagatgggcgactccctgccaggcctgcaggcccgcctgatgagccaggcgctgcgcaagctgacggccaccatcaagcgcaccaactgcatggtcatcttcatcaaccagatccgcatgaagatcggcgtgatgttcggcaaccccgaaaccaccaccggcggcaacgcgctcaagttctattcctcggtgcgcctggacatccgccgcatcggcgccatcaagaagggcgacgaggtggtcggcaacgaaacccgcgtcaaggtggtcaagaacaaggtggcgccgccgttcaagcaggccgagttcgacatcatgtatggcagcggcatctcgcgcgaaggcgaaatcatcgacctgggcgtgcaagccaatgtggtcgacaagtccggcgcctggtacagctacagcggcaaccgcatcggccagggcaaggacaatgtgcgcgagtacctgaaagagcacaaggaaatggccatcgagatcgaaaacaaggtgcgcgagaaccagggcatagtcagccgcgccgccacctttccggccagcgaagccgaagacggcgaataa

SEQ ID NO: 100332 - protein, 353 aa, Bordetella bronchiseptica
MDDKTSKAAAAEKAKALAAALSQIEKQFGKGSIMRYGDNEVEHDIQVVSTGSLGLDIALGVGGLPRGRVIEVYGPESSGKTTLTLQVIAEMQKLGGTCAFVDAEHALDVQYASKLGVNLTDLLISQPDTGEQALEITDALVRSGSVDLIVIDSVAALVPKAEIEGEMGDSLPGLQARLMSQALRKLTATIKRTNCMVIFINQIRMKIGVMFGNPETTTGGNALKFYSSVRLDIRRIGAIKKGDEVVGNETRVKVVKNKVAPPFKQAEFDIMYGSGISREGEIIDLGVQANVVDKSGAWYSYSGNRIGQGKDNVREYLKEHKEMAIEIENKVRENQGIVSRAATFPASEAEDGE

SEQ ID NO: 100333 - DNA, 1089 bp, Bradyrhizobium japonicum
  CDS (1)..(1089): transl_table=11
atgtccgcaactgccctgcgtatcgtcgaaggatcttccatggacaagagtaaagctctggccgccgcgctctcccagatcgagcgccagttcggcaagggctcggtgatgaagctcggcaagaacgaccggtcgatggatgtcgaggcggtgtcctccggttctctcgggctcgacattgcactggggatcggcggtctgcccaaggggcgcgtcgtggaaatctacgggccggaatcctcgggcaagaccacgctggcgctgcacacggtggcggaagcgcagaagaagggcggcatctgtgccttcatcgacgccgagcacgcgctcgacccggtctatgcacgcaagctcggggtcaatatcgacgagctgctgatttcgcagccggacaccggcgagcaggcgctggaaatctgcgacacgctggtgcgctcgggtgcggtggacgttctggtggtcgattcggtcgcggcgctggtgccgaaggccgaactcgagggcgagatgggcgatgcgctgccgggtctccaggcccgcctgatgagccaggcgctgcgcaagctgacggcctccatcaacaagtcccacaccatggtgatcttcatcaaccagatccgcatgaagatcggtgtgatgtatggctcaccggagaccaccaccggcggcaacgcgctgaagttctacgcctccgtccgcctcgacatccgccgcatcggcgcgatcaaggagcgcgacgaagtggtcggcaacaccacgcgcgtcaaggtggtgaagaacaagctggcgccgcccttcaagcaggtcgagttcgacatcatgtacggcgagggcgtttccaagatgggcgagatcctcgatctcggcgtcaaggccggcatcgtcgaaaagtccggcgcctggttctcctatgacagccagcgcctcggccagggccgcgagaactcgaaagcgttcctgaaggccaaccccgacatcaccgccaagatcgagaccgcgatccgccagaactccggcctgatcgccgagcagattctggccggcacccctgagcgcgacgccgacggcgaggagccggcggacgagtaa

SEQ ID NO: 100334 - protein, 362 aa, Bradyrhizobium japonicum
MSATALRIVEGSSMDKSKALAAALSQIERQFGKGSVMKLGKNDRSMDVEAVSSGSLGLDIALGIGGLPKGRVVEIYGPESSGKTTLALHTVAEAQKKGGICAFIDAEHALDPVYARKLGVNIDELLISQPDTGEQALEICDTLVRSGAVDVLVVDSVAALVPKAELEGEMGDALPGLQARLMSQALRKLTASINKSHTMVIFINQIRMKIGVMYGSPETTTGGNALKFYASVRLDIRRIGAIKERDEVVGNTTRVKVVKNKLAPPFKQVEFDIMYGEGVSKMGEILDLGVKAGIVEKSGAWFSYDSQRLGQGRENSKAFLKANPDITAKIETAIRQNSGLIAEQILAGTPERDADGEEPADE

SEQ ID NO: 100335 - DNA, 1086 bp, Brucella abortus
  CDS (1)..(1086): transl_table=11
atgtctcaaaattcattgcgacttgttgaggataattcagtggacaagacaaaagctctcgacgcggcattgtcgcaaatcgaacgggcgttcggcaaaggctcaatcatgcgtctgggccagaacgatcaggtggtcgaaatcgaaaccgtatcgaccggctcgctctcgctcgatattgccttgggggttggcggcttgcccaagggacgtatcgtggaaatctatgggccggaaagttccggtaaaaccacgcttgccttgcacaccatcgctgaagcgcagaagaagggcggcatctgcgcattcgtcgatgcggaacatgcgcttgacccggtctatgcgcgcaagctcggtgtcgatcttgaaaatcttctgatctcgcagcccgatacgggtgaacaggcgcttgaaatcaccgatacgctcgtgcgctctggcgccatcgacgttctcgttgtcgactcggtcgcagccctgacgccgcgtgctgaaatcgaaggtgaaatgggggattccctgccgggccttcaggcccgtctcatgagccaggcgctgcgcaagcttactggctccatttcccgttcaaactgcatggtgatcttcatcaaccagatccgcatgaagatcggtgtcatgttcggctcgccggaaacgacaacgggcggcaatgcgctcaagttctatgcttcggttcgcctcgatattcgccgtatcggctccatcaaggagcgcgacgaagtggtgggcaaccagacccgcgtgaaggtggtgaagaacaagctcgctcctccgttcaagcaggtcgaattcgatatcatgtatggcgcgggcgtttccaaggtgggcgagctggtcgatcttggtgtcaaggccggtgtggttgagaagtctggtgcctggttctcctataattcccagcgtctcgggcaggggcgcgagaacgccaagcaatatctcaaggataatccggaagtcgcgcgtgaaatcgaaaccacgcttcgccagaatgccggcctgatcgccgagcagttccttgacgatggcggaccggaagaagatgctgccggcgcggcggaaatgtaa

SEQ ID NO: 100336 - protein, 361 aa, Brucella abortus
MSQNSLRLVEDNSVDKTKALDAALSQIERAFGKGSIMRLGQNDQVVEIETVSTGSLSLDIALGVGGLPKGRIVEIYGPESSGKTTLALHTIAEAQKKGGICAFVDAEHALDPVYARKLGVDLENLLISQPDTGEQALEITDTLVRSGAIDVLVVDSVAALTPRAEIEGEMGDSLPGLQARLMSQALRKLTGSISRSNCMVIFINQIRMKIGVMFGSPETTTGGNALKFYASVRLDIRRIGSIKERDEVVGNQTRVKVVKNKLAPPFKQVEFDIMYGAGVSKVGELVDLGVKAGVVEKSGAWFSYNSQRLGQGRENAKQYLKDNPEVAREIETTLRQNAGLIAEQFLDDGGPEEDAAGAAEM

SEQ ID NO: 100337 - DNA, 1044 bp, Burkholderia cepacia
  CDS (1)..(1044): transl_table=11
atgaccgccgagaagagcaaggcgctggcggccgcgctcgcgcagatcgaaaagcagttcggcaagggctcgatcatgcggatgggcgacggcgaagcggccgaggatatccaggtcgtctccacggggtcgctgggtctcgacatcgcgctgggcgtcggcggcttgccgcgcggccgggtggtcgagatctacggtccggaatcgtccggtaagaccacgctcacgctgcaggtcatcgccgagctgcagaaactgggcggcaccgcggcgttcatcgacgccgagcacgcgctcgacgttcaatatgccgcgaagctcggcgtgaacgtgccggagctgctgatctcgcagccggacaccggcgagcaggccctcgaaatcaccgatgcgctggtgcgctcgggctcgatcgacatgatcgtcatcgactcggtcgcggcgctcgtgccgaaggccgaaatcgaaggcgagatgggcgattcgctgccgggtctgcaggcccgcctgatgtcgcaggcgctgcgcaagctgaccggcacgatcaagcgcacgaactgcctcgtgatcttcatcaaccagatccggatgaagatcggcgtgatgttcggcaacccggaaaccacgacgggcggtaacgcactgaagttctactcgtcggtgcgtctcgatatccgccggatcggctcgatcaagaagaacgacgaggtgatcggcaacgaaacccgcgtgaaggtcgtcaagaacaaggtgtcgccgccgttccgcgaagcgatcttcgacatcctgtacggcgaaggcatttcgcgtcagggcgagatcatcgatctcggcgtgcaggcgaagatcgtcgacaaggcgggcgcctggtacagctacaacggcgagaagatcggccagggcaaggacaacgcgcgtgaattcctgcgcgaaaatccggaaatcgcgcgcgagatcgagaaccgcatccgcgaatcgctcggcgtcgtcgcaatgcccgatggcgcaggcaacgaagccgaggcgatggacgaagaagagtga

SEQ ID NO: 100338 - protein, 347 aa, Burkholderia cepacia
MTAEKSKALAAALAQIEKQFGKGSIMRMGDGEAAEDIQVVSTGSLGLDIALGVGGLPRGRVVEIYGPESSGKTTLTLQVIAELQKLGGTAAFIDAEHALDVQYAAKLGVNVPELLISQPDTGEQALEITDALVRSGSIDMIVIDSVAALVPKAEIEGEMGDSLPGLQARLMSQALRKLTGTIKRTNCLVIFINQIRMKIGVMFGNPETTTGGNALKFYSSVRLDIRRIGSIKKNDEVIGNETRVKVVKNKVSPPFREAIFDILYGEGISRQGEIIDLGVQAKIVDKAGAWYSYNGEKIGQGKDNAREFLRENPEIAREIENRIRESLGVVAMPDGAGNEAEAMDEEE

SEQ ID NO: 100339 - DNA, 1071 bp, Burkholderia mallei
  CDS (1)..(1071): transl_table=11
atggaagaaagcaagaaaggctccgggctgactgccgaaaagagcaaggcgctcgccgccgcgctcgcgcagatcgagaagcagttcggcaaagggtcgatcatgcggctcggcgacggcgaggcggtcgaggatatccaggtggtgtccacgggctcgctcggtctcgatatcgcgctcggcgtcggtggcttgccgcgcggccgtgtggtcgaaatctacgggccggaatcgtccggcaagacgacgctcacgctgcaggtgatcgccgagatgcagaagctcggcggcacggcggcgttcatcgacgcggagcacgcgctcgacgtccagtatgcgtcgaagctcggcgtgaacgtgccggagctgctgatctcgcagccggacacgggtgagcaggcgctcgaaatcgtcgacgcgctggtccgctcgggctcgatcgacatgatcgtcatcgactcggtcgcggcgctcgtgccgaaggccgaaatcgaaggcgagatgggcgacgcgctgcccggcctgcaggcccgcctgatgtcgcaggcgctgcgcaagctgacgggcacgatcaagcgcacgaactgcctcgtgatcttcatcaaccagatccggatgaagatcggcgtgatgttcggcaacccggaaaccacgacgggcggcaacgcgctgaagttctactcgtcagtgcgtctcgacattcgccggatcggctcgatcaagaagaacgacgaggtgatcggcaacgaaacgcgcgtgaaggtcgtcaagaacaaggtgtcgccgccgttccgcgaagcgatcttcgacatcctgtacggcgaaggcatttcgcgccagggcgagatcatcgatctcggcgtgcaggcgaagatcgtcgacaaggcgggcgcgtggtacagctatagcggcgagaagatcggccagggcaaggacaacgcgcgcgaattcctgcgcgaaaatccggaaatcgcgcgcgagatcgagaatcgcattcgcgagtcgctcggagtcgccgcgatgccgcagggcgccggttccgaggccgagatcatggacgaagaggagtaa

SEQ ID NO: 100340 - protein, 356 aa, Burkholderia mallei
MEESKKGSGLTAEKSKALAAALAQIEKQFGKGSIMRLGDGEAVEDIQVVSTGSLGLDIALGVGGLPRGRVVEIYGPESSGKTTLTLQVIAEMQKLGGTAAFIDAEHALDVQYASKLGVNVPELLISQPDTGEQALEIVDALVRSGSIDMIVIDSVAALVPKAEIEGEMGDALPGLQARLMSQALRKLTGTIKRTNCLVIFINQIRMKIGVMFGNPETTTGGNALKFYSSVRLDIRRIGSIKKNDEVIGNETRVKVVKNKVSPPFREAIFDILYGEGISRQGEIIDLGVQAKIVDKAGAWYSYSGEKIGQGKDNAREFLRENPEIAREIENRIRESLGVAAMPQGAGSEAEIMDEEE

SEQ ID NO: 100341 - DNA, 1071 bp, Caulobacter crescentus
  CDS (1)..(1071): transl_table=11
atgacaagtcaggcggctttgaaactcgtggccaaggaagaaggcgataagcaacgcgcgctagaggcggctctcgcccagatcgaccgcgcgttcggcaagggctcggtgatgaagctgggcgagaagggcaaggtcgagatcgagtcggtctccaccgggtcgctcggcctcgacatcgcgctgggcatcggcggcctgcccaagggccggatcgtcgaggtctatggtccggaaagctcgggcaagaccaccctggccctgcacgtcgtggccgaggtccagaaggccggcggcaccgccgccttcgtcgacgccgagcatgcgctcgatccgtcctacgcctacaagctgggcgtcaatctcgataatctcctggtctctcagcccgacaacggcgaacaggccctggagatcaccgacaccctggtgcgctcgggcgccgtcgacatcgtggtcgtcgactcggtggcggccctgacgcccaaggccgaaatcgaaggcgagatgggcgacagcctgccgggtcttcaggcccgtctgatgagccaggcgctgcgcaagctgacggcctcgatcaacaaggccaacaccatcgtcatcttcatcaaccagatccgtcacaagatcggggtgatgtacggcagccccgaaacgaccacgggcggcaacgcgctgaagttctacgcttcagtgcgcctggatatccgccgcaccggctcggtgaaggcgcgtgacgagatcgtcggcaacaatgtccgcgtgaaggtggtcaagaacaaggtggccccgccgttccgcgaggtcgagttcgacatcatgtacggcgagggcatctccaagctgggcgaagtcatcgacctaggcgtcaaagccgggatcatcgacaaggccggctcgtggttctcgtacggcagccagcggatcggccagggccgcgacaatgtccgcgagttcctgaagaacaacccggacgtcgccgccgacatcgaaaaggctgtccgcaagtcgtcgcagaagatcgaagaagagcttctggtcggcggcccggaagagggcgaagaggactag

SEQ ID NO: 100342 - protein, 356 aa, Caulobacter crescentus
MTSQAALKLVAKEEGDKQRALEAALAQIDRAFGKGSVMKLGEKGKVEIESVSTGSLGLDIALGIGGLPKGRIVEVYGPESSGKTTLALHVVAEVQKAGGTAAFVDAEHALDPSYAYKLGVNLDNLLVSQPDNGEQALEITDTLVRSGAVDIVVVDSVAALTPKAEIEGEMGDSLPGLQARLMSQALRKLTASINKANTIVIFINQIRHKIGVMYGSPETTTGGNALKFYASVRLDIRRTGSVKARDEIVGNNVRVKVVKNKVAPPFREVEFDIMYGEGISKLGEVIDLGVKAGIIDKAGSWFSYGSQRIGQGRDNVREFLKNNPDVAADIEKAVRKSSQKIEEELLVGGPEEGEED

SEQ ID NO: 100343 - DNA, 1044 bp, Chromatium vinosum
  CDS (1)..(1044): transl_table=11
atggacgagaaccgaaagaaggcgttggccgccgcgttgacccagatcgaaaagcagttcggcaaaggctcggtcatgcgcatgggcgatgtcggcgccgtgcgcaacatcgaggcgatctcgaccggttcgctcgggctggatctggcgctcggcatcggcggcgtgcccaagggccgtgtcatcgagatctacggccccgagtcctcgggcaagaccacgctgacgctgcatatcatcgccgaatcgcagaaactcggcggcacagccgctttcgtcgatgccgagcacgcgctcgatccggtctatgccgaaaagctcggcgtgaacatgaccgatctgctggtctcccagcccgataccggcgagcaggcgctggagatcaccgacatgctggtgcgttccggtgcggtcgatgtcgtggtcgtcgattcggttgccgcgctcacgcccaaggctgagatcgagggcgagatgggcgactcgcacgtcggcctgcaagcgcgcctcatgtcccaggcgttgcgcaagctcaccggcaacatcaagcgctccaactgctgcgtcatcttcatcaaccagatccggatgaagatcggggtgatgttcggctcgccggagaccacgaccggcggcaatgcgctcaaattctatgcctcggtgcggctcgacatccgtcgtaccggggctatcaagaaaggcgatgaggtcatcggcaacgagaccaaggtcaaggtggtcaagaacaaggtcgcaccgcccttccggcaggccgagttcgacatcctatatggccagggcatctcgcgcgagggcgagatcatcgatctgggcgtggccgagggcttcatcgacaagtccggcgcctggtacagctatgacggcaaccgcatcgggcagggcaaggacaacgttcgcaactttctgtgcgaaaatcccgggatcgcccaggccatcgaagcgcgcatccgcgacaagctgctgcccaagggtggcgtcgaggcgcccgccgaggccgatgtacccgagccgtcggaggattga

SEQ ID NO: 100344 - protein, 347 aa, Chromatium vinosum
MDENRKKALAAALTQIEKQFGKGSVMRMGDVGAVRNIEAISTGSLGLDLALGIGGVPKGRVIEIYGPESSGKTTLTLHIIAESQKLGGTAAFVDAEHALDPVYAEKLGVNMTDLLVSQPDTGEQALEITDMLVRSGAVDVVVVDSVAALTPKAEIEGEMGDSHVGLQARLMSQALRKLTGNIKRSNCCVIFINQIRMKIGVMFGSPETTTGGNALKFYASVRLDIRRTGAIKKGDEVIGNETKVKVVKNKVAPPFRQAEFDILYGQGISREGEIIDLGVAEGFIDKSGAWYSYDGNRIGQGKDNVRNFLCENPGIAQAIEARIRDKLLPKGGVEAPAEADVPEPSED

SEQ ID NO: 100345 - DNA, 1053 bp, Chromobacterium violaceum
  CDS (1)..(1053): transl_table=11
atggcttccgaagacaagagcaaggcgctggccgctgccctggcccagattgaaaagcaatttggcaagggctcgatcatgcgcatgagcgacaaccagatcaccgaaaacctgcaagtgatctccaccggctcgctgaccctggacctggcgctgggcgtcggcggcctgccgcgcggccgcgtggtcgaaatctacggcccggagtcgtcgggtaaaaccaccttgtgtctgcaggccgtggccgaggcgcaaaaactgggcggcacctgcgcctacatcgacgccgaaaacgcgctggacccggtttacgcgcagaagctgggcgtcaacgtcgaagacctgctgatctcgcagccggacaccggcgagcaggcgctggaaatctgcgacatgctggttcgctccagcggcgtggacgtgatcgtggtcgactccgtcgccgcgctggtgcccaaggctgaaatcgagggcgagatgggcgacagccacgtcggcctgcaggcccgcctgatgagccaggcgctgcgcaagctgaccggcaacatcaagcgcaccaacaccctggtgatcttcatcaaccagatccgcatgaagatcggcgtgatgttcggcaacccggaaaccaccaccggcggcaacgcgctgaagttctacgcctccgtgcgcctggacatccgccgcaccggcggcatcaagaagggcgacgaagtgatcggcaacgacactcgcgtcaaagtggtgaagaacaaggtgtccccgccgttccgccaggccgatttcgaaatcctgtacggcgagggcatctcgcgccagggcgaaatcatcgagctgggcgtcaagcacggcttcatcgacaagtccggcgcctggtacgcgtacaacggccagaagatcggccagggcaaggacaacacccgcgaatggctgaaagccaacccggccatcgccgacgagatcgagcgcaagatccgcgaagcggtgggcgtgaagatcgaaatcaacgaaaaccagggcgacgaagagttcgccgacgacgccttcgacgcctga

SEQ ID NO: 100346 - protein, 350 aa, Chromobacterium violaceum
MASEDKSKALAAALAQIEKQFGKGSIMRMSDNQITENLQVISTGSLTLDLALGVGGLPRGRVVEIYGPESSGKTTLCLQAVAEAQKLGGTCAYIDAENALDPVYAQKLGVNVEDLLISQPDTGEQALEICDMLVRSSGVDVIVVDSVAALVPKAEIEGEMGDSHVGLQARLMSQALRKLTGNIKRTNTLVIFINQIRMKIGVMFGNPETTTGGNALKFYASVRLDIRRTGGIKKGDEVIGNDTRVKVVKNKVSPPFRQADFEILYGEGISRQGEIIELGVKHGFIDKSGAWYAYNGQKIGQGKDNTREWLKANPAIADEIERKIREAVGVKIEINENQGDEEFADDAFDA

SEQ ID NO: 100347 - DNA, 1050 bp, Clostridium acetobutylicum
  CDS (1)..(1050): transl_table=11
atggataatgaaaaattaaaagccattgatgcggctatgagtcagatagagaaacaatttggaaaaggcgctataatgaaacttggtgagcaagacatcttaaatattgatgcaatttcaacaggatgtttatctttagatatagcacttggaataggtggagttccacgtggaagagtagttgagatatatggacctgaatcatcaggtaaaactacagttgcacttcatatattagctgaagcccaaaagaagggtggagctgctgcatttattgatgccgagcatgctttagatcctcaatatgcaagagctttaggagtagatatagataacttagttgtatctcaaccagatactggtgagcaggcacttgaaattgctgaagcacttgttaggtcaggtgcaattgatgtaattgttgtagattctgtagcagcacttgtaccaaaagctgaaattgaaggtgaaatgggagattctcatgtaggtcttcaggcaagacttatgtcacaagctcttagaaaattaacaggttctataaacaagtctaaatgtatagctatatttataaaccaacttagagaaaaagttggaataatgtttggaaatcctgaaactactcctggaggaagagctcttaagttttatgcttctgtaagaatggatataagaaaaatagacactataaaacagggcgaagaaatgattggaaatagagtaagagtaaaggtagttaaaaataaagtggctcctccatttaaacaagcagaatttgatattatgtataatgaaggtatatctcgtgaaggaaatatagttgatgtaggagttaaagaaaatatcatccaaaaaagtggtgcatggttctcatatggtgatataagacttggtcagggaagagaaaatgctaaattattctttaaagaaaatatagatattagatctgaagttgaaaataaaataagagaaaagtacgatttacctatacaaaaagttaaaaatgaaaagccaaagattgaaaaaggaactgaaaataatacaaaataa

SEQ ID NO: 100348 - protein, 349 aa, Clostridium acetobutylicum
MDNEKLKAIDAAMSQIEKQFGKGAIMKLGEQDILNIDAISTGCLSLDIALGIGGVPRGRVVEIYGPESSGKTTVALHILAEAQKKGGAAAFIDAEHALDPQYARALGVDIDNLVVSQPDTGEQALEIAEALVRSGAIDVIVVDSVAALVPKAEIEGEMGDSHVGLQARLMSQALRKLTGSINKSKCIAIFINQLREKVGIMFGNPETTPGGRALKFYASVRMDIRKIDTIKQGEEMIGNRVRVKVVKNKVAPPFKQAEFDIMYNEGISREGNIVDVGVKENIIQKSGAWFSYGDIRLGQGRENAKLFFKENIDIRSEVENKIREKYDLPIQKVKNEKPKIEKGTENNTK

SEQ ID NO: 100349 - DNA, 1131 bp, Corynebacterium glutamicum
  CDS (1)..(1131): transl_table=11
atggctcccaagaagacagcaacaaaggcaactgccgccaaggggaatgatcgtcagaaggcacttgatgccgcactagccctgattgagaaggatttcggtaaaggcgctgtcatgcgtctgggtgatgagaatcgtccgccaatccagaccatctcatctggtaacaccgcgattgatattgccttgggtatcggtggattcccacgtggtcgaatcgttgaggtgtatggcccagaatcatcaggtaaaaccaccgttgcactgcacgcaattgcgcaggcacaaaaggccggcggcatcgctgcattcattgacgccgagcacgcgttggatccagattatgctcgcaagcttggtgtagatactgatgcgcttctggtttcgcagccagacactggtgagcaagcactagaaatcgccgacatgctggttcgttccggcgcaatcgacatcatcgtgattgactcggtggctgcgctgacaccaaaggctgaaattgaaggcgaaatgggcgatagccacgttggtcttcaggcccgcctcatgagccaggcgcttcgtaagatgacaggtgcgctgtacaactcgggtaccaccgcgatcttcattaaccagctgcgtgaaaagatcggtgtgatgttcggttccccagaaaccaccaccggtggtaaggccctgaagttctacgcatctgttcgttgtgacattcgacgaatccagactctgaaggacggacaggatgccattggtaaccgcacccgcttgaaggtcgttaagaacaaggtctccccaccgttcaagatcgctgaattcgacatcatgtacggcgaaggcatctcccgtgaatcctccgtcattgacttggcagtggacaacggcattgtgaagaagtcaggttcctggttcacctacgagggcgaacagcttggtcaaggtaaggaaaaggtgcgtctttccctcaaggagaaccctgaactcaccgatgagctggaagataagatcttcaagaagctgggagtaggcaagtacgctgcagcctcagatgaactcaccgacgatccagtagagctcgtgcctaacgttgacttcgatgatgaagccgacaccgaagcagacgctgaagactaa

SEQ ID NO: 100350 - protein, 376 aa, Corynebacterium glutamicum
MAPKKTATKATAAKGNDRQKALDAALALIEKDFGKGAVMRLGDENRPPIQTISSGNTAIDIALGIGGFPRGRIVEVYGPESSGKTTVALHAIAQAQKAGGIAAFIDAEHALDPDYARKLGVDTDALLVSQPDTGEQALEIADMLVRSGAIDIIVIDSVAALTPKAEIEGEMGDSHVGLQARLMSQALRKMTGALYNSGTTAIFINQLREKIGVMFGSPETTTGGKALKFYASVRCDIRRIQTLKDGQDAIGNRTRLKVVKNKVSPPFKIAEFDIMYGEGISRESSVIDLAVDNGIVKKSGSWFTYEGEQLGQGKEKVRLSLKENPELTDELEDKIFKKLGVGKYAAASDELTDDPVELVPNVDFDDEADTEADAED

SEQ ID NO: 100351 - DNA, 1110 bp, Corynebacterium pseudotuberculosis
  CDS (1)..(1110): transl_table=11
atggcagctaagaaaaattcgaagtctcagccggcaacaggggacaatcggcaaaaggcgctcgacgcagccttagctatgatcgagaaagactttggcaaaggcgcagtaatgcgccttggtgatgataaccgccctccgattagtgctatttcttccgggaacactgcaatcgatgttgctcttggtattggaggctttcccaaggggcgcattgtagaggtgtatggacctgagtcttcaggtaaaacaaccgtggcgctgcatgctatagctcaagcgcagcgtgctggaggaattgctgcttttatcgatgcggaacacgcattagatccggattatgcacgtaaacttggcgtagacacagatgcacttttggtgtctcaaccggatacaggtgagcaagctctggagattgcagatatgcttgttcgctctggagctatagatattattgtcatcgactctgtggccgcacttacccctaaagcagaaatcgaaggggaaatgggggatagccacgttggtttgcaagcgcgtttgatgagtcaggcgctgcgtaagatgaccggtgctctttataactcgggaaccaccgctatctttattaatcagctgcgcgaaaagattggcgtgatgtttggctcgcctgagacgactacgggtggcaaagcgcttaagttctatgcttcagttcgttgtgatgttcggcgtatccaaacgctaaaggacgggcaggatgccatcggtaacaggacgcggttaaaggtagtaaagaataaggtctcgcctccatttaaaatcgcggaatttgacatcatgtatggggaaggtatctctagagaatcctccattatcgatttgggtgtagataatgggatcatcaaaaaatcaggctcgtggtttacctatgatggtgatcagcttggtcagggcaaagaaaaagttcgtctgtatttaaagcagactcctgagcttgcggatgaaattgaagagaagatcttccgggcattgcagatcggaaagtacgctaaccagaacgacgcacttactgatgatccagtagacatggttcctaatatcgattttgatgatgaggacaatggataa

SEQ ID NO: 100352 - protein, 369 aa, Corynebacterium pseudotuberculosis
MAAKKNSKSQPATGDNRQKALDAALAMIEKDFGKGAVMRLGDDNRPPISAISSGNTAIDVALGIGGFPKGRIVEVYGPESSGKTTVALHAIAQAQRAGGIAAFIDAEHALDPDYARKLGVDTDALLVSQPDTGEQALEIADMLVRSGAIDIIVIDSVAALTPKAEIEGEMGDSHVGLQARLMSQALRKMTGALYNSGTTAIFINQLREKIGVMFGSPETTTGGKALKFYASVRCDVRRIQTLKDGQDAIGNRTRLKVVKNKVSPPFKIAEFDIMYGEGISRESSIIDLGVDNGIIKKSGSWFTYDGDQLGQGKEKVRLYLKQTPELADEIEEKIFRALQIGKYANQNDALTDDPVDMVPNIDFDDEDNG

SEQ ID NO: 100353 - DNA, 1032 bp, Coxiella burnetii
  CDS (1)..(1032): transl_table=11
atggataatcgtagtaatgcgctgaatgctgctttgtcgcaaattgaacgtcagttcggtaaaggttcggtcatgcgtttgggtgatcccggactcataccggacatcgatgtcatttcaacaggctccttgggtcttgatatcgctttgggtgtgggtggattaccccgcggtcggatcattgaaatttacgggccggaagcttccggaaaaaccacgctagccttacaaacgatcgcttcttgtcagcgtatgggcggtacggctgcttttgtggatgcggaacatgcgttggatgccatttatgcgggcaaattaggcgttaaagtagaggacttgttggtatcccagccggatacaggggaacaagctttagaaattacagacatgttggttcgctcgggcgctgttgatctgatcgtgatcgactccgttgccgccctgacgccaaaagccgaaattgaaggtgatatgggcgattctcatatgggtttgcaagcgcgtttaatgtcacaagcgctgcgcaagctcacggcaaacattaagaaatccaataccttagtgatatttattaatcaaatacgtatgaaaatcggcgttatgtttggtaatccggaaacgaccaccggagggaacgcgcttaagttttattcgtcagtacgcttggatattcgccgcatcggagcgatcaaaaagggcgaagagattttaggcagtgaaactcgagtaaaggtagttaaaaacaaggtggcgccgcctttccgtcaagtcgagtttgatattctttacggtcttggtatttcgcgtgaaagtgagttaattgacctcggtgttaaaaatgaactggtcgaaaaagcaggcgcttggtacagttacaatggcgagcgtatcggccaagggaaagaaaacgttcgacaatttttccttgaaaatccaaaaattgcaggggaaattgaaacacgtttgcgtgaaaaactgttgccgcatcggcaaggcgagaaaatcgctgaagaagtcaatgcagcagaatga

SEQ ID NO: 100354 - protein, 343 aa, Coxiella burnetii
MDNRSNALNAALSQIERQFGKGSVMRLGDPGLIPDIDVISTGSLGLDIALGVGGLPRGRIIEIYGPEASGKTTLALQTIASCQRMGGTAAFVDAEHALDAIYAGKLGVKVEDLLVSQPDTGEQALEITDMLVRSGAVDLIVIDSVAALTPKAEIEGDMGDSHMGLQARLMSQALRKLTANIKKSNTLVIFINQIRMKIGVMFGNPETTTGGNALKFYSSVRLDIRRIGAIKKGEEILGSETRVKVVKNKVAPPFRQVEFDILYGLGISRESELIDLGVKNELVEKAGAWYSYNGERIGQGKENVRQFFLENPKIAGEIETRLREKLLPHRQGEKIAEEVNAAE

SEQ ID NO: 100355 - DNA, 1068 bp, Desulfotalea psychrophila
  CDS (1)..(1068): transl_table=11
atggtaggtgcaacagcaaaagacaaagcaggcagcgttgagaatgcaatcagccagatccagaaacaatttggtaagggctccatcatgcgcctgggtgagcaggcactggaggcaatccctgtcatctccacgggcgctctcagcctcgacattgccctcggggtcggcggtctgcccaagggcagaatgacagagatatatggccccgaatcatcggggaaaaccaccctggccctccatgtagttgccgaggcacaaaaattaggtggaatagccgccttcatcgatgcagagcatgcccttgataccgcctacgcagaaaaactcggcgtaaatattgacaatctcctggtttctcaaccggatttcggtgagcaggccctggaaattgcagagatactcattagatcaggcggggttgacatcatcgtcgtcgactccgttgccgcccttactcccaaggctgaaatagacggtaatgttggagatgtccacgttggccttcaggctcgccttatgtcgcaggccatgcggaaatttgccggggtcctcaaccggagcaacaccgttttaatttttatcaatcaaatccgaatgaaaatcggagtgatgtttggtagtcctgaaaccacaacaggcggcaacgccctcaaattttactgttcagagcgtcttgatattcgccggataggtgccattaaagacggacaggaaattaccggtaaccgaaccagggtaaaggtcgtcaaaaataaagttgccccaccctttaagattgctgagtttgacattatctacggcgaaggcatatctaaaattggcgacatgtttgaccttgccgttggcctggatattattgacaaaagcggatcctggtattcctataaaaatgaacgtataggtcagggacgagagaattcaaaacaattccttatggacacacctgccatctgtcatgaaatagaggagaaggttcgatctgcctacggacttccggaccgggaagagaccaaaagagaggagacggcacagatacctgacacagagaaaacaaaggacgtatga

SEQ ID NO: 100356 - protein, 355 aa, Desulfotalea psychrophila
MVGATAKDKAGSVENAISQIQKQFGKGSIMRLGEQALEAIPVISTGALSLDIALGVGGLPKGRMTEIYGPESSGKTTLALHVVAEAQKLGGIAAFIDAEHALDTAYAEKLGVNIDNLLVSQPDFGEQALEIAEILIRSGGVDIIVVDSVAALTPKAEIDGNVGDVHVGLQARLMSQAMRKFAGVLNRSNTVLIFINQIRMKIGVMFGSPETTTGGNALKFYCSERLDIRRIGAIKDGQEITGNRTRVKVVKNKVAPPFKIAEFDIIYGEGISKIGDMFDLAVGLDIIDKSGSWYSYKNERIGQGRENSKQFLMDTPAICHEIEEKVRSAYGLPDREETKREETAQIPDTEKTKDV

SEQ ID NO: 100357 - DNA, 1065 bp, Enterobacter agglomerans
  CDS (1)..(1065): transl_table=11
atggctattgatgagaacaagcaaaaagcgttagctgcagcactgggccagattgaaaagcaattcggtaaaggctccatcatgcgtctgggtgaagatcgctctatggacgtcgaaacgatctctaccggctctttgtctttggatatcgcgttaggtgctggcggcttgccaatgggccgtatcgttgaaatttatggtccggaatcctccggtaaaaccacgctgactctgcaggttatcgctgctgcacagcgtgaaggcaaaacctgtgcgttcatcgatgcagaacacgcgctggaccctatctacgctaaaaaactgggcgtcgatatcgataacctgctgtgttctcagccagataccggtgaacaggctctggaaatctgtgatgcgctgacccgttcaggcgccgttgacgttatcatcgttgactccgttgccgcactgacgccaaaagctgaaatcgaaggcgaaattggtgactctcacatgggcctcgcagctcgtatgatgagccaggcgatgcgtaagcttgcgggtaacctgaaaaacgccaataccctgctgatcttcatcaaccagatccgtatgaaaatcggtgtgatgttcggtaacccggaaaccaccaccggcggtaacgccctgaaattctatgcctctgtacgtctggatatccgtcgtatcggcgctatcaaagaaggtgatgtggttgtcggtagtgaaacacgtgtgaaagtcgtgaagaacaaaatcgccgcaccatttaaacaagctgaattccagatcctgtacggcgaaggtatcaacatcaacggcgaactgatcgacctgggcgttaagcacaaactgatcgagaaagcgggtgcatggtacagttacaacggcgagaagattggtcagggtaaagcgaactcttgtaactacctcaaagaaaacccgaaagttgctgctgaactggacaaaaaactgcgtgatatgctgctgagcggcaccggtgaattgagcgttgcgactactgctgaagacgctgacgacaacatggaaaccagcgaagagttttaa

SEQ ID NO: 100358 - protein, 354 aa, Enterobacter agglomerans
MAIDENKQKALAAALGQIEKQFGKGSIMRLGEDRSMDVETISTGSLSLDIALGAGGLPMGRIVEIYGPESSGKTTLTLQVIAAAQREGKTCAFIDAEHALDPIYAKKLGVDIDNLLCSQPDTGEQALEICDALTRSGAVDVIIVDSVAALTPKAEIEGEIGDSHMGLAARMMSQAMRKLAGNLKNANTLLIFINQIRMKIGVMFGNPETTTGGNALKFYASVRLDIRRIGAIKEGDVVVGSETRVKVVKNKIAAPFKQAEFQILYGEGININGELIDLGVKHKLIEKAGAWYSYNGEKIGQGKANSCNYLKENPKVAAELDKKLRDMLLSGTGELSVATTAEDADDNMETSEEF

SEQ ID NO: 100359 - DNA, 1072 bp, Erwinia carotovora
  CDS (1)..(1029): transl_table=11
atggctattgatgaaaacaagcaaaaagcattggccgcagcacttggtcaaattgaaaagcaatttggtaaagggtctatcatgcgtctgggcgaagatcgttccatgaacgttgaaaccatctctacgggttctttatcattagacgttgctttaggtgctggtggtttaccacgcgggcgtattgttgaaatctatggcccagaatcttatggtaaaacaacattaacactacaagttatcgctgctgctcaacgtgaaggcaaaatttgtgcattcattgatgctgagcacgctttagaccctatctatgctcaaaaactaggcgtagatattgataacctgctctgttctcagcctgatactggtgaacaagccctagaaatttgtgatgcattatctcgttctggtgcagttgatgttatcgttgttgactccgttgcagctttaacaccaaaagcagaaattgaaggtgagattggtgattcacacgttggtttagctgctcgtatgatgagtcaagctatgcgtaagttagcgggtaacttgaaaaactccaacactctgcttattttcatcaaccaaattcgaatgaaaatcggtgttatgtttggtaatccagaaaccacaacaggtggtaatgcacttaaattctacgcatctgttcgtttagatattcgtcgtatcggctctgttaaaaacggtgatgaagttgttggtagtgaaacacgcgttaaagtggtgaaaaacaaaattgcagcaccatttaaacaagctgaattccaaattatgtatggtgaaggtatcaatacctttggcgaattgattgatttaggtgttaaacacaaattggtagagaaagctggtgcatggtacagctacaatggtgagaaaattggtcaaggtaaagccaatgcaacaacttatttaaaagaacaccctgaaatgtacaatgagttaaacactaaacttcgtgaaatgttattaaatcacgcaggtgaatttactagcgcacgtgatttttgctaatgatagtgatgacgccgcagatattgaagaaacagaaaaataa

SEQ ID NO: 100360 - protein, 342 aa, Erwinia carotovora
MAIDENKQKALAAALGQIEKQFGKGSIMRLGEDRSMNVETISTGSLSLDVALGAGGLPRGRIVEIYGPESYGKTTLTLQVIAAAQREGKICAFIDAEHALDPIYAQKLGVDIDNLLCSQPDTGEQALEICDALSRSGAVDVIVVDSVAALTPKAEIEGEIGDSHVGLAARMMSQAMRKLAGNLKNSNTLLIFINQIRMKIGVMFGNPETTTGGNALKFYASVRLDIRRIGSVKNGDEVVGSETRVKVVKNKIAAPFKQAEFQIMYGEGINTFGELIDLGVKHKLVEKAGAWYSYNGEKIGQGKANATTYLKEHPEMYNELNTKLREMLLNHAGEFTSARDFC

SEQ ID NO: 100361 - DNA, 1080 bp, Francisella tularensis subsp
  CDS (1)..(1080): transl_table=11
atgagtaaagaaaaagcgctagaatcagccttatcacagattgaaaagcaatttggtaaaggcgctatcatgagattaggagatcaagaagctgctcatgatattgatgttataccttccggtattattgcacttgatgtggcactaggaataggaggctatccaaaaggtcgaattattgagatatatggtcatgaatcatcaggtaagacaacattgacacttttagctattgcacaatgccaaaagcaaggcggtactgcagcatttgttgatgctgagcatgcactagatccaaaatatgcaaagcttttaggtgttgatgttgataatctgatcgtgtcacagccggatacgggtgagcaagctttagagattgctgatatgttggtacgttctggaggagttgatattgtagtaattgactctgttgctgcacttacgccaaaggcagagattgagggtgacatgggcgactcgcacatgggcttacaagcaagattaatgtcacaagcactaagaaaactaacggcaaatatcaagcgctcaaatactctagtgatattcattaaccaaattcgtatgaagatcggggttatgtttggtaaccctgaaactacaactggtggtaatgcgcttaaattctattcatcggtaagacttgaagtcaaaaagggtggtagcatcaaagatggtattgatgttagtggtaatgaaataaaagttaaggttgtcaaaaacaaagttgccccaccttttaaacaagctgactttgagcttatttatggcgagggtatttcgcttgaggctgagcttattgatttgggcgctaagtataacattattgagaagtctggtgcttggtatagctataagggtaaaaagattggtcaaggcaaagagaagtcaaaagagtatttaaaagaaaatactgctgaacgtgatgagattgaaagagctattttagaactcttgctaccaaataaatattctaataaagatagtaatgatagtcctaaagaaggttctaaaatcaaaactaaagtaaatccagcagttactcaagatgagcttatctaa

SEQ ID NO: 100362 - protein, 359 aa, Francisella tularensis subsp
MSKEKALESALSQIEKQFGKGAIMRLGDQEAAHDIDVIPSGIIALDVALGIGGYPKGRIIEIYGHESSGKTTLTLLAIAQCQKQGGTAAFVDAEHALDPKYAKLLGVDVDNLIVSQPDTGEQALEIADMLVRSGGVDIVVIDSVAALTPKAEIEGDMGDSHMGLQARLMSQALRKLTANIKRSNTLVIFINQIRMKIGVMFGNPETTTGGNALKFYSSVRLEVKKGGSIKDGIDVSGNEIKVKVVKNKVAPPFKQADFELIYGEGISLEAELIDLGAKYNIIEKSGAWYSYKGKKIGQGKEKSKEYLKENTAERDEIERAILELLLPNKYSNKDSNDSPKEGSKIKTKVNPAVTQDELI

SEQ ID NO: 100363 - DNA, 1017 bp, Geobacter sulfurreducens
  CDS (1)..(1017): transl_table=11
gtgacccaagaacgcgaaaaggcgatagagcttgcgctcagccagatagaaaagcagttcggcaagggggcgatcatgcgcctcggggcggatgaggccctccccgatgtggccgccatccccaccggttccctctccctcgacctggccctcggcgtcggcggcgtcccccgcgggcggattatcgagatctacggacccgagtcgtcgggcaagacgacgctcgccctgcacatcgcggccgaggcccagaaaatgggcggcatcgctgccttcgtcgacgccgagcacgcgctcgatatcggctatgcccgcaaactcggcgtcaagacggacgacctgctcgtctcccagcccgacaccggggagcaagccttggaaattgccgagatgctcgtcagaagcggcgctgtggacgtcctcgtcatcgactcggtggcggcactggttcccaaggccgagatcgaaggggagatgggcgactcccacatggggctccaggcccggctcatgtctcaggccctgcgcaagctcaccggcataatctccaagtccaactgctgcgtcatcttcatcaaccagatccggatgaagatcggcgtcatgttcggcaaccccgaaaccaccaccggcggcaacgccctcaagttttacgcctcggtacgtctcgatatccgcaagatcgcatccctcaagcaagggcaggacgtcatcggctcccgcaccaaggtgaaggtggtcaagaacaaggtggctccccccttcaaagaggtggagttcgacatttactacggtgagggcatttcccgcgagggcgacatcctcgacctggccgtggagaaggggatcgtggacaagagcggcgcctggttctcctacggcggagaccggattggccaggggcgcgaaaattcccgccttttcctcaaggagcggccagaactggtgaacgagatcgaagggaaggtttacgacgtggccggcattccccgcaaaggggcgaaggaagcggcatag

SEQ ID NO: 100364 - protein, 338 aa, Geobacter sulfurreducens
MTQEREKAIELALSQIEKQFGKGAIMRLGADEALPDVAAIPTGSLSLDLALGVGGVPRGRIIEIYGPESSGKTTLALHIAAEAQKMGGIAAFVDAEHALDIGYARKLGVKTDDLLVSQPDTGEQALEIAEMLVRSGAVDVLVIDSVAALVPKAEIEGEMGDSHMGLQARLMSQALRKLTGIISKSNCCVIFINQIRMKIGVMFGNPETTTGGNALKFYASVRLDIRKIASLKQGQDVIGSRTKVKVVKNKVAPPFKEVEFDIYYGEGISREGDILDLAVEKGIVDKSGAWFSYGGDRIGQGRENSRLFLKERPELVNEIEGKVYDVAGIPRKGAKEAA

SEQ ID NO: 100365 - DNA, 1038 bp, Gluconobacter oxydans
  CDS (1)..(1038): transl_table=11
atggacaagaccaaggcgcttgaaggcgcactcagccagattgagcgtgccttcggcaaaggctcgatcatgcgcatgggccagcgcccgaaagtggaaaccaatgtgatttccaccgggtccatcgggctggacatcgcgctggggatcggcggcatgccccgcggccgtatcgtcgaaatctacggaccggaaagctccggcaagaccaccctcgcccttcacgttctggctgaagcccagaagaagggcgggaccgtggccttcatcgatgcggaacatgcactcgatccggggtatgcccgcaagcttggcgtcaacatcgacgatcttctcctgagccagccggatgccggcgaacaggcgctggaaattgccgacacgctggtccgttccggcgccgttgacgtgctggtcgtggactccgtggctgccctcgttccccgcgccgagcttgaaggcgacatgggcgacagccatgtcggcctgcatgcccgtctcatgagccaggccctccgcaagctcacgggaacggtctcgcgctccaacacgctcgtcatcttcctgaaccagatccgcatgaagatcggcgtgatgttcggcaatccggaaacgacaactggcggtaacgcgctgaagttctactcgtccatccgcctcgacatccgccgcatcgggtccatcaaggacaaagacgaggttgtcggcaaccagacgcgcgtcaaggtcgtgaagaacaagatggcgcctccgttccgtcaggtcgagttcgacatcatgtacggagaaggcatcagcaagatgggcgaactgctcgatctgggcgtgaagggcaacatcgtcgagaaatccggcgcctggttctccttcgacagccagcgcatcggacagggccgtgaaaacgccaagcagttcctgcgcgaacatccggaaatggcctccgaaatcgagcgtcgcatccgcgctgaagccggtgtcctctccgacgccctgatgacggatccggagcccgacgcagacggcaccccggaagactga

SEQ ID NO: 100366 - protein, 345 aa, Gluconobacter oxydans
MDKTKALEGALSQIERAFGKGSIMRMGQRPKVETNVISTGSIGLDIALGIGGMPRGRIVEIYGPESSGKTTLALHVLAEAQKKGGTVAFIDAEHALDPGYARKLGVNIDDLLLSQPDAGEQALEIADTLVRSGAVDVLVVDSVAALVPRAELEGDMGDSHVGLHARLMSQALRKLTGTVSRSNTLVIFLNQIRMKIGVMFGNPETTTGGNALKFYSSIRLDIRRIGSIKDKDEVVGNQTRVKVVKNKMAPPFRQVEFDIMYGEGISKMGELLDLGVKGNIVEKSGAWFSFDSQRIGQGRENAKQFLREHPEMASEIERRIRAEAGVLSDALMTDPEPDADGTPED

SEQ ID NO: 100367 - DNA, 1119 bp, Haemophilus ducreyi
  CDS (1)..(1119): transl_table=11
atggcagcggataaaaaagcccaaaagaatacagcaactaaacagattgatcccgaacaaaaagaaaaagcattagcagcagcactggctcaaattgaaaagcaatttggtaaaggatctattatgcgtttgggcgatacgcaagcacttgatattgaagcagtttccaccggttcaattggtttagatgctgcattaggtattggtggtttgccaatgggacgaattgtagaaatctacggccccgaatcatcagggaaaaccacgttaactttatctgtcattgctcaagcgcaaagaataggcaaaacttgtgcatttattgatgctgaacatgcgctggatcccgtttatgcacgtaaattaggcgtagatatcgatgccttacttatttcacaacctgataatggcgaacaagcgcttgaaatttgtgatgcattagtccgctcaggtgcggttgacgtcattattgttgactcagttgccgcattaacaccaaaagctgaaattgaaggcgatatgggtgattcgtatatgggcttacaagctcgtttaatgtcacaagcattacgaaaattaaccgctaatattaaagccactaattgcctagtcgttttcattaatcaaattcggatgaaaatcggcgtaatgtttggtaatccagaaacgacgacaggcggtaatgcacttaaattctatgcctctgtccgccttgatattcgtcgttcgggtgttgtaaaagatggtgatgaagtggttggcagtgaaaccaaagttaagatcgttaaaaataaagtagcaccgccattccgtgaagtacaatttgatattatgtacggagaaggcattgctcgaatgaatgaattacttattcttgctgaagcgaatggctttattcaaaaagcaggagcatggttctcatataatggtactaaaattggtcaaggcaaaaataatgcaattaaatggttgaaagaaaatcctgaagtggcagagaaaattgaacaagagattcgcaatttattaattttaacaccagatcagccagcttctgaaaaacttgagttagatgtaaatgacgaaagtgattttgatgaagcgtttgaggagcaagaataa

SEQ ID NO: 100368 - protein, 372 aa, Haemophilus ducreyi
MAADKKAQKNTATKQIDPEQKEKALAAALAQIEKQFGKGSIMRLGDTQALDIEAVSTGSIGLDAALGIGGLPMGRIVEIYGPESSGKTTLTLSVIAQAQRIGKTCAFIDAEHALDPVYARKLGVDIDALLISQPDNGEQALEICDALVRSGAVDVIIVDSVAALTPKAEIEGDMGDSYMGLQARLMSQALRKLTANIKATNCLVVFINQIRMKIGVMFGNPETTTGGNALKFYASVRLDIRRSGVVKDGDEVVGSETKVKIVKNKVAPPFREVQFDIMYGEGIARMNELLILAEANGFIQKAGAWFSYNGTKIGQGKNNAIKWLKENPEVAEKIEQEIRNLLILTPDQPASEKLELDVNDESDFDEAFEEQE

SEQ ID NO: 100369 - DNA, 1044 bp, Helicobacter pylori
  CDS (1)..(1044): transl_table=11
atggcaatagatgaagacaaacaaaaagcgatttctttagcgatcaaacaaattgataaggtttttggtaagggggcgttggtgcgccttggggataagcaagtagaaaagattgactctatttctacaggctcgttagggttggatctggctttagggattgggggcgttccaaagggtaggatcattgaaatttatgggccagagtcaagtgggaagaccactctaagcttgcatattattgcagaatgccaaaaaaatggcggcgtgtgcgcgttcattgacgctgagcatgccctagatgtgcattacgctaagagattgggcgtggatacggaaaatctactcgtttcccaacctgatacaggcgagcaagctttagagattttagaaacgatcaccagaagcggagggattgatttagtggtggtggattctgtggcggctcttacgcctaaagcggagattgatggggatatgggcgatcagcatgtgggcttgcaagcaaggcttatgagccatgcgttaagaaaaatcaccggtgtcttgcacaagatgaacactactctcatttttatcaatcaaatcaggatgaagattggcatgatgggttatgggagtccagagaccacaaccggaggtaacgccttaaaattctatgcgagcgttaggattgatattagaaggattgcctccctcaaacaaaacgaacagcatatcggtaatagggctaaagccaaagtggttaaaaataaagtcgctccgccttttagagaagcggaatttgacatcatgtttggggaagggatttctaaagagggcgaaatcattgattacggtgtgaaattagacattgtggataagagtggggcatggcttagctaccaggataaaaagctagggcaaggcagagaaaacgctaaagccttactgaaagaagacaaagccctagcggatgaaatcactcttaagattaaagagagtattggctctaatgaagagatcatgcccttaccggatgagcctttagaagaaatggaataa

SEQ ID NO: 100370 - protein, 347 aa, Helicobacter pylori
MAIDEDKQKAISLAIKQIDKVFGKGALVRLGDKQVEKIDSISTGSLGLDLALGIGGVPKGRIIEIYGPESSGKTTLSLHIIAECQKNGGVCAFIDAEHALDVHYAKRLGVDTENLLVSQPDTGEQALEILETITRSGGIDLVVVDSVAALTPKAEIDGDMGDQHVGLQARLMSHALRKITGVLHKMNTTLIFINQIRMKIGMMGYGSPETTTGGNALKFYASVRIDIRRIASLKQNEQHIGNRAKAKVVKNKVAPPFREAEFDIMFGEGISKEGEIIDYGVKLDIVDKSGAWLSYQDKKLGQGRENAKALLKEDKALADEITLKIKESIGSNEEIMPLPDEPLEEME

SEQ ID NO: 100371 - DNA, 1056 bp, Herbaspirillum seropedicae
  CDS (1)..(1056): transl_table=11
atggacgacaaaaaagctgcgaacaactctgagaagagcaaggcgctggccgccgcgttggcacagattgaaaagcagtttggcaagggctcggtgatgcgcatggaagatggcgtcatcgccgaggaaatccaggcggtctccactggctcactgggcctggacatcgccctgggcatcggcggcctcccgcgtggccgcgtcatcgagatctacggcccggaatcctcgggcaagaccaccctgaccctgcaatcgattgccgagatgcagaaactgggcggcacctgcgccttcatcgatgccgagcacgcactggacgtcacctatgcgcaaaagctgggtgtgaacctgaacgacctgctgatctcccagcccgacaccggcgaacaggccctggaaatctgcgacgccctggtacgttccggcgccgtggacctgatcgtggtcgactccgtggccgcactgacccccaaggctgaaatcgaaggcgacatgggcgactccctgcctggcctgcaagcccgcctgatgtcgcaggcgctgcgcaagctgaccggcagcatcaaccgtaccaataccacggtcatcttcatcaaccagatccgcatgaagatcggcgtcatgttcggcaaccccgaaaccaccaccggtggtaatgccctgaagttctacgcctccgtgcgcttggacatccgccgcaccggctcgatcaagtccggcgacgaagtcatcggcagcgagaccaaggtcaaggtcgtcaagaacaaggtcgctccgccgttccgcgaagcccactttgacatcctgtatggcgaaggcacctcgcgcgaaggcgagatcctggacctcggttccgagcacaaggtggtcgagaagtccggcgcctggtacagctacaacggcgagcgcatcggccagggcaaggacaatgcccgcaactacctgaaggaacatccggaactggcgcgcgagatcgaaaacaaggtccgcgtggccctgggtgtgccggaactggccggtggcgaagccgaagccgaagcgaaagcctcctga

SEQ ID NO: 100372 - protein, 351 aa, Herbaspirillum seropedicae
MDDKKAANNSEKSKALAAALAQIEKQFGKGSVMRMEDGVIAEEIQAVSTGSLGLDIALGIGGLPRGRVIEIYGPESSGKTTLTLQSIAEMQKLGGTCAFIDAEHALDVTYAQKLGVNLNDLLISQPDTGEQALEICDALVRSGAVDLIVVDSVAALTPKAEIEGDMGDSLPGLQARLMSQALRKLTGSINRTNTTVIFINQIRMKIGVMFGNPETTTGGNALKFYASVRLDIRRTGSIKSGDEVIGSETKVKVVKNKVAPPFREAHFDILYGEGTSREGEILDLGSEHKVVEKSGAWYSYNGERIGQGKDNARNYLKEHPELAREIENKVRVALGVPELAGGEAEAEAKAS

SEQ ID NO: 100373 - DNA, 1119 bp, Idiomarina loihiensis
  CDS (1)..(1119): transl_table=11
atgagcaatgatcgtcaaaaggcgttagatgcagcgctcggacaaatcgaacgtcaatttggtaaaggttctatcatgcgtctgggtgataaccagactctggatatcgattctgtttcaaccggttcgttagggctggatattgctcttggtattggtggcttgccttttgggcgggttgtagaaatttacggtcctgagtccagtggtaaaacgactatgactctggaagtgattgccgaagcgcaaaaaatgggtaagacctgtgccttcgtagatgctgagcacgcgttagaccctatttatgccgaagctttaggtgttaacgttgatgacttattaatatcgcaaccagataccggtgagcaggctttagaaatttgtgacatgctggttcgttccggcgcagtcgatattgtgattgttgactcggtagcagcgctgacaccaaaagcggaaattgaaggcgaaatgggcgatagccatgttggcttgcaggctcgtttaatgtcacaagccctgcgtaaattaacgtcgaacattaagaagtccaacaccatgtgtattttcatcaaccaaattcggatgaaaattggtgtgatgtttggtaaccctgaaactaccacgggtggtaacgccctgaagttttactcttctgttcgtctggatattcgccgtaccggtgcattgaaagaaggtgacgaagttgtgggtaacgaaacccgcgtgaaagtggttaaaaacaaggtggctcctccgtttaaagaagcgcacttccaaattttatacggcaaaggtatttctaaagaaggtgagcttattgacctgggtgttaagcacaaaatggttgataaagccggtgcctggtacagttataacggcgacaaaattggtcagggtaaagctaactcaatgaagtttttgcaggacaaccctaaaattgccgatgaattagaaggtcgtattcgcgaactgttgttgtcaaaaccagaaaagagaacaaaagaaattcgtgaagctgagcgcgctgctgcgaaagaagacgcgaaaagcgaagctaaagcagataagaaaacagaaaagaaaggtaatgagaaagatgatatcagtttgtcataa

SEQ ID NO: 100374 - protein, 372 aa, Idiomarina loihiensis
MSNDRQKALDAALGQIERQFGKGSIMRLGDNQTLDIDSVSTGSLGLDIALGIGGLPFGRVVEIYGPESSGKTTMTLEVIAEAQKMGKTCAFVDAEHALDPIYAEALGVNVDDLLISQPDTGEQALEICDMLVRSGAVDIVIVDSVAALTPKAEIEGEMGDSHVGLQARLMSQALRKLTSNIKKSNTMCIFINQIRMKIGVMFGNPETTTGGNALKFYSSVRLDIRRTGALKEGDEVVGNETRVKVVKNKVAPPFKEAHFQILYGKGISKEGELIDLGVKHKMVDKAGAWYSYNGDKIGQGKANSMKFLQDNPKIADELEGRIRELLLSKPEKRTKEIREAERAAAKEDAKSEAKADKKTEKKGNEKDDISLS

SEQ ID NO: 100375 - DNA, 1047 bp, Legionella pneumophila
  CDS (1)..(1047): transl_table=11
atggaagaaaataaacaaaaagcactatcagcggccgtttcgcaaattgaacgccaatttggcaaagggtctgtaatgcgtatgggagatagcacggtatcacgggatattgaagcaatctctacaggttcattaggtcttgatattgccttagggataggcggtttgccaaaaggccgtattgttgaaatttatggccctgagtcttctggtaaaaccacgctcactcttcaagtgatcgctgaatgtcaaaaaatgggtggtacagcagcatttatcgatgcggaacatgctctggatccaagctatgctcagaaacttggtgtgaaggtggatgagctgttggtttctcagccggatacaggcgagcaagctctggaaattactgatatgctggtgcgttctgcagcagttgatgtcgtaataattgactcggttgctgccttgactcccaaagcagaaattgagggagaaatgggcgattcccatgttggtttacaggcaagattgatgtcgcaagccctgcgtaaattgaccgctaacattaaacgttcgaacacactggttatttttattaatcaaatacgtatgaaaattggtgtgatgtttggtagccctgaaactactacagggggcaatgctttgaagttttatgcttcagttcgtttggatattcgccgtattggttcaattaaaaagggtgaagaaatattaggcagtgaaacccgagttaaagtagttaaaaataaggtagcgccaccgtttaaaatgactgagtttgatattttatataacgaaggtatatctcgtgagagtgaaattattaatctgggtgttcaattgaatttaattgagaaatcaggtgcctggtatagctacaaacaggaaaaaatcgggcagggcaaagaaaatgtcagattatatttgaaagaaaatccccaagtcgctgcagagcttgaacaacaaatccgtactgagctcttggaaaaaaagttatctgtgttggctagttcatcagaagatctttttgagactatagatgactaa

SEQ ID NO: 100376 - protein, 348 aa, Legionella pneumophila
MEENKQKALSAAVSQIERQFGKGSVMRMGDSTVSRDIEAISTGSLGLDIALGIGGLPKGRIVEIYGPESSGKTTLTLQVIAECQKMGGTAAFIDAEHALDPSYAQKLGVKVDELLVSQPDTGEQALEITDMLVRSAAVDVVIIDSVAALTPKAEIEGEMGDSHVGLQARLMSQALRKLTANIKRSNTLVIFINQIRMKIGVMFGSPETTTGGNALKFYASVRLDIRRIGSIKKGEEILGSETRVKVVKNKVAPPFKMTEFDILYNEGISRESEIINLGVQLNLIEKSGAWYSYKQEKIGQGKENVRLYLKENPQVAAELEQQIRTELLEKKLSVLASSSEDLFETIDD

SEQ ID NO: 100377 - DNA, 1164 bp, Leptospira biflexa
  CDS (1)..(1164): transl_table=11
atgaaaaaagagaaagctgacaaggctcaagaaaaagaaaccgaccaaagaaagcaggcaattgatgcagcgctcggccaaatcgaaaaacaattcggtaagggttccatcatgcgccttggtgccgatacacgtatggcagaaatgaacgttgtatccactggatctttggatttagacattgccttggggataggcgggtttccttccggtcgtatcgtagaaatctacggaccagaatcttctggtaaaacaacactcactctttctgcgattgcagaaacgcaaaaaaaaggaggcattgctgccttcattgatgcggaacatgctttagatccatcttatgctaaaaaattaggggtcaatgtagacgacctactggttgcccaaccagataatggggaagaggctctggaaatttgtgaatcactcgttcgttccaacgccatcgatctcatcgtcatcgactctgtagccgcacttgttcctaaggccgagatcgaaggagatatgggagattctcacatgggactccaagcgcgtctgatgtcccaagccctccgtaaactcacgggaaccatttcaaaatccaataccactgtcatcttcatcaaccaaatccgtatgaagattggggttatgtttggaagtcctgaaaccactactggtggaaacgcgttaaaattctatgcttccattcgattggacattcgtcgcatcgaaactctaaaagaaaaagaagaacctgttggtaaccgtgtgcgagtgaaagttgtaaaaaacaaatgcgctcctcctttccgacaagcagagtttgacatcatgtatgcgaacggaatcaacagagaaagttctctcattgatctagcggttcgccacgacctagttgcaaaagcaggttcttggtattcttacggtggagagaaaatcggacaaggaaaggaacaagtgaaaaacttttttctcgaaaatccagatatcgcatttaaaattgaaaaccaagttcgagatctcaatagcctcccactcatggaccaatccaaaatccaaaccagagaagtgaaatccattgaaagggaccctaaggaaactaaagaaacaaaatctaaacaacctgttagtttctctaccgaagcagaagtagatattgctgttggagaataa

SEQ ID NO: 100378 - protein, 387 aa, Leptospira biflexa
MKKEKADKAQEKETDQRKQAIDAALGQIEKQFGKGSIMRLGADTRMAEMNVVSTGSLDLDIALGIGGFPSGRIVEIYGPESSGKTTLTLSAIAETQKKGGIAAFIDAEHALDPSYAKKLGVNVDDLLVAQPDNGEEALEICESLVRSNAIDLIVIDSVAALVPKAEIEGDMGDSHMGLQARLMSQALRKLTGTISKSNTTVIFINQIRMKIGVMFGSPETTTGGNALKFYASIRLDIRRIETLKEKEEPVGNRVRVKVVKNKCAPPFRQAEFDIMYANGINRESSLIDLAVRHDLVAKAGSWYSYGGEKIGQGKEQVKNFFLENPDIAFKIENQVRDLNSLPLMDQSKIQTREVKSIERDPKETKETKSKQPVSFSTEAEVDIAVGE

SEQ ID NO: 100379 - DNA, 1101 bp, Leptospira interrogans serogroup Icterohaemorrhagiae serovar
  CDS (1)..(1101): transl_table=11
atgggagaaagtatcatgaagaaagcaaaagaagatgctccgagcgtagatgattctaaaaagttagcgatcgagcaagcaatgagccaaattgaaaaacaatttggaaagggttcgattatgaaattaggatcggattctgccaaacaaaccgttcaagtaattccttccggttctttggatttagacattgcactgggtataggtggttatccgatcggtagaattgtagaaatttacggacctgagtcttctggaaaaactactctcacactttctgcaattgcagaggctcagaaaagaggtggtgtggctgcgtttatagatgcagaacacgctttggatccatcttatgccaaaaaacttggggtcaatatagacgaacttttagtttctcaaccggataatggagaagaagcattagaaatctgtgaatctttagttcgaagtaatgcaattgatttaatcgtaattgattctgtggcggctttggttcccaaggctgaaatagaaggagatatgggagattcacacatgggtttacaagcaagactcatgtcccaggcgcttagaaaactaactggtaccattgcaaaatccaaaaccgtagtaatctttatcaatcaaattcgtatgaaaatcggtgttatgttcggttctcctgaaactacaactggcggaaatgctttgaaattctattgttcagttcgtttggatatccgtaaaatagaaacgatcaaagaaaaagaagaatctgtaggaaacagagtacgggtcaaagtagtcaaaaataagtgtgctcctccgtttaaacaggctgaatttgacataatctttaacgctgggattagcagagaaggttctctggttgacctaggtgtaaagcatgatattattcataaggccggagcttggtattcttacaatacggaaaaaattggccaaggtaaggaggccgctaaggaatacttgaaaaacaaccctgaaattgccttaaccatcgaaaatatggtcagagatctaaattctcttcctttgttagttcaggaaaataataaaaaatctcgtaaagaggaaaaattagaacaggccgcaggctaa

SEQ ID NO: 100380 - protein, 366 aa, Leptospira interrogans serogroup Icterohaemorrhagiae serovar
MGESIMKKAKEDAPSVDDSKKLAIEQAMSQIEKQFGKGSIMKLGSDSAKQTVQVIPSGSLDLDIALGIGGYPIGRIVEIYGPESSGKTTLTLSAIAEAQKRGGVAAFIDAEHALDPSYAKKLGVNIDELLVSQPDNGEEALEICESLVRSNAIDLIVIDSVAALVPKAEIEGDMGDSHMGLQARLMSQALRKLTGTIAKSKTVVIFINQIRMKIGVMFGSPETTTGGNALKFYCSVRLDIRKIETIKEKEESVGNRVRVKVVKNKCAPPFKQAEFDIIFNAGISREGSLVDLGVKHDIIHKAGAWYSYNTEKIGQGKEAAKEYLKNNPEIALTIENMVRDLNSLPLLVQENNKKSRKEEKLEQAAG

SEQ ID NO: 100381 - DNA, 1035 bp, Magnetospirillum magnetotacticum
  CDS (1)..(1035): transl_table=11
atggatagacagaaggctttggaagctgccgtcagccagatcgagcgggcattcggcaagggctccatcatgaagctgggcggcaaggatcaggtggtcgagaccgaagtggtctccacccggatcctgggccttgatgtggcgctcggcatcggcggcgttccgcgcggccgtatcatcgaggtctatggcccggaaagctcgggcaagaccaccctggcgctgcacatcatcgccgaggcgcagaagaagggcggcacctgcgccttcgtcgatgccgaacacgcgcttgacccctcctatgcccgtaagctgggcgcgctggacgagctgctgatcagcgagcccgacgctggcgagcaggccctggaaatcgccgacaccctggtacgccccggcgccgtggacgttctggtggtggattcggtggccgcattggtgccccgcggcgagctggaaggcgagatgggcgacaaccatatgggcctgcacgcccgcctgatgagccaggcgctgcgcaagctgaccggttcggtatccaagtccaaaaccatcgtcatcttcatcaaccagatccgcatgaagatcggcgtgatgttcggcaatcccgagaccaccaccggcggcaacgcgctcaagttctacgcctcggtgcgcatggagatccgccgggtcggcgccatcaaggacagggacgaggtcgtgggcaaccagacccgcgtcaaggtggtgaagaacaagctggctccgccgttcaaggtggtggacttcgacatcatgtatggcgaaggcatctccaagatgggtgagctcatcgatctgggcgtcaaggccaatgtggtgaagaaatcgggggcctggttctcctacaactccacccgcatcggccagggccgcgagaacgccaagcagttcctgcgcgacaatccggccatggccgccgagatcgaaggcgccatccgccagaatgccggcctcatctccgaggccctggccgcggtcccggacctggacggcacgccggtcgcggaataa

SEQ ID NO: 100382 - protein, 344 aa, Magnetospirillum magnetotacticum
MDRQKALEAAVSQIERAFGKGSIMKLGGKDQVVETEVVSTRILGLDVALGIGGVPRGRIIEVYGPESSGKTTLALHIIAEAQKKGGTCAFVDAEHALDPSYARKLGALDELLISEPDAGEQALEIADTLVRPGAVDVLVVDSVAALVPRGELEGEMGDNHMGLHARLMSQALRKLTGSVSKSKTIVIFINQIRMKIGVMFGNPETTTGGNALKFYASVRMEIRRVGAIKDRDEVVGNQTRVKVVKNKLAPPFKVVDFDIMYGEGISKMGELIDLGVKANVVKKSGAWFSYNSTRIGQGRENAKQFLRDNPAMAAEIEGAIRQNAGLISEALAAVPDLDGTPVAE

SEQ ID NO: 100383 - DNA, 1056 bp, Mannheimia succiniciproducens
  CDS (1)..(1056): transl_table=11
atggcaacgaatgatgaaaaatccaaagcgctggctgccgctttaggtcaaattgaaaaacaatttggtaaaggcgcaattatgaaattaggcgatacgcaagcgcttgacgtagagtcaatttcaaccggctcaatcggtttggatgtggcgcttggtatcggcggcttgccaatggggcgtgtcgttgaaattttcgggccggaatcttcaggtaaaaccacattaactctgtccgttatcgcgcaggcgcaaaaagcaggcaaggtttgcgcatttattgatgctgaacatgcgttagatccgatttatgccgcaaaattaggtgttgacgttaaagaattattagtttctcaacccgataacggagaacaggcattggaaatttgcgatgcgttggttcgttccggcgcagtggatgtgattattgtggactcggtggccgccttaaccccgaaagcggaaattgaaggcgacatgggcgattcgcatgttggtttgcaagcccgtttaatgtctcaagctttgcgtaaattaaccggtcagattaaaaacgccaattgtttagtggtatttatcaaccaaatccgtatgaagattggtgttatgttcggtaacccggaaaccaccaccggcggtaatgcgttgaaattctattcgtccgtacgtttagatattcgccgcgtaggcgcggtaaaagacggtgatgaaatcatcggtaatgaaacccgtgtgaaagtagtgaaaaacaaattagcgccgccgttccgccaagtggatttccagattctttatggcgaaggtatctctaaaaacggcgaattaatcgaacttggggtaaaacacaaactggttgataaatccggtgcgtggtatgcctacaacggcgataaaataggtcagggtaaagcgaatgccatgaaatggttagcggaaaatcctaccgttgccgccgagttggaaaataaaatccgcgccgaattgctggcaaatccggaacaggcattgttagccgatatcgaaaccaatagcgaagaaaaagaagatttcgaataa

SEQ ID NO: 100384 - protein, 351 aa, Mannheimia succiniciproducens
MATNDEKSKALAAALGQIEKQFGKGAIMKLGDTQALDVESISTGSIGLDVALGIGGLPMGRVVEIFGPESSGKTTLTLSVIAQAQKAGKVCAFIDAEHALDPIYAAKLGVDVKELLVSQPDNGEQALEICDALVRSGAVDVIIVDSVAALTPKAEIEGDMGDSHVGLQARLMSQALRKLTGQIKNANCLVVFINQIRMKIGVMFGNPETTTGGNALKFYSSVRLDIRRVGAVKDGDEIIGNETRVKVVKNKLAPPFRQVDFQILYGEGISKNGELIELGVKHKLVDKSGAWYAYNGDKIGQGKANAMKWLAENPTVAAELENKIRAELLANPEQALLADIETNSEEKEDFE

SEQ ID NO: 100385 - DNA, 1044 bp, Methylococcus capsulatus
  CDS (1)..(1044): transl_table=11
atggacgagaacaaacgcaaggccttgggtgccgctctttcccagatcgagaaacagttcggcaagggatcggtgatgcgcatgggcgatgtcgcggcggtccgggacatcgacgtgattcccaccggctccctggcgctggacatcgcgctgggctgcggcggtttgccgcgtggtcgcatcgtcgagatttacgggccggagtcctcgggcaagacgacgctgactctggaggtcatcgcccaggcgcagaagaccggcggcgtggcggctttcgtggatgccgagcatgccctggacccggtctatgccgagaagatcggagtgaacctcgacgatctgctggtgtcccagccggataccggcgagcaggcgctggaaatcgcggacgtgctggtgcgttccggcggcgtggacgtcgtggtgatcgactcggtggcggcgctgacgcccaaggccgaactcgaaggcgagatgggcgattcgcacatgggtctgcaggccagactgatgtcgcaggccttgcgcaagctgaccgccaacatcaagcgctccaacaccctggtgatcttcatcaatcagatccgcatgaagatcggcgtgatgttcggcaatccggagaccaccaccggcggtaacgcgctcaagttctacgcctcggtgcggctggacatccgccgttcgggggcgatcaagaacggcgacgaggtgatcgggaacgaaacccgcgtcaaggtcgtgaagaacaaggtggctccgccgttccgcaccgccgacttcgagattctctatggcgagggcatctcgcgcgagggcgaactgatcgacctcggcgtgaaccacgacatcgtacagaagtccggttcctggtacagctatggcggcgaccgcatcggccagggcaaggacaacgtccggatctatctcaaggagcatccggaggtcgcggctgccatcgaggcggccgttcgcgagaaggcgttggccgggttccagcacgcaccgtccgccgagcgtgcagcgctggaggagagcgggttctga

SEQ ID NO: 100386 - protein, 347 aa, Methylococcus capsulatus
MDENKRKALGAALSQIEKQFGKGSVMRMGDVAAVRDIDVIPTGSLALDIALGCGGLPRGRIVEIYGPESSGKTTLTLEVIAQAQKTGGVAAFVDAEHALDPVYAEKIGVNLDDLLVSQPDTGEQALEIADVLVRSGGVDVVVIDSVAALTPKAELEGEMGDSHMGLQARLMSQALRKLTANIKRSNTLVIFINQIRMKIGVMFGNPETTTGGNALKFYASVRLDIRRSGAIKNGDEVIGNETRVKVVKNKVAPPFRTADFEILYGEGISREGELIDLGVNHDIVQKSGSWYSYGGDRIGQGKDNVRIYLKEHPEVAAAIEAAVREKALAGFQHAPSAERAALEESGF

SEQ ID NO: 100387 - DNA, 1029 bp, Methylomonas clara
  CDS (1)..(1029): transl_table=11
atggatgacaacaaaagcaaagcgctcgccgccgcactttcccaaattgaaaaacagttcggcaaaggctccattatgcgcatgggcgatgctgatatcggcgaagacctgcaagtggtttccaccggctccctgggtctggatatcgcactgggggtgggtggcttgccacgtggccgtattatcgaaatttatggccctgagtcttcaggtaaaaccacattgaccttgtctgccattgccgaaatgcaaaagctgggtggtgtcgcagcatttatcgacgcggacgatgccctggacccgcaatacgcgtccaagctgggcgtgaatgtgccagagttgttgatttcacagccagacaccggcgaacaggcgctggaaatcgccgatatgctggtgcgctccggttccgtggatatcgtggtggtggactcggtagctgccttgactccgcgtgccgaaattgaaggtgaaatgggcgacagccatatgggtttgcaggcacgcttgatgtcacaggcattgcgtaaactgactggtaacatcaagcgtaccaatacgctggtgatttttattaaccagatccgtatgaagatcggtgtcatgttcggcaatccggaaacgaccaccggcggtaacgcgctcaagttttactcctcagtccgtctcgatatccgccgtaccggtgcgattaaaaaaggcgacgaggtcattggctccgagaccaaggtgaaggtgatcaagaacaaggttgcgccgccgttcaagcaggctgaatttgacatcatgtacggcgaaggtatttcccgtctgggcgaaatcattgagttgggtacaaatttgaaactggttgagaaatcaggtgcgtggtacagctacaacggtgaaaaaatcggccagggtaaagaaaacgctaaagagttcctgcgcgagaatccagcgattgcggcagaaattgaagccaagattcgcgacaactctaatgtgctggcagatagcatgactgcggccagaagtgaggacgattaa

SEQ ID NO: 100388 - protein, 342 aa, Methylomonas clara
MDDNKSKALAAALSQIEKQFGKGSIMRMGDADIGEDLQVVSTGSLGLDIALGVGGLPRGRIIEIYGPESSGKTTLTLSAIAEMQKLGGVAAFIDADDALDPQYASKLGVNVPELLISQPDTGEQALEIADMLVRSGSVDIVVVDSVAALTPRAEIEGEMGDSHMGLQARLMSQALRKLTGNIKRTNTLVIFINQIRMKIGVMFGNPETTTGGNALKFYSSVRLDIRRTGAIKKGDEVIGSETKVKVIKNKVAPPFKQAEFDIMYGEGISRLGEIIELGTNLKLVEKSGAWYSYNGEKIGQGKENAKEFLRENPAIAAEIEAKIRDNSNVLADSMTAARSEDD

SEQ ID NO: 100389 - DNA, 1035 bp, Methylobacillus flagellatum
  CDS (1)..(1035): transl_table=11
atggatgaaaacagaagcaaagcgctagccgccgccctctcgcaaatcgagaaacaatttggcaaaggctctatcatgcgcatgggcgacaccgatgtcgctgctgacatccaggcagtttctaccggctccctgggcctggacatcgccctgggtattggcggcttgccgcgcggccgcatcgtcgagatttacggcccggaatcctccggcaagaccacgctgacattgtctgtgatcgcgcagatgcaaaagctgggcggcacggcagcattcatcgacgcagaacacgcgctcgacccggtctacgcgcagaagctcggtgtcaatgtttccgatctgctcatctcccagcccgacaccggcgaacaggcgctcgagatcgccgacatgctggtgcgttccggctcggtagatgtcgtggtggtcgactccgtcgctgcgctgacgcccaaggccgaaatcgaaggcgaaatgggcgactcgcacatgggcctgcaggcccgcctgatgtcgcaggcactgcgcaagctcaccgccaacatcaagcgcaccaacaccttggtcatcttcatcaaccagatccgcatgaagatcggcctgatgttcggcaaccccgagaccaccaccggcggcaatgcactcaagttctacgcctccgtgcgcctggacatccgccgcaccggcgcgatcaagaagggggacgaggtcacgggatcagaaacccgggtcaaggtagtgaagaacaacgtggcccctccgttcaagctagcggaattcgacatcctctatggcgaaggtatctcgcgcgagggcgaaatcatcgaactcggcgtcaaccttaaattgatcgagaaggccggtgcctggtacagctacaagggcgagaagatcggccagggcaaggacaacgcgcgcgagttcctcagggagcacccggaaatcgccaatgagatcgacgccaagattcgcgagcattccaatctggccaacgccgcgatgacgacggcaccggatgaagaaagcgacgaataa

SEQ ID NO: 100390 - protein, 344 aa, Methylobacillus flagellatum
MDENRSKALAAALSQIEKQFGKGSIMRMGDTDVAADIQAVSTGSLGLDIALGIGGLPRGRIVEIYGPESSGKTTLTLSVIAQMQKLGGTAAFIDAEHALDPVYAQKLGVNVSDLLISQPDTGEQALEIADMLVRSGSVDVVVVDSVAALTPKAEIEGEMGDSHMGLQARLMSQALRKLTANIKRTNTLVIFINQIRMKIGLMFGNPETTTGGNALKFYASVRLDIRRTGAIKKGDEVTGSETRVKVVKNNVAPPFKLAEFDILYGEGISREGEIIELGVNLKLIEKAGAWYSYKGEKIGQGKDNAREFLREHPEIANEIDAKIREHSNLANAAMTTAPDEESDE

SEQ ID NO: 100391 - DNA, 1050 bp, Mycobacterium smegmatis
  CDS (1)..(1050): transl_table=11
atggcgcagcaggccccagatcgcgaaaaggccctcgaactggcgatggcccagatcgacaagaatttcggcaaaggctcggtgatgcgcctcggcgaagaggtgcgccagccgatctcggtgatccccaccggctccatctcgctggatgtggcgctcggcatcggcggcctgccgcggggccgcgtcatcgagatctacggcccggagtcctcgggtaagaccaccgtggccctgcatgccgtcgccaacgcgcaggccgcgggcggtatcgcggcgttcatcgacgccgagcacgcgctggatcccgagtacgccaagaagctgggtgtggacaccgactcgctgctggtgtcgcagcccgacaccggtgagcaggcgctggagatcgccgacatgctggtgcggtccggcgcgctggacatcatcgtcatcgactcggtcgccgccctggtgccgcgcgccgagatcgagggcgagatgggtgacagccacgtcggcctgcaggcccgcctgatgagccaggcgctgcgcaagatgaccggcgcgttgaacaactcgggcaccaccgcgatcttcatcaaccagctccgcgagaagatcggtgtgatgttcggctcgcccgagaccaccacgggcggtaaggcactgaagttctacgcctcggtccgcctcgacgtgcgccgtatcgagacgctcaaggacggcaccgacgcggtcggtaaccgcacccgcgtcaaggtcgtcaagaacaaggtctccccgccgttcaagcaggccgagttcgacatcctctacggccagggcatcagccgcgagggttcgctcatcgacatgggcgtcgagcacggcttcatccgcaagtccgggtcctggttcacctacgagggtgagcagctgggccagggcaaggagaacgcccgcaagttcctgctggagaacaccgacgtcgccaacgagatcgagaagaagatcaaagagaagctcggtatcggcgccgtcgtgaccgctgaagccgatgacgtcctcccggccccggttgacttctga

SEQ ID NO: 100392 - protein, 349 aa, Mycobacterium smegmatis
MAQQAPDREKALELAMAQIDKNFGKGSVMRLGEEVRQPISVIPTGSISLDVALGIGGLPRGRVIEIYGPESSGKTTVALHAVANAQAAGGIAAFIDAEHALDPEYAKKLGVDTDSLLVSQPDTGEQALEIADMLVRSGALDIIVIDSVAALVPRAEIEGEMGDSHVGLQARLMSQALRKMTGALNNSGTTAIFINQLREKIGVMFGSPETTTGGKALKFYASVRLDVRRIETLKDGTDAVGNRTRVKVVKNKVSPPFKQAEFDILYGQGISREGSLIDMGVEHGFIRKSGSWFTYEGEQLGQGKENARKFLLENTDVANEIEKKIKEKLGIGAVVTAEADDVLPAPVDF

SEQ ID NO: 100393 - DNA, 1047 bp, Neisseria gonorrhoeae
  CDS (1)..(1047): transl_table=11
atgtcagacgacaaaagcaaagcccttgccgccgcactggcgcaaatcgaaaaaagtttcggcaaaggcgccatcatgaaaatggacggcagccagcaggaagaaaacctcgaagtcatttccaccggatcgctcggattagacctcgccctcggagtcggcggcctgccgcgcgggcgcatcgtcgaaatcttcggccccgaatcctccggcaaaaccacactctgcctcgaagccgtcgcccaatgccagaaaaacggcggcgtgtgcgcctttgtcgatgccgaacacgccttcgatcccgtttacgcccgcaaactcggcgtaaaagtcgaagagctttacctgtcccagcccgataccggcgaacaggctttggaaatctgcgacacgctcgtccgttcgggcggcatagatatggtagtcgtcgattccgtagccgcactcgtccccaaagccgaaatcgaaggcgatatgggggacagccacgtcggactgcaggcgcgcctgatgagtcaggctttgcgcaaactgaccggacacatcaaaaaaaccaatacgctggttgtgttcatcaaccaaatccgaatgaagatcggcgtaatgttcggcagccccgagaccacgaccggcggcaacgcgctgaaattctattcttccgtccgcctcgacatccgccgcaccggatccatcaaaaaaggcgaagaagtattgggcaacgaaacccgcgtcaaagtcatcaaaaacaaagtcgcccccccgttccgtcaggcagagtttgacatcctctacggagaaggcatcagttgggaaggcgaattgatcgacatcggcgtgaaaaacgacatcatcaacaaatccggcgcgtggtacagctacaacggcgcgaaaatcggtcagggcaaagacaacgtccgcgtctggctgaaagaaaaccccgaaatttccgacgaaatcgacgcaaaaatccgcgccctcaacggcgtagaaatgcacatcaccgaagggacgcaggacgaaaccgacggcgaacgacccgaagaataa

SEQ ID NO: 100394 - protein, 348 aa, Neisseria gonorrhoeae
MSDDKSKALAAALAQIEKSFGKGAIMKMDGSQQEENLEVISTGSLGLDLALGVGGLPRGRIVEIFGPESSGKTTLCLEAVAQCQKNGGVCAFVDAEHAFDPVYARKLGVKVEELYLSQPDTGEQALEICDTLVRSGGIDMVVVDSVAALVPKAEIEGDMGDSHVGLQARLMSQALRKLTGHIKKTNTLVVFINQIRMKIGVMFGSPETTTGGNALKFYSSVRLDIRRTGSIKKGEEVLGNETRVKVIKNKVAPPFRQAEFDILYGEGISWEGELIDIGVKNDIINKSGAWYSYNGAKIGQGKDNVRVWLKENPEISDEIDAKIRALNGVEMHITEGTQDETDGERPEE

SEQ ID NO: 100395 - DNA, 1047 bp, Neisseria meningitidis serogroup A
  CDS (1)..(1047): transl_table=11
atgtcagacgacaaaagcaaagcccttgccgccgcactggcgcaaatcgaaaaaagtttcggcaaaggcgccatcatgaaaatggacggcagccagcaggaagaaaacctcgaagtcatttccaccggatcgctcggattagacctcgccctcggagtcggcggtctgccgcgcgggcgcatcgtcgaaatcttcggccccgaatcctccggcaaaaccaccctctgcctcgaagccgtcgcccaatgccagaaaaacggcggcgtgtgcgcctttgtcgatgccgaacacgccttcgatcccgtttacgcccgcaaactcggcgtaaaagtcgaagagctttacctgtcccagcccgataccggcgaacaggctttggaaatctgcgacacactcgtccgttcgggcggcatagatatggtagtcgtcgattccgtagccgcactcgtccccaaagccgaaatcgaaggcgatatgggggacagccatgtcggactgcaggcgcgcctgatgagtcaggctttgcgcaaactgaccggacacatcaaaaaaaccaacacgctggttgtgttcatcaaccaaatccggatgaagatcggcgtaatgttcggcagccccgaaaccaccaccggcggcaacgcgctgaaattctattcttccgtccgcctcgacatccgccgcaccggatccatcaaaaaaggcgaagaagtattgggcaacgaaacccgcgtcaaagtcatcaaaaacaaagtcgcccccccgttccgtcaggcagagtttgacatcctctacggagaaggcatcagttgggaaggcgaattgatcgacatcggcgtgaaaaacgacatcatcaacaaatccggcgcgtggtacagctacaacggtgcgaaaatcgggcagggcaaggacaacgtccgtgtctggttgaaggagaatcctgaggttgccgatgagatcgatgcgaaaatccgcgccctcaacggcgtagaaatgcacatcaccgaagggacacaggacgaaaccgacggcgaacgccccgaagaataa

SEQ ID NO: 100396 - protein, 348 aa, Neisseria meningitidis serogroup A
MSDDKSKALAAALAQIEKSFGKGAIMKMDGSQQEENLEVISTGSLGLDLALGVGGLPRGRIVEIFGPESSGKTTLCLEAVAQCQKNGGVCAFVDAEHAFDPVYARKLGVKVEELYLSQPDTGEQALEICDTLVRSGGIDMVVVDSVAALVPKAEIEGDMGDSHVGLQARLMSQALRKLTGHIKKTNTLVVFINQIRMKIGVMFGSPETTTGGNALKFYSSVRLDIRRTGSIKKGEEVLGNETRVKVIKNKVAPPFRQAEFDILYGEGISWEGELIDIGVKNDIINKSGAWYSYNGAKIGQGKDNVRVWLKENPEVADEIDAKIRALNGVEMHITEGTQDETDGERPEE

SEQ ID NO: 100397 - DNA, 1047 bp, Neisseria meningitidis serogroup B
  CDS (1)..(1047): transl_table=11
atgtcagacgacaaaagcaaagcacttgccgccgcactggcgcaaatcgaaaaaagtttcggcaaaggcgccatcatgaaaatggacggcagccagcaggaagaaaacctcgaagtcatttccaccggatcgctcggattagacctcgccctcggagtcggcggtctgccgcgcgggcgcatcgtcgaaatcttcggccccgaatcctccggcaaaaccaccctctgcctcgaagccgtcgcccaatgccagaaaaacggcggcgtgtgcgcctttgtcgatgccgaacacgcctttgatcccgtttacgcccgcaaactcggcgtaaaagtcgaagagctttacctgtcccagcccgataccggcgaacaggctttggaaatctgcgacacactcgtccgttcgggcggcatagatatggtagtcgtcgattccgtagccgcactcgtccccaaagccgaaatcgaaggcgatatgggggacagccatgtcggactgcaggcgcgcctgatgagccaggctttgcgcaaactgaccggacacatcaaaaaaaccaacacgctggttgtgttcatcaaccaaatccggatgaagatcggcgtaatgttcggcagccccgaaaccaccaccggcggcaacgcgctgaaattctattcttccgtccgcctcgacatccgccgcaccggatccatcaaaaaaggcgaagaggtattgggcaacgaaacccgcgtcaaagtcatcaaaaacaaagtcgcccccccgttccgtcaggcagagtttgacatcctctacggagaaggcatcagttgggaaggcgaattgatcgacatcggcgtgaaaaacgacatcatcaacaaatccggcgcgtggtacagctacaacggcgcgaaaatcggtcagggcaaagacaacgtccgcgtctggctgaaggaaaatcccgaagtcgccaatgaaatcgacgcaaaaatccgcgccctcaacggcgtagaaatgcacatcaccgaagggacgcaggacgaaaccgacggcgaacgccccgaagaataa

SEQ ID NO: 100398 - protein, 348 aa, Neisseria meningitidis serogroup B
MSDDKSKALAAALAQIEKSFGKGAIMKMDGSQQEENLEVISTGSLGLDLALGVGGLPRGRIVEIFGPESSGKTTLCLEAVAQCQKNGGVCAFVDAEHAFDPVYARKLGVKVEELYLSQPDTGEQALEICDTLVRSGGIDMVVVDSVAALVPKAEIEGDMGDSHVGLQARLMSQALRKLTGHIKKTNTLVVFINQIRMKIGVMFGSPETTTGGNALKFYSSVRLDIRRTGSIKKGEEVLGNETRVKVIKNKVAPPFRQAEFDILYGEGISWEGELIDIGVKNDIINKSGAWYSYNGAKIGQGKDNVRVWLKENPEVANEIDAKIRALNGVEMHITEGTQDETDGERPEE

SEQ ID NO: 100399 - DNA, 1032 bp, Nitrosomonas europaea
  CDS (1)..(1032): transl_table=11
atggacgaaaacaaaaataaggcactttcagcagcgcttgcccagattgagaagcagtacggcaagggttcgatcatgcggcttggcgacagtgatgtggcaaaagatattcaggtggtatccacgggttcgctgggtctggatattgcactgggtgtgggcggccttccgcgcggacgcatcatcgagatttacggaccggaatcttcgggtaaaactaccctgacgctgcaagctatagccgaaatgcagaaactgggcgggacggcggcttttatcgatgcggaacatgcactggatccgcagtatgctcagaaaatcggcgtcaatgttcaggaattactgatttcccagccggataacggtgaacaggcactggaaattaccgatatgctggttcgatccggatcggtcgatgtggtggtggtcgactcagtggcagcgctgactccccgtgctgaaatagaaggggagatgggtgagccgcagatggggctgcaggcaaggctcatgtcccaggctttgcgcaagctgacggccaatatcaagcgtaccaataccatggtgattttcatcaaccagatacgtatgaagatcggggtgatatttggtaatcctgagacgaccacgggaggaaatgcgctgaaattttatgcttctgtgcgtctggatatccgccgtactggttcgatcaagcgtggtgaggaaatggtcgggaacgaaacccgggtcaagatcgttaaaaacaaggttgccccacctttcaaacaggcagatttcgatattttgtatggcgaaggtatctcgcgtgaaagcgaaatcatcgaactcggtgtattgcacaaattgatcgagaaagcgggggcctggtactcctataatggcgaaaagatagggcagggcaaggataatgtgcgtgattatctgaaagagcacaagagtattgcgcatgagatcgagcagaaaatacgcgctgccgtcgggcttgcagagacagacagtcgggttgttccaccctcctccggtgaataa

SEQ ID NO: 100400 - protein, 343 aa, Nitrosomonas europaea
MDENKNKALSAALAQIEKQYGKGSIMRLGDSDVAKDIQVVSTGSLGLDIALGVGGLPRGRIIEIYGPESSGKTTLTLQAIAEMQKLGGTAAFIDAEHALDPQYAQKIGVNVQELLISQPDNGEQALEITDMLVRSGSVDVVVVDSVAALTPRAEIEGEMGEPQMGLQARLMSQALRKLTANIKRTNTMVIFINQIRMKIGVIFGNPETTTGGNALKFYASVRLDIRRTGSIKRGEEMVGNETRVKIVKNKVAPPFKQADFDILYGEGISRESEIIELGVLHKLIEKAGAWYSYNGEKIGQGKDNVRDYLKEHKSIAHEIEQKIRAAVGLAETDSRVVPPSSGE

SEQ ID NO: 100401 - DNA, 1044 bp, Nocardia farcinica
  CDS (1)..(1044): transl_table=11
atggcaccacaggcctacgaccgcgacaaggccctcgagctcgcgctcgcccaggtcgagaagagcttcggcaagggcgcggtgatgcggctcggcgaggaggcccgccagcccatctcggtgatcccgacgggctccatcgcgctggacgtggcgctgggcatcggcggcctgccccgcggccgcatcgtcgagatctacggtccggaatcctccggtaagaccaccgtcgccctgcacgcggtcgccaacgcgcaggccgcgggcggtgtggccgccttcatcgacgccgagcacgcgctcgaccccgactatgcgcgcaagctcggcgtcgacaccgacgccctgctggtctcccagcccgacaccggtgagcaggcgctcgagatcgccgacatgctggtccgctccggcgccatcgacatcatcgtcatcgactcggtggccgcgctggtgccccgcgccgagatcgagggcgagatgggcgacagccacgtcggcctgcaggcccggctgatgagccaggcgctgcgcaagatgaccagcgcgctcaacaactccggtaccaccgccatcttcatcaaccagctgcgcgagaagatcggtgtcatgttcggctcgcccgagaccaccaccggcggcaaggcgctgaagttctacgcctcggtgcgcctggacgtgcgccgcatcgagaccctcaaggacggcagcgacgcggtcggcaaccgcacccgcgtcaaggtcgtcaagaacaaggtctccccgccgttcaagcaggccgagttcgacatcctctacggccagggcatctccaaggagggttcgctgatcgacatgggtgtggagcagggcttcatccgcaagtccggctcctggtacacctacgagggcgaccagctgggccagggcaaggagaacgcccgcaagttcctgctggagaacaccgacgtccgcgacgagatcgagaagaagatcaaggaaaagctcggcatcggcgccgatctgaccgccgaggacgcggccgaggtgcccgccgatttctga

SEQ ID NO: 100402 - protein, 347 aa, Nocardia farcinica
MAPQAYDRDKALELALAQVEKSFGKGAVMRLGEEARQPISVIPTGSIALDVALGIGGLPRGRIVEIYGPESSGKTTVALHAVANAQAAGGVAAFIDAEHALDPDYARKLGVDTDALLVSQPDTGEQALEIADMLVRSGAIDIIVIDSVAALVPRAEIEGEMGDSHVGLQARLMSQALRKMTSALNNSGTTAIFINQLREKIGVMFGSPETTTGGKALKFYASVRLDVRRIETLKDGSDAVGNRTRVKVVKNKVSPPFKQAEFDILYGQGISKEGSLIDMGVEQGFIRKSGSWYTYEGDQLGQGKENARKFLLENTDVRDEIEKKIKEKLGIGADLTAEDAAEVPADF

SEQ ID NO: 100403 - DNA, 1071 bp, Paracoccus denitrificans
  CDS (1)..(1071): transl_table=11
atggcaggggcaacacttttcgacatgaacgacaagcgatccgcagacaagcagaaggcgctagacagcgcattggcccagatcgaacggcagttcggcaaaggctcgatcatgaagctgggcgccgacaatccggtggccgagatcgaggccacctcgaccggctcgctggggctcgacatcgcgctggggatcggcggtctgcccaagggccggatcatcgagatattcgggccggaaagctcgggcaagaccacgctgacgctgcatgtcgtggcggaagagcagaagaaaggcggcgtttgcgcctttgtcgatgccgaacatgcgctggacccgcaatatgccaagaagctgggcgtcaatctggacgagttgctgatcagccagcccgatacgggcgagcaggcgcttgagattgtcgatacgctggtggcttccggtgcggtcagcctggtggtggtcgattcggtcgcggcgctgacccccaagtccgagatcgaaggtgacatgggcgacatgcagatgggcagccaggcccggctgatgagccaggcgatgcgcaagctgaccgccagcatcggccggtcgaactgtatggtgatcttcatcaaccagatccgcatgaagatcggcgtgatgttcggaagcccagagacgacgaccggcggcaatgccctgaagttttatgcctcggtgcgcctggatatccgccgcgccggctcgatcaaggaccgtgacgaggtgaccggcaacgccactcgcgtcaaggtggtcaagaacaaggtcgcgccacctttccgtcaggtcgagttcgacatcatgtatggcgagggcatctcgaaggtcggcgaactgatcgacttgggcatcaaggccggcgtggtcgaaaaatcggggtcgtggtactcctatggcgacgagcgcatcggccagggccgtgagaatgccaagcaattcctgcgcgatcatcccgatatggcccatgcgatcgaggacaagatccgcgccagccacggcctggatttcggcgtcgcggacgatggcgatgaggtgatggccgaggattga

SEQ ID NO: 100404 - protein, 356 aa, Paracoccus denitrificans
MAGATLFDMNDKRSADKQKALDSALAQIERQFGKGSIMKLGADNPVAEIEATSTGSLGLDIALGIGGLPKGRIIEIFGPESSGKTTLTLHVVAEEQKKGGVCAFVDAEHALDPQYAKKLGVNLDELLISQPDTGEQALEIVDTLVASGAVSLVVVDSVAALTPKSEIEGDMGDMQMGSQARLMSQAMRKLTASIGRSNCMVIFINQIRMKIGVMFGSPETTTGGNALKFYASVRLDIRRAGSIKDRDEVTGNATRVKVVKNKVAPPFRQVEFDIMYGEGISKVGELIDLGIKAGVVEKSGSWYSYGDERIGQGRENAKQFLRDHPDMAHAIEDKIRASHGLDFGVADDGDEVMAED

SEQ ID NO: 100405 - DNA, 1320 bp, Pasteurella haemolytica
  CDS (157)..(1263): transl_table=11
caagggcattgccttgctcgcaaatttatttttgtgatcttgatcgaaaatcctaaaaaaatgcttgcaactggataagtaaatactataataatatacagttattttgcagcaacaagcggttgcttttagataaaagtttacaaaggatagaatatggcagagaaaaaaagtcaaaagaacactccggttaaacagattgatccggaacaaaaagaaaaagcgttggcagccgcattagctcaaattgaaaagcaatttggcaaaggctcaattatgaagttaggcgatactcaagcccttgatattgaagcagtttcaaccggttctcttggtttagactcagcattaggcattggtggtttaccaatgggtcgtattgtggaaatttatggaccggagtcttcaggtaaaactacattaactttatctgtggtggctcaagcccaaaaaaatggtaaaacttgtgcctttattgatgccgaacacgcacttgatcctatttacgcccgtaagttaggggtagatacagatggattattaatttcacaaccggataatggcgaacaagcattagaaatttgtgatgcgttagttcgttccggtgcggttgatgtaattattgtggactctgttgcggcacttacaccaaaagcagagattgaaggcgatatgggtgattcccatatgggcttacaagctcgtttaatgtcacaagcattgcgtaaattaaccgcaaatatcaaagcgaccaactgcttggtgattttcattaaccaaattcgtatgaaaattggagtaatgttcggtaaccctgaaaccacaactggtggtaatgcccttaaattctatgcttcagtacgtttagatattcgtcgttcaggcgtagtaaaagacggtgatgaggttatcggtagcgaaacaaaagtgaaaattgtgaaaaacaaggttgctccaccgttccgtgaagtccaatttgatattatgtacggtgagggcattgcccgtatgaatgaattactcattttagcggaatctcacggcttcattaataaagcaggggcttggttctcttatgaaggggagaaaatcggtcagggtaaaaataatgccatcaaatggttaaaagaacaccctgaagtggcgagtaaaattgagcaagatattcgaaatctactcatttcaaacccaacttttacggctactccagattctgaaaatgcagacaatgcagatgatgaatttagtgaagaagaactctaattaaatttatgcggttttcgctcaacgtgaaaatcgcatttttatttataaccgata

SEQ ID NO: 100406 - protein, 368 aa, Pasteurella haemolytica
MAEKKSQKNTPVKQIDPEQKEKALAAALAQIEKQFGKGSIMKLGDTQALDIEAVSTGSLGLDSALGIGGLPMGRIVEIYGPESSGKTTLTLSVVAQAQKNGKTCAFIDAEHALDPIYARKLGVDTDGLLISQPDNGEQALEICDALVRSGAVDVIIVDSVAALTPKAEIEGDMGDSHMGLQARLMSQALRKLTANIKATNCLVIFINQIRMKIGVMFGNPETTTGGNALKFYASVRLDIRRSGVVKDGDEVIGSETKVKIVKNKVAPPFREVQFDIMYGEGIARMNELLILAESHGFINKAGAWFSYEGEKIGQGKNNAIKWLKEHPEVASKIEQDIRNLLISNPTFTATPDSENADNADDEFSEEEL

SEQ ID NO: 100407 - DNA, 1500 bp, Pasteurella multocida
  CDS (175)..(1239): transl_table=11
gatatcaaggatataaaaaacaaaaattgcactttcaaactgacaacttgacggatagcgcaattttattttgcgagaaatcccacaaatttgataaaaagcacttgatactgtttattcatacagttaatatacacgacaaattctgatgatgattttattgaggattcaaacatggcaacaaaagaagaaaaaaataaagcactggcagcagcacttgggcagattgaaaaacaatttgggaaaggctctattatgaaattgggcgatacccaagccttggatgttgaagccgtgtcaacaggctccttaagcctcgacgtcgcacttggcattggcgggttaccaatgggtcgtattgttgaaattttcggacctgaatcttccggtaaaaccaccttaaccctttctgtcattgcgcaagcacaaaaagaaggcaaaacctgtgcctttattgacgcagaacacgcattagatccaatttatgctgccaaactgggcgtcaatgtgaatgaactgttagtttcccaacctgataacggtgaacaagcactcgaaatttgcgatgcgttagtgcgttcaggtgcagtagatgtgatcattgtggactcagtcgcagcattaaccccgaaagcggaaattgaaggagaaatgggtgactcacacatgggcttacaagcacgtttgatgtcacaagcgttacgtaaactcactggacaaatcaaaaactcaaattgcttagtggtctttattaaccaaatccgtatgaaaattggtgttatgttcggtaacccagaaaccacaacagggggtaatgcactgaaattctatgcctctgtacgtttagatattcgccgtacgggtgcgattaaagagggtgaagaagtgatcggtaacgaaacccgtgtcaaagtggtgaaaaacaaagtggcggcaccattccgtcaagtagatttccaaattctttacggtcaaggtatttctaaaacaggcgagctcatcgagttaggcgtaaaacacaaattagtggataaagcaggtgcatggtacgcttacaatggtgaaaaaatcggtcaaggtaaagctaacgcgatgaaatggttagaagagcatcctgaagaagcattggctttagaaacgaaattacgcaatgagttgctcgcgaatccagaaaaagtactcgcggcagacattgcggaaaaaaatgaaagctctacgggcttagaagcggattattaatctgtttttagcggtttaatcgaaaaaagtgcggtgagttttaacaaaatttcaccgcactttttgctgagtatatctaaacattgtaaagaagcaggtaaccatcgtatgtcttctcccgcgttaaattatgtcgttggcttattagcacgccgtgaatacagtgagtttgaactcgctgtaaaatgcaagaaaaaggcttttctgaacaagaaattgatgacacacttgccttttgccaacaaaaaaactggcaaaatg

SEQ ID NO: 100408 - protein, 354 aa, Pasteurella multocida
MATKEEKNKALAAALGQIEKQFGKGSIMKLGDTQALDVEAVSTGSLSLDVALGIGGLPMGRIVEIFGPESSGKTTLTLSVIAQAQKEGKTCAFIDAEHALDPIYAAKLGVNVNELLVSQPDNGEQALEICDALVRSGAVDVIIVDSVAALTPKAEIEGEMGDSHMGLQARLMSQALRKLTGQIKNSNCLVVFINQIRMKIGVMFGNPETTTGGNALKFYASVRLDIRRTGAIKEGEEVIGNETRVKVVKNKVAAPFRQVDFQILYGQGISKTGELIELGVKHKLVDKAGAWYAYNGEKIGQGKANAMKWLEEHPEEALALETKLRNELLANPEKVLAADIAEKNESSTGLEADY

SEQ ID NO: 100409 - DNA, 1059 bp, Photobacterium profundum
  CDS (1)..(1059): transl_table=11
atggacgataataagcagaaggctcttgccgcagcattaggccagattgaaaagcagtttggtaaaggctcaatcatgagattgggcgataataagacaatggatatcgaaacggtatcgacaggttctttagctctggatattgctctaggtgctggcggtttgccaatggggcgtattgtcgagatttacggtcctgaatcatcaggtaaaacaaccctaactcttgaagttattgcctccgctcagaaagccggtaagacatgtgcttttattgatgctgaacatgctcttgatcctatctatgcacagaagctgggtgtcgatattgaccaactactgtgttctcagcctgatacgggtgagcaagcgctagaaatcgtcgatgcactcgcacgttctggtgccgttgatctgattgttgtcgattctgtagcggcattgaccccgaaagccgaaattgaaggtgaaatgggcgacagccatatgggattgcaagctaggatgttgtcgcaggccatgcgaaaactgactggtaatttaaaaaatgcaaattgcatgtgtatcttcattaaccaaattcgaatgaagattggtgtaatgtttggcaatccagaaacgactactggtggtaatgcccttaaattctacgcctctgttcgtcttgatattcgccgtactggtgcaattaaagatggtgatgaagttgttggtaacgaaacacgcatcaaggttgttaaaaataaaattgccgcgccgtttaagcaagctgaaacacaaattctttatggtcaaggcttcaaccgtaacggtgagctaattgatctaggtgttaagcataagctggtagaaaaagcgggtgcttggtacagctataaaggtaataagattggtcaaggtaaggctaattcttgtaagcacctagttgaaaacccagcaatagctgaagagattgaaaaactactgcgtgacatgttgttatcaccagttggtgaagaagtagaaaaagcagatgtaaaaaaagatgcaaaaaaagatgcagctgaagcactaaaataa

SEQ ID NO: 100410 - protein, 352 aa, Photobacterium profundum
MDDNKQKALAAALGQIEKQFGKGSIMRLGDNKTMDIETVSTGSLALDIALGAGGLPMGRIVEIYGPESSGKTTLTLEVIASAQKAGKTCAFIDAEHALDPIYAQKLGVDIDQLLCSQPDTGEQALEIVDALARSGAVDLIVVDSVAALTPKAEIEGEMGDSHMGLQARMLSQAMRKLTGNLKNANCMCIFINQIRMKIGVMFGNPETTTGGNALKFYASVRLDIRRTGAIKDGDEVVGNETRIKVVKNKIAAPFKQAETQILYGQGFNRNGELIDLGVKHKLVEKAGAWYSYKGNKIGQGKANSCKHLVENPAIAEEIEKLLRDMLLSPVGEEVEKADVKKDAKKDAAEALK

SEQ ID NO: 100411 - DNA, 1348 bp, Proteus mirabilis
  CDS (151)..(1218): transl_table=11
tttctctttaaaatcaattcttaaagaaattattaataattaacttgatactgtatgattatacagtataatgagtttcaacaagcaaaatcatatacgttttaatggtagtgacccatctttatgcttcactgcccagagggagataacatggctattgatgaaaacaaacaaaaagcattggccgcagcacttggtcaaattgaaaagcaatttggtaaaggttctatcatgcgtctgggcgaagaccgttccatgaacgtagaaactatctctacaggatctttatcattagacgttgctttaggtgcaggtggattgccacgtggccgtattgttgaaatctatggccctgaatcttctggtaaaacaaccttgactctacaagttattgcctctgctcagcgtgaaggaaaaatttgtgcatttattgatgctgaacatgcattagacccaatttatgctcaaaagctaggtgtcgatatcgataatctactctgctctcaacctgacacaggtgaacaagctctggaaatttgtgatgcattatctcgctctggtgcggtcgatgttattgtcgtggactccgtggcagcattaacaccaaaagctgaaattgaaggtgaaattggtgattcacacgttggtttagccgcacgtatgatgagccaagctatgcgtaaactagcgggtaaccttaaaaactctaatacactgctgattttcattaaccaaattcgtatgaaaatcggtgttatgtttggtaacccagaaaccacgaccggtggtaatgcgcttaaattctatgcttctgttcgtttagacattcgtcgcattggctctgtcaaaaatggtgatgaagtcattggtagtgagactcgcgttaaagttgttaaaaataaagtggctgcaccgtttaaacaagctgaattccaaattatgtacggtgaaggtattaatacctatggcgaactgattgatttaggtgttaaacataagttagtagagaaagcaggtgcttggtatagctacaatggcgaaaaaattggtcaaggtaaagctaacgcaaccaattacttaaaagaacatcctgaaatgtacaatgagttaaacactaaattgcgtgaaatgttgttaaatcatgctggtgaattcacaagtgctgcggattttgcaggtgaagagtcagacagtgatgctgacgacacaaaagagtaattagctggttgtcatgctgtttgtgtgaaaatagaccttaaatcattggctattatcacgacagcatcccatagaataacttgtttgtataaattttattcagatggcaaaggaagccttaaaaaagctt

SEQ ID NO: 100412 - protein, 355 aa, Proteus mirabilis
MAIDENKQKALAAALGQIEKQFGKGSIMRLGEDRSMNVETISTGSLSLDVALGAGGLPRGRIVEIYGPESSGKTTLTLQVIASAQREGKICAFIDAEHALDPIYAQKLGVDIDNLLCSQPDTGEQALEICDALSRSGAVDVIVVDSVAALTPKAEIEGEIGDSHVGLAARMMSQAMRKLAGNLKNSNTLLIFINQIRMKIGVMFGNPETTTGGNALKFYASVRLDIRRIGSVKNGDEVIGSETRVKVVKNKVAAPFKQAEFQIMYGEGINTYGELIDLGVKHKLVEKAGAWYSYNGEKIGQGKANATNYLKEHPEMYNELNTKLREMLLNHAGEFTSAADFAGEESDSDADDTKE

SEQ ID NO: 100413 - DNA, 978 bp, Proteus vulgaris
  CDS (1)..(978): transl_table=11
atggctattgatgagaacaaacaaaaggcacttgcggcagcactgggtcaaatcgaaaagcaatttggtaaaggttctatcatgcggttgggcgaggatcgctcgatggatgttgaaaccatttctacgggctctttgtcccttgatattgctctgggggccggcggtttacctatggggcgcatcgttgagatttatggcccagaatcttctggtaaaaccacgctgaccttacaggtgattgccgctgctcaacgcgaaggaaaaacctgtgcgttcatcgatgctgaacatgcgttggacccgatttatgcgaaaaaacttggcgtagatattgataacctgctgtgttctcagccggataccggtgagcaagcactggagatctgtgatgcactcacgcgctctggcgctgttgacgttatcattgtcgactctgttgcagccttgacaccaaaagctgaaattgaaggcgaaatcggtgactctcacatgggccttgcggcacgtatgatgagccaggctatgcgtaaactggcaggtaacctgaaacaagccaatacgctgctaatcttcattaaccagatccgtatgaaaattggtgtgatgtttggtaaccctgaaaccactaccggtggtaacgcactgaaattttatgcctctgttcgtctggatattcgtcgtactggcgctatcaaggacggtgaagaagttgtcggtagcgaaactcgcgttaaagtcgtgaagaataaagtggcagcaccgttcaaacaggctgaattccaaattttgtatggtgaaggtatcaatatccatggtgagttagttgatctgggtgtgaaacacaaactgatcgaaaaagcgggtgcatggtatagctataacggcgacaaaatcggccagggtaaagcaaacgcctgcaatttcctgaaagagaattcgctggtgaaggaaacgaagaattttaatggctgctga

SEQ ID NO: 100414 - protein, 325 aa, Proteus vulgaris
MAIDENKQKALAAALGQIEKQFGKGSIMRLGEDRSMDVETISTGSLSLDIALGAGGLPMGRIVEIYGPESSGKTTLTLQVIAAAQREGKTCAFIDAEHALDPIYAKKLGVDIDNLLCSQPDTGEQALEICDALTRSGAVDVIIVDSVAALTPKAEIEGEIGDSHMGLAARMMSQAMRKLAGNLKQANTLLIFINQIRMKIGVMFGNPETTTGGNALKFYASVRLDIRRTGAIKDGEEVVGSETRVKVVKNKVAAPFKQAEFQILYGEGINIHGELVDLGVKHKLIEKAGAWYSYNGDKIGQGKANACNFLKENSLVKETKNFNGC

SEQ ID NO: 100415 - DNA, 1206 bp, Pseudomonas aeruginosa
  CDS (144)..(1184): transl_table=11
cccgggctagccgcgcctgcgggcaaccgttcggaacattcttcccgtcgggggtaggcgagcgacttgccctgtggaataatactgtctacttatacagttgttcgtggccgtccggccgccctgacttcgcgaggacttcaatggacgagaacaagaagcgcgccctggccgcggccctgggacagatcgaacgccaattcggcaaaggcgcggtcatgcgcatgggcgaccatgagcgccaggcgatcccggccatctccaccggctccctgggcctggacatcgccctcggcatcggcggcctgcccaagggccggatcgtcgagatctacggtccggaatcctcgggcaagaccaccctgaccctctcggtgatcgccgaggcccagaaacagggcgccacctgtgccttcgtcgacgccgagcacgcgctcgatcccgactatgccggcaagctgggcgtcaacgtcgacgacctgctggtctcccagccggacaccggcgagcaggccctggaaatcaccgacatgctggtgcgctccaacgcggtcgacgtgatcatcgtcgactccgtggcagcgctggtacccaaggccgagatcgaaggcgagatgggcgacgcccacgtcggcctgcaggctcgcctgatgtcccaggcgctgcgcaagatcaccggcaatatcaagaacgccaactgcctggtcatcttcatcaaccagatccgcatgaagatcggcgtcatgttcggcaacccggaaaccaccaccggcggtaacgcactgaagttctacgcctcggtccgcctggacatccgtcgtaccggcgcggtgaaggaaggcgacgaggtggtgggtagcgaaacccgcgtcaaggtggtgaagaacaaggtttccccgccgttccgccaggccgagttccagatcctctacggcaagggcatctaccgtaccggcgagatcatcgacctgggcgtgcaattgggcctggtcgagaagtccggcgcctggtacagctaccagggcagcaagatcggccagggcaaggcgaacgccgccaagtacctggaagacaatccggagatcggttcggtgctggagaagaccatccgcgaccagctgctggccaagagcggtccggtgaaggccgacgccgaagaagtggctgacgccgaagccgattgaggccaatggcgatcgtgctcga

SEQ ID NO: 100416 - protein, 346 aa, Pseudomonas aeruginosa
MDENKKRALAAALGQIERQFGKGAVMRMGDHERQAIPAISTGSLGLDIALGIGGLPKGRIVEIYGPESSGKTTLTLSVIAEAQKQGATCAFVDAEHALDPDYAGKLGVNVDDLLVSQPDTGEQALEITDMLVRSNAVDVIIVDSVAALVPKAEIEGEMGDAHVGLQARLMSQALRKITGNIKNANCLVIFINQIRMKIGVMFGNPETTTGGNALKFYASVRLDIRRTGAVKEGDEVVGSETRVKVVKNKVSPPFRQAEFQILYGKGIYRTGEIIDLGVQLGLVEKSGAWYSYQGSKIGQGKANAAKYLEDNPEIGSVLEKTIRDQLLAKSGPVKADAEEVADAEAD

SEQ ID NO: 100417 - DNA, 1053 bp, Pseudomonas fluorescens
  CDS (1)..(1053): transl_table=11
atggacgacaacaagaagaaagccttggctgcggccctgggtcagatcgaacgtcaattcggcaagggtgccgtaatgcgtatgggcgatcacgaccgtcaggcgatcccggccatttccaccggctctctgggtctggacattgctctgggcattggcggtctgccaaaaggccgtatcgttgaaatctacggccctgagtcgtccggtaaaactaccctgactctgtcggttattgcccaggcgcagaaagccggtgccacttgtgcgttcgtcgatgccgagcacgcactggatccggaatacgccggcaagctgggtgtgaatgttgacgacctgctggtttcccagccggacaccggcgaacaggccctggaaatcaccgacatgctggtgcgttccaacgcggttgacgtgatcatcgtcgactccgtggcggccctggtgcccaaggctgaaatcgaaggtgaaatgggcgacatgcacgtgggcctgcaagcccgcctgatgtcccaggcgctgcgcaaaatcaccggtaacatcaagaacgccaactgcctggtgatcttcatcaaccagatccgcatgaagatcggcgtgatgttcggtagcccggaaaccaccaccggtggtaacgcgctgaagttctacgcttcggtccgtctggacatccgccgtaccggcgcggtgaaggaaggcgacgaagtggtgggcagtgaaacccgggtcaagatcgtcaagaacaaggtggctccgccgttccgtcaggccgagttccagattctttacggcaagggcatctacctcaacggtgaaatcatcgatctgggcgtgctgcacggcttcctggagaaatccggtgcctggtacagctaccagggcaacaagatcggtcagggcaaggccaactcggccaagttcctgcaggacaacccggaaatcggcaacgcgctggagaagcagatccgtgaaaaactgctgactgcatcgccagacgtcaaagccaacccggtcaaagagaccgaagacgatatggccgacgctgatatctga

SEQ ID NO: 100418 - protein, 350 aa, Pseudomonas fluorescens
MDDNKKKALAAALGQIERQFGKGAVMRMGDHDRQAIPAISTGSLGLDIALGIGGLPKGRIVEIYGPESSGKTTLTLSVIAQAQKAGATCAFVDAEHALDPEYAGKLGVNVDDLLVSQPDTGEQALEITDMLVRSNAVDVIIVDSVAALVPKAEIEGEMGDMHVGLQARLMSQALRKITGNIKNANCLVIFINQIRMKIGVMFGSPETTTGGNALKFYASVRLDIRRTGAVKEGDEVVGSETRVKIVKNKVAPPFRQAEFQILYGKGIYLNGEIIDLGVLHGFLEKSGAWYSYQGNKIGQGKANSAKFLQDNPEIGNALEKQIREKLLTASPDVKANPVKETEDDMADADI

SEQ ID NO: 100419 - DNA, 1068 bp, Pseudomonas putida
  CDS (1)..(1068): transl_table=11
atggacgacaacaagaagcgcgccttggctgcggccctgggtcagatcgaacgccaattcggtaaaggcgcggtcatgcgcatgggtgaccatgagcgtcaaggcattccggccatctccaccggctcgctggggctggatatcgccctgggcatcggcggtctgccaaaaggccgtatcgtcgagatctacggcccggaatcgtcgggtaagaccacgctgaccctgtctgtcatcgctgaagcgcaaaagaacggtgctacctgcgccttcgtcgacgccgaacatgcccttgaccctgagtacgccggcaagctgggcgtcaacgtcgatgacctgctggtttcgcagccggacaccggtgagcaggcccttgaaatcaccgacatgctggtgcgttccaacgcggtcgacgtgatcattgtcgactccgttgccgcgctggtaccgaaggccgagatcgaaggcgagatgggtgacatgcatgtgggcctgcaggcccgcctgatgtcccaggcactgcgtaagatcaccggtaacatcaagaacgcgaactgcctggtcatcttcatcaaccagatccgtatgaagatcggtgtgatgttcggcagcccggaaaccactaccggtggtaacgccctgaagttctatgcttcggtccgtctggacatccgccgtaccggcgcggtcaaggaaggcgacgaagtggtcggcagcgaaacccgcgtcaagatcgtcaagaacaaggtctcgcctccgttccgtcaggctgagttccagattctttacgggaaaggtatctaccgtaacggcgagatcattgatctgggggtatctcagggcctggtcgaaaagtccggcgcctggtacgcctaccaaggcaacaagatcggtcaaggcaaagccaacgctgccaagtacctggctgagaacccggctattggtgccgagatcgagaagcagattcgtgagaagttgctgaaagcgggtgctgctgctgaagccggcaaagctgctgctgctgaagctgatgccgatgacatggccgacgctgacgccggttattga

SEQ ID NO: 100420 - protein, 355 aa, Pseudomonas putida
MDDNKKRALAAALGQIERQFGKGAVMRMGDHERQGIPAISTGSLGLDIALGIGGLPKGRIVEIYGPESSGKTTLTLSVIAEAQKNGATCAFVDAEHALDPEYAGKLGVNVDDLLVSQPDTGEQALEITDMLVRSNAVDVIIVDSVAALVPKAEIEGEMGDMHVGLQARLMSQALRKITGNIKNANCLVIFINQIRMKIGVMFGSPETTTGGNALKFYASVRLDIRRTGAVKEGDEVVGSETRVKIVKNKVSPPFRQAEFQILYGKGIYRNGEIIDLGVSQGLVEKSGAWYAYQGNKIGQGKANAAKYLAENPAIGAEIEKQIREKLLKAGAAAEAGKAAAAEADADDMADADAGY

SEQ ID NO: 100421 - DNA, 1068 bp, Pseudomonas putida
  CDS (1)..(1068): transl_table=11
atggacgacaacaagaagcgcgccttggctgcggccctgggtcagatcgaacgccaattcggtaaaggcgcagtcatgcgcatgggcgaccacgagcgccaggcgatcccggccatctccaccggttcgctgggcctggacatcgcactgggcattggcggcctgccaaaaggccgtatcgtcgagatctacggcccggaatcgtcgggtaaaaccacgctgaccctgtcggtcatcgccgaagcccagaaaaacggcgccacctgcgccttcgtcgacgccgagcacgccctcgaccctgaatacgcgggcaagctgggcgtcaacgtagacgacctgctggtttcgcagccggacaccggcgaacaggccctggaaatcaccgacatgctggtgcgttccaacgcggttgacgtgatcatcgtcgactccgtggccgccctggtgccgaaggccgagatcgaaggcgaaatgggtgacatgcacgtgggcctgcaggctcgcctgatgtcccaggcgctgcgcaaaatcaccggtaacatcaagaacgccaactgcctggtcatcttcatcaaccagatccgtatgaagatcggcgtaatgttcggcagcccggaaaccaccaccggtggtaacgccctgaaattctacgcctcggtgcgcctggacatccgtcgaacgggtgcggtcaaggaaggcgacgaggtggtcggcagcgaaacccgcgtcaagatcgtcaagaacaaggtttcgccaccgttccgtcaggccgagttccagatcctctacggcaagggtatctaccgcaatggcgaaatcatcgacctgggtgtttcccaaggtctggtcgagaagtccggtgcctggtatgcctatcaaggcaacaagattggacaaggtaaagccaacgccgccaagtacctggctgagaacccggcgattggtgccgagatcgagaagcagattcgcgacaagttgctgacttctggcgctgtcgctgcggctggcaaagctgcggctgtcgaagcagatgccgatgacatggccgacgctgacgccggttattga

SEQ ID NO: 100422 - protein, 355 aa, Pseudomonas putida
MDDNKKRALAAALGQIERQFGKGAVMRMGDHERQAIPAISTGSLGLDIALGIGGLPKGRIVEIYGPESSGKTTLTLSVIAEAQKNGATCAFVDAEHALDPEYAGKLGVNVDDLLVSQPDTGEQALEITDMLVRSNAVDVIIVDSVAALVPKAEIEGEMGDMHVGLQARLMSQALRKITGNIKNANCLVIFINQIRMKIGVMFGSPETTTGGNALKFYASVRLDIRRTGAVKEGDEVVGSETRVKIVKNKVSPPFRQAEFQILYGKGIYRNGEIIDLGVSQGLVEKSGAWYAYQGNKIGQGKANAAKYLAENPAIGAEIEKQIRDKLLTSGAVAAAGKAAAVEADADDMADADAGY

SEQ ID NO: 100423 - DNA, 1439 bp, Pseudomonas stutzeri
  CDS (45)..(1088): transl_table=11
cggccgctctagaactagtggatcccccgggctgcaggaattcgatggacgagaacaagaagcgtgccttggccgctgccctgggccagatcgaaaagcagttcggcaaaggcgcggtcatgcgcatgggcgatcatgatcgccaggcgatcccttctatttccaccggctccctggggctggatatcgccctcggcataggcggtctgccgaaaggccggatcgtcgaaatctacggcccggaatcttcgggtaaaaccaccctgaccctctcggtcatcgccgccgcccagagaatgggctccacctgcgccttcgtcgatgccgagcatgcgctggaccccgattacgccggcaagctgggcgtcaacgtcgacgacctgctggtctcgcagcccgacacgggcgagcaggcgctggaaatcaccgacatgctggtgcgctccaatgcagtggacgtgatcatcgtcgactccgtggcagcgctggtgcccaaggcggaaatcgaaggcgagatgggcgatgcccacgtcggtctgcaggcccgcctgatgtcccaggcgctgcgcaagatcaccggcaacatcaagaacgccaactgcctggtgatcttcatcaaccagatccgcatgaagatcggcgtgatgttcggtagcccggaaaccaccaccggcggtaacgcgctgaagttctacgcttcggtccgcctggacatccgccgtactggcgcggtgaaggaaggcgacgaagtggtgggcagcgaaacccgcgtcaaggtcgtcaagaacaaggtggccccgccgttccgccaggccgagttccagatcctctacgatcaagctttctaccgcaacggcgagatcatcgatctcggcgtgcagcagggcctggtggagaaatccggtgcctggtacgcctacaagggcagcaagatcggccagggcaaggccaatgcggccaagtatctggaagagaacccggagatcggccaggagatcgaacagcagattcgcgccaagctgctggtgacttcggccaataccaaggccaccccggtagccgaagatctggcggacgccgacatctgatcccatggtcgccgtgctggataaccccactgccgtacgccgggctgcaatggacttgctggcccggcgcgagcatgggcgtatcgagttgtcccgcaaattgcgccagcgcggtgcgccggccgaattgattgagccggcgctggatcgactcgccgaggaagggttgctcagcgaggcccgttatctggaaagtttcgtcaggatgcgcgccaatgccggttatggcccgctacgcattcgtgaggaactgactcagcggggcctgtcccgtagcgacgtcgagcaggccttgcgggacagtggtttcgactggagcgaacagctgcgtgccgtctggcagcgcaagtt

SEQ ID NO: 100424 - protein, 347 aa, Pseudomonas stutzeri
MDENKKRALAAALGQIEKQFGKGAVMRMGDHDRQAIPSISTGSLGLDIALGIGGLPKGRIVEIYGPESSGKTTLTLSVIAAAQRMGSTCAFVDAEHALDPDYAGKLGVNVDDLLVSQPDTGEQALEITDMLVRSNAVDVIIVDSVAALVPKAEIEGEMGDAHVGLQARLMSQALRKITGNIKNANCLVIFINQIRMKIGVMFGSPETTTGGNALKFYASVRLDIRRTGAVKEGDEVVGSETRVKVVKNKVAPPFRQAEFQILYDQAFYRNGEIIDLGVQQGLVEKSGAWYAYKGSKIGQGKANAAKYLEENPEIGQEIEQQIRAKLLVTSANTKATPVAEDLADADI

SEQ ID NO: 100425 - DNA, 1059 bp, Pseudomonas tolaasii
  CDS (1)..(1059): transl_table=11
atggacgacaacaagaagaaagccttggctgcggccctgggtcagatcgaacgtcaattcggcaagggtgccgtaatgcgtatgggcgatcacgaccgtcaggcgatcccggctatttccacgggctctctgggtctggacatcgcgctcggcattggcggcctgccaaaaggccgtatcgttgaaatctatggtcctgaatcttccggtaaaacgaccctgaccctgtcggtgattgcccaggcacaaaaaatgggcgccacttgcgcgttcgtcgatgccgagcacgccctggacccagagtacgccggcaagctgggcgtcaacgttgacgacctgctggtttcccagccggacaccggtgagcaagccctggaaatcaccgacatgctggtgcgctccaacgccatcgacgtgatcgtggtcgactccgtggcagccctggtaccgaaggctgaaatcgaaggcgaaatgggtgacatgcacgttggcctgcaagcccgtctgatgtcccaggcgctgcgtaaaatcaccggtaacatcaagaatgccaactgcctggtgatcttcatcaaccagatccgcatgaagatcggcgtgatgttcggcagcccggaaaccaccacgggtggtaacgcgttgaagttctacgcttcggtccgtctggatatccgccgtactggcgcggtgaaggaaggtgacgaggtggtgggcagcgaaacccgcgttaaagtcgtgaagaacaaggtggccccgccattccgtcaggccgaattccagattctctacggcaagggtatctacctgaacggtgagatgatcgacctgggcgtgctgcacggttttgtcgagaaatccggtgcctggtatgcctacaacggcagcaagatcggtcagggcaaggccaactcggccaagttcctggcggacaacccggacatcgcagccacgcttgagaagcagattcgcgacaagctgctgactgcagcgccagacgtgaaagcggccgccaaccgtgagccggttgacgagatggaagaagtcgacactgacatctga

SEQ ID NO: 100426 - protein, 352 aa, Pseudomonas tolaasii
MDDNKKKALAAALGQIERQFGKGAVMRMGDHDRQAIPAISTGSLGLDIALGIGGLPKGRIVEIYGPESSGKTTLTLSVIAQAQKMGATCAFVDAEHALDPEYAGKLGVNVDDLLVSQPDTGEQALEITDMLVRSNAIDVIVVDSVAALVPKAEIEGEMGDMHVGLQARLMSQALRKITGNIKNANCLVIFINQIRMKIGVMFGSPETTTGGNALKFYASVRLDIRRTGAVKEGDEVVGSETRVKVVKNKVAPPFRQAEFQILYGKGIYLNGEMIDLGVLHGFVEKSGAWYAYNGSKIGQGKANSAKFLADNPDIAATLEKQIRDKLLTAAPDVKAAANREPVDEMEEVDTDI

SEQ ID NO: 100427 - DNA, 1065 bp, Pseudomonas syringae pv
  CDS (1)..(1065): transl_table=11
atggacgacaacaagaagaaagccttggctgcggccttgggtcagatcgagcgtcagttcggtaaaggcgccgtgatgcgcatgggcgatcacgatcgccaggcgatccctgccatctccaccggttcgctgggtctggatatcgctctcggtattggcggactgccaaaaggccggatcgtggaaatctacggtcctgagtcttccggtaaaaccacactgacgctgtcggtcatcgcccaggcccagaaaatgggcgctacctgtgcctttgtcgacgccgaacacgcgctggatccggagtacgcaggcaaactgggcgtcaatgtcgacgacctgctggtttcgcagccggacactggtgagcaggcgctggaaatcaccgacatgctggtgcgctccaatgccatcgacgtgatcgtggtcgactccgttgctgcgctggtgccgaaggcagagatcgaaggcgaaatgggtgacatgcacgtgggtctgcaggcgcgtctgatgtcgcaggcgctgcgcaagatcaccggcaacatcaagaacgccaactgcctggtgatcttcatcaaccagatccgcatgaagatcggcgtgatgttcggcagcccggaaaccaccaccggtggtaacgcgctgaagttttacgcttcggtacgcctggacatccgtcgtacgggcgcggtcaaggaaggcgatgaggttgtcggcagcgaaacccgcgtcaaggttgtgaagaacaaggtggctccgccgttccgtcaggccgagttccagattctttacggcaagggtatctacctgaacggtgaaatcgtcgatctggccgttctgcatggttttgtcgagaagtccggtgcctggtacagctaccagggcagcaagattggtcagggcaaggccaactcggccaagttcctggcagataacccggaaatctgcaaagcgctcgagaagcagatccgcgacaaattgctgacccctggcgtcgacaccaaggctgtcggctcccgtgaagcagtggctgccgatgatatgtctgaagcagatgtcgatatctga

SEQ ID NO: 100428 - protein, 354 aa, Pseudomonas syringae pv
MDDNKKKALAAALGQIERQFGKGAVMRMGDHDRQAIPAISTGSLGLDIALGIGGLPKGRIVEIYGPESSGKTTLTLSVIAQAQKMGATCAFVDAEHALDPEYAGKLGVNVDDLLVSQPDTGEQALEITDMLVRSNAIDVIVVDSVAALVPKAEIEGEMGDMHVGLQARLMSQALRKITGNIKNANCLVIFINQIRMKIGVMFGSPETTTGGNALKFYASVRLDIRRTGAVKEGDEVVGSETRVKVVKNKVAPPFRQAEFQILYGKGIYLNGEIVDLAVLHGFVEKSGAWYSYQGSKIGQGKANSAKFLADNPEICKALEKQIRDKLLTPGVDTKAVGSREAVAADDMSEADVDI

SEQ ID NO: 100429 - DNA, 1062 bp, Ralstonia eutropha
  CDS (1)..(1062): transl_table=11
atggacgacaagaaggccggcgccggcgtgagcgctgagaagcagaaggcgcttgccgccgcgctctcccagattgagaagcagtttggcaagggctcgatcatgcgcctgggcgatggcgaaatcgaacaggacatccaggtagtgtccaccggctcgctggggctggacatcgcgctgggcgtgggtggcctgccgcgcggccgcgtggtcgagatctacggtccggaatcgtccggcaagaccacgctgacgttgcaggtggtggccgaaatgcagaagctgggcggcacctgcgcgttcatcgacgccgagcacgccctggatgtccaatatgctggcaagctcggcgtggacgtcggcaatctgctgatctcccagcccgataccggcgagcaggccctggaaatcaccgacgcgctggtgcgctcgggttcgatcgacctgatcgtgatcgactcggtggccgctctggtgccaaaggcagaaatcgagggcgaaatgggcgattcgctgcccggcctgcaggcccgcctgatgagccaggggctgcgcaagctgaccggcacgatcaagcgcacgaactgcctggtgatcttcatcaaccagatccgtatgaagatcggtgtgatgtttggttctcccgaaaccaccaccggcggtaacgcgctgaagttctacgcctcggtgcgcctggacatccgccgtatcggctcgatcaagaagggcgacgaagtcgtcggcaacgagaccaaggtcaaggtggtcaagaacaaggtgtcacctccgttccgcgaggcgttcttcgacatcctctatggccagggcatctcgcgccagggtgaaatcatcgacctgggcgtggacgccaagatcgttgagaaggccggcgcctggtacagctacaacggcgagaagatcggccagggcaaggacaacgcacgcgagtatctgcgcgagaacccggacatcgccgacgagatcgagaacaaggtgcgtctggcgctgggcgtggcgccgctgaacaccgtggcgggcgcgccagcagaggtcgaaggctga

SEQ ID NO: 100430 - protein, 353 aa, Ralstonia eutropha
MDDKKAGAGVSAEKQKALAAALSQIEKQFGKGSIMRLGDGEIEQDIQVVSTGSLGLDIALGVGGLPRGRVVEIYGPESSGKTTLTLQVVAEMQKLGGTCAFIDAEHALDVQYAGKLGVDVGNLLISQPDTGEQALEITDALVRSGSIDLIVIDSVAALVPKAEIEGEMGDSLPGLQARLMSQGLRKLTGTIKRTNCLVIFINQIRMKIGVMFGSPETTTGGNALKFYASVRLDIRRIGSIKKGDEVVGNETKVKVVKNKVSPPFREAFFDILYGQGISRQGEIIDLGVDAKIVEKAGAWYSYNGEKIGQGKDNAREYLRENPDIADEIENKVRLALGVAPLNTVAGAPAEVEG

SEQ ID NO: 100431 - DNA, 1059 bp, Ralstonia solanacearum
  CDS (1)..(1059): transl_table=11
atggaagacggcaagaaggcagcctcgatgagcgcagaaaagcagaaggcgctggctgccgcgctcgcgcagatcgaaaagcagttcggcaagggctcgatcatgaagatgggcgacgccgaggtggagccggtccaggttgtgtccaccggctcgctgggtctggacgtcgcgctgggcgtcggcggcctgccgcgcggtcgcgtggtcgagatctacggccccgaatcgtccggcaagaccacgctgacgctgcaggtggtcgccgagatgcagaagctgggcggcacctgcgccttcatcgacgccgagcatgcgctggacgtcacctatgccgacaagctcggcgtgaaggtgccggacctgctgatctcccaaccggacaccggtgagcaggcgctggaaatcgctgacgcgctggtgcgctcgggctcggtcgacctgatcgtcatcgactcggtggccgcgctggtgcccaaggccgaaatcgaaggcgagatgggcgacgcgctgcccggtctgcaggcccgcctgatgagccaggcgctgcgcaagctgaccggcaccatcaagcgcaccaactgcctggtgatcttcatcaaccagatccgcatgaagatcggcgtgatgttcggctcgccggaaaccaccacgggcggcaatgcgctcaagttttacgcttcggtgcgtctggacatccgccgcatcggctcgatcaagaagggcgatgaggtggtcggcaacgagaccaaggtcaaggtcgtcaagaacaaggtggcgccgccgttccgcgaggcgatcttcgacatcctctacggtgcgggcgtgtcgcgcgaaggcgagatcatcgatctgggcgtggaagccaaggtggtcgagaaatccggcgcctggtacagctacaacggcgagcgcatcggtcagggccgtgacaactgccgcgaattcctgcgcgaaaacgccgaactggcccgcgagatcgaaaacaaggtccgcgaacacctgggcgtgacgccgatgggcgccgtcacgctggccgaggaagtcgaggaagattga

SEQ ID NO: 100432 - protein, 352 aa, Ralstonia solanacearum
MEDGKKAASMSAEKQKALAAALAQIEKQFGKGSIMKMGDAEVEPVQVVSTGSLGLDVALGVGGLPRGRVVEIYGPESSGKTTLTLQVVAEMQKLGGTCAFIDAEHALDVTYADKLGVKVPDLLISQPDTGEQALEIADALVRSGSVDLIVIDSVAALVPKAEIEGEMGDALPGLQARLMSQALRKLTGTIKRTNCLVIFINQIRMKIGVMFGSPETTTGGNALKFYASVRLDIRRIGSIKKGDEVVGNETKVKVVKNKVAPPFREAIFDILYGAGVSREGEIIDLGVEAKVVEKSGAWYSYNGERIGQGRDNCREFLRENAELAREIENKVREHLGVTPMGAVTLAEEVEED

SEQ ID NO: 100433 - DNA, 1098 bp, Rhizobium loti
  CDS (1)..(1098): transl_table=11
atggctcagaattctttgcggcttgtagaggataaggcagtggacaaatcaaaggctctggatgcggcgctgtcgcaaatcgagcgggctttcggcaagggctcgatcatgcggctcggcgcgaacgagcaggtcgtcgagatcgaaaccgtgccgaccggctcgctcggcctcgacatcgcgctcggcgtcggtggcctgccgcgcggccgcatcatcgagatctacggaccggaaagctcgggcaagacgacgctggccctccacacggtggccgaagcccagaagaagggcggcatctgcgccttcgtcgacgccgaacacgcgctcgatccggtctatgcccgcaagctcggcgtcgaccttgaaaacctgctgatctcgcagcccgataccggcgagcaggcgctggagatctgcgacacgctggtgcgttccggcgccatcgacgtgctggtggtcgattcggtcgcggcactgacgccgcgcgccgaaatcgagggcgagatgggcgattcgctgcccggcctgcaggctcgactgatgagccaggcgctgcgcaagctgaccgcctcgatctcgcgctccaacaccatggtcatcttcatcaaccagatccgcatgaagatcggcgtcatgttcggttcgcccgagaccacgaccggcggcaatgcgctgaaattctatgcgtcggtgcgcctcgatatccgccgcatcggctcggtcaaggaccgcgacgaggtcgttggcaaccagacccgcgtcaaggtggtcaagaacaagctggcgccgcccttcaaggtggtcgagttcgacatcatgtatggcgagggcgtgtccaagaccggcgaactggtcgacctcggcgtcaaggccggcgtggttgagaaatcgggcgcctggttctcctacaattcgcaacgtctcggccaggggcgcgaaaatgcaaagctgttcctgcgcgacaatcccgataccgcacgcgagatcgaactggcgctcaggcagaatgccgggctgatcgccgaaaaattcctcgagaatggcggctctgaaggcggcgacgacggttttgaggacgaagccggcgcaatgtag

SEQ ID NO: 100434 - protein, 365 aa, Rhizobium loti
MAQNSLRLVEDKAVDKSKALDAALSQIERAFGKGSIMRLGANEQVVEIETVPTGSLGLDIALGVGGLPRGRIIEIYGPESSGKTTLALHTVAEAQKKGGICAFVDAEHALDPVYARKLGVDLENLLISQPDTGEQALEICDTLVRSGAIDVLVVDSVAALTPRAEIEGEMGDSLPGLQARLMSQALRKLTASISRSNTMVIFINQIRMKIGVMFGSPETTTGGNALKFYASVRLDIRRIGSVKDRDEVVGNQTRVKVVKNKLAPPFKVVEFDIMYGEGVSKTGELVDLGVKAGVVEKSGAWFSYNSQRLGQGRENAKLFLRDNPDTAREIELALRQNAGLIAEKFLENGGSEGGDDGFEDEAGAM

SEQ ID NO: 100435 - DNA, 1056 bp, Rhizobium leguminosarum bv
  CDS (1)..(1056): transl_table=11
gtggacaaaagcaaggcgcttgaagcggcactctcacagatagagcggtcgttcggcaagggctcgatcatgaaactcggctccaacgagaatgttgtcgagatcgagacgatctcgaccggctcgcttggtctcgatattgcactcggcgttggtggcctgccgaggggccgcatcatcgaaatctacgggccggaaagctccggtaagacgacgcttgcactgcagacgattgccgaagcgcagaagaagggcggcatctgcgccttcgtcgatgccgaacatgcgctcgatcccgtctatgcccgcaagcttggcgtcgacctgcagaaccttctgatctcgcagcccgataccggcgagcaggcgcttgaaatcaccgatacgctggtgcgctccggccgcgtcgacgttctcgtcgtcgactcggttgcggcattgacgccgcgcgccgaaatcgaaggcgaaatgggcgacaccgttcccggcctgcaggcacgattgatgagccaggcgctgcgcaagctcaccgcttcgatctcgaagtcgaacactatggtgatcttcatcaaccagatccgcatgaagatcggcgtcatgttcggctcgccggaaacgacgacaggcggcaatgcgctgaaattctatgcttccgtgcgccttgacatccgccgcatcggcgctgtcaaggagcgcgaagaggtgatcggcaaccagacccgcgtcaaggtcgtcaagaacaagatggcgccacccttcaagcaggtcgagttcgacatcatgtatggcgagggtgtttccaagaccggcgaactggtcgatctcggcgtcaaggccggcatcgtcgaaaagtcgggcgcctggttctcctataacagccagcgtctcggccagggccgtgaaaacgccaagactttcctgcgcgacaatccggacctcgcccgcgagatcgaactgtcgctgcgccagaatgccggcctgatcgccgaccgtttcctgcagaacggtggaccggaccccgatgacggcgatggcgatgccactgcggaaatgtaa

SEQ ID NO: 100436 - protein, 351 aa, Rhizobium leguminosarum bv
MDKSKALEAALSQIERSFGKGSIMKLGSNENVVEIETISTGSLGLDIALGVGGLPRGRIIEIYGPESSGKTTLALQTIAEAQKKGGICAFVDAEHALDPVYARKLGVDLQNLLISQPDTGEQALEITDTLVRSGRVDVLVVDSVAALTPRAEIEGEMGDTVPGLQARLMSQALRKLTASISKSNTMVIFINQIRMKIGVMFGSPETTTGGNALKFYASVRLDIRRIGAVKEREEVIGNQTRVKVVKNKMAPPFKQVEFDIMYGEGVSKTGELVDLGVKAGIVEKSGAWFSYNSQRLGQGRENAKTFLRDNPDLAREIELSLRQNAGLIADRFLQNGGPDPDDGDGDATAEM

SEQ ID NO: 100437 - DNA, 1047 bp, Rhizobium meliloti
  CDS (1)..(1047): transl_table=11
gtggacaaaagcaaggcacttgaagcggctctttcccagatcgaacgttcgttcggcaagggatcgatcatgaagctcggagcgaaggacagcgtagttgagatcgaaaccgtctccaccggttcgctcggcctcgatatcgcgctcggcatcggcggcctgccgaagggccgtatcatcgagatctatggtccggaaagctcgggcaagacgacgctggcgctgcagaccattgccgaggcacagaagaagggcggcatctgcggcttcgtcgatgccgagcatgcactcgatccggtctatgcacgaaagctcggggtcgatctcgaaaatctcctgatttcgcagcctgatacgggcgagcaggcgctggaaatcaccgatacgctggtccgttcgggtgcgatcgacattctcgtcatcgattcggtggccgcactcgtgccgcgcgccgaaatcgagggcgagatgggcgacagtctgccgggcatgcaggcgcgcctcatgagccaggcgctgcgcaagcttacggcatcgatctccaagtcgaactgcatggtgatcttcatcaaccagatccgcatgaagatcggcgtgatgttcggctcgccggaaacgacgacgggcggcaatgcgctcaagttctacgcttcggtgcgcctcgacattcgccgcatcggttcggtcaaggagcgcgaggaagtggtcggcaaccagacccgcgtcaaggtcgtcaagaacaagatggcaccgcccttcaagcaggtcgagttcgacatcatgtatggcgaaggcgtttcgaagacgggcgaattgatcgatctcggcgtcaaggcgggcatcgtcgagaaatcgggcgcctggttctcctataacagccagcggctcggccagggacgggaaaacgccaagctcttcctgcgggagaatcccgaactgttgcgcgaaatcgaaacggctctgcggcagaatgcgggtctcatcgccgaccggttcctggagaatggcgggccggaaagcgacggcgacgaagccgccgatatgtaa

SEQ ID NO: 100438 - protein, 348 aa, Rhizobium meliloti
MDKSKALEAALSQIERSFGKGSIMKLGAKDSVVEIETVSTGSLGLDIALGIGGLPKGRIIEIYGPESSGKTTLALQTIAEAQKKGGICGFVDAEHALDPVYARKLGVDLENLLISQPDTGEQALEITDTLVRSGAIDILVIDSVAALVPRAEIEGEMGDSLPGMQARLMSQALRKLTASISKSNCMVIFINQIRMKIGVMFGSPETTTGGNALKFYASVRLDIRRIGSVKEREEVVGNQTRVKVVKNKMAPPFKQVEFDIMYGEGVSKTGELIDLGVKAGIVEKSGAWFSYNSQRLGQGRENAKLFLRENPELLREIETALRQNAGLIADRFLENGGPESDGDEAADM

SEQ ID NO: 100439 - DNA, 1068 bp, Rhodobacter capsulatus
  CDS (1)..(1068): transl_table=11
atggcaacgacgggcttgttcgagatgaacgacaaaggcaaggcagacaagcaaaaggcgctggaatgcgcccttgcgcagatcgaacggcagttcggcaagggctcgatcatgaagcttggcggcgacaccccgccgccggagatcgaggccacctcgaccggctcgcttggcctggacattgcgcttggcatcggcggtctgccgaaggggcggatcgtcgagatctacgggccggaaagctcggggaagaccacgctgacgctgcattgcattgcggaagaacagaaaaagggcggagtctgcgcctttgtcgacgccgaacatgcgcttgacccctattatgcgaagaagctaggcgtcagtctggaagatctgctgatctcgcagcccgacaccggggaacaggcgctggaaatcgtcgacacgctggtgcgctcgggcgcggtgagcctggtcgtcgtcgactcggtggcggcgctgacgccgaaggccgagatcgagggcgacatgggcgatgcgaccgtgggcgcgcaggcccggctgatgagccaggcgatgcggaaactgaccgcctcgatcggtcggtcgaactgcatggtgatcttcatcaaccagatccggatgaagatcggcgtgatgttcggctcgcccgagacgacctcgggcggcaatgcgctgaaattctacgcttcggtgcgtctggacatccgccgcaccggcgcgatcaaggaccgcgacgaggtgatcggcaaccagacccgggtcaaggtggtgaagaacaaggtggcgccgcccttccgcgaggtcgaattcgacatcctttacggcgagggcatttccaaggtcggcgagctggtcgatctgggcgtcaaggcgggcgtggtggcgaaatcgggcgcctggtattcctatggcgacgagcgcatcggccagggccgcgagaatgccaagcaattcctgcgcgacaatcccgacatcgcctatgagatcgaggacaagatccgggccagccacgggctggaattcggtgtcgatccgaccgcggaagatctgaccgaagagtaa

SEQ ID NO: 100440 - protein, 355 aa, Rhodobacter capsulatus
MATTGLFEMNDKGKADKQKALECALAQIERQFGKGSIMKLGGDTPPPEIEATSTGSLGLDIALGIGGLPKGRIVEIYGPESSGKTTLTLHCIAEEQKKGGVCAFVDAEHALDPYYAKKLGVSLEDLLISQPDTGEQALEIVDTLVRSGAVSLVVVDSVAALTPKAEIEGDMGDATVGAQARLMSQAMRKLTASIGRSNCMVIFINQIRMKIGVMFGSPETTSGGNALKFYASVRLDIRRTGAIKDRDEVIGNQTRVKVVKNKVAPPFREVEFDILYGEGISKVGELVDLGVKAGVVAKSGAWYSYGDERIGQGRENAKQFLRDNPDIAYEIEDKIRASHGLEFGVDPTAEDLTEE

SEQ ID NO: 100441 - DNA, 1092 bp, Rhodopseudomonas palustris
  CDS (43)..(1092): transl_table=11
atggctgcccccaccgcattgcgtatcgtcgaaggttcctcaatggacaaatccaaggcgctctccgccgcgctgtctcagatcgagcgtcagttcggcaagggctcggtgatgaggctcggcaagaacgaccgctcgatggacatcgagacgatctcctccggctcgctcgggctcgacatcgcgctcggcgtcggcggtctgccgaaggggcggatcgttgagatctacgggccggaatcctccggcaagaccacgctggcgctgcactgcgtcgcggaagcccagaagaagggcggcatttgtgccttcgtcgacgccgaacacgcgctcgatccggtctatgcccgcaagctcggcgtcaatgtcgacgacctgctgatctcgcagcccgatcacggcgagcaggcgcttgagatcgccgacacgctggtgcgctccggcgcgatcgacgtgctgatcgtcgactcggtggcggcgctggtgccgcgcgccgaactcgaaggcgaaatgggtgacgcgctgcccggcctgcaggcgcggttgatgagccaggcgctgcgcaagctcaccgcctcgatcaacaagtccaataccatggtgatcttcatcaaccagatccggatgaagatcggcgtgatgtacggctcgccggaaaccaccaccggcggcaacgcgctgaaattctacgcctcggtccggctcgacatccgccgcatcggccagatcaaggaacgcgacgaggtggtcggcaaccagacccgcgtcaaggtggtgaagaacaagctggcgccgccgttcaagcaggtcgaattcgacatcatgtacggcgaaggcgtctccaagatgggcgagatcctcgatctcggcgtcaaggccggcatcgtcgaaaagtcgggcgcctggttctcgcatgacagccagcggctcggccagggacgcgagaacgccaaggcgttcctcaaggccaaccccgacatgaccgccaagatcgaggcggcgatccgccagaattccggactgatcgccgaacagattctcgcaggctcgcccgagagcgatgccgacggcgaggagccgatggaagagtaa

SEQ ID NO: 100442 - protein, 349 aa, Rhodopseudomonas palustris
MDKSKALSAALSQIERQFGKGSVMRLGKNDRSMDIETISSGSLGLDIALGVGGLPKGRIVEIYGPESSGKTTLALHCVAEAQKKGGICAFVDAEHALDPVYARKLGVNVDDLLISQPDHGEQALEIADTLVRSGAIDVLIVDSVAALVPRAELEGEMGDALPGLQARLMSQALRKLTASINKSNTMVIFINQIRMKIGVMYGSPETTTGGNALKFYASVRLDIRRIGQIKERDEVVGNQTRVKVVKNKLAPPFKQVEFDIMYGEGVSKMGEILDLGVKAGIVEKSGAWFSHDSQRLGQGRENAKAFLKANPDMTAKIEAAIRQNSGLIAEQILAGSPESDADGEEPMEE

SEQ ID NO: 100443 - DNA, 1047 bp, Rhodopseudomonas viridis
  CDS (1)..(1047): transl_table=11
atggacaaaaccaaggcgctcgacgccgcgctcactcagatcgagcgggcattcggcaagggctcgatcatgcggctcggcaaatccggcgcggcgctggaggtcgagacgatttcgaccggctcgctcgggctcgacatcgcgctcggcatcggcgggctgccgcgcggccgagtggtcgagattttcggcccggaatcgtcgggcaagaccacgctggcgctgcacaccgtcgccgaggcgcagaagaagggcggggtttgtgccttcatcgacgccgagcacgccctcgacccgctctatgcccgcaagcttggggtcaatctcgacgacctgttgatctcgcagccggatgctggtgagcaggcgctggagatcgccgacacgctggttcgctcgggcgccatcgacgtgctggtggtcgactcggtcgccgccctggtgccgcgcgccgagctggaaggcgaaatgggcgacagtcagccgggcatgcaggcgcggttgatgagccaggcgcttcgcaagctcactgcctcgatctcgcgctccaactgcatggtgatcttcatcaaccagatccgcatgaagatcggcgtgatgtacggctcgccggagaccaccaccgggggtaacgccctgaaattctacgcctcggtccgcctcgacatccgccgcatcggtgcaatcaaggaacgcgacgaggttgtgggcaaccagacccgggtgaaagtggtcaagaacaagctcgccccgccgttcaagcaggtcgagttcgacatcatgtacggcgagggcatctccaaggccggtgagttgatcgacctcggtgtcaaagccggcgtggttgataagtcgggctcatggttctcccacgatagccagcgcatcggtcagggccgcgagaacgtcaagggcttcctcaagggccaccccgacgtcgccggccgcatcgaggcggcgattcgccagaatgccggcttgatcgccgagcggattctcggttcctcggaggacagcgaggacggcgaggacgctgccgaggcgtga

SEQ ID NO: 100444 - protein, 348 aa, Rhodopseudomonas viridis
MDKTKALDAALTQIERAFGKGSIMRLGKSGAALEVETISTGSLGLDIALGIGGLPRGRVVEIFGPESSGKTTLALHTVAEAQKKGGVCAFIDAEHALDPLYARKLGVNLDDLLISQPDAGEQALEIADTLVRSGAIDVLVVDSVAALVPRAELEGEMGDSQPGMQARLMSQALRKLTASISRSNCMVIFINQIRMKIGVMYGSPETTTGGNALKFYASVRLDIRRIGAIKERDEVVGNQTRVKVVKNKLAPPFKQVEFDIMYGEGISKAGELIDLGVKAGVVDKSGSWFSHDSQRIGQGRENVKGFLKGHPDVAGRIEAAIRQNAGLIAERILGSSEDSEDGEDAAEA

SEQ ID NO: 100445 - DNA, 1089 bp, Rickettsia conorii
  CDS (58)..(1089): transl_table=11
ttgatttttctttctcaagcttatattttaattggtaagtttataatatggaaatttatgtcaaatacagataaggaaagagccattgccgcagcactcgcacaaattgaaaaaagctacggtaaaggttcggtaatgaaactagggcagcgtccgcatgttgatatagaggccgtatcaaccggctcacttgggctagatatagctcttggaatcggcggtgttcccaaaggtagaatcatcgaaatttttggtcctgaaagctcaggtaaaaccactctaacattgcatttaattgcagaagctcaaaaaaagggtggtacatgtgcttttattgatgccgagcatgcattagaccctgcttatgctaaaaaattaggcgtaaatattgatgagcttattatttcacagcccgatacaggtgaacaagccctagaaattgccgatacgttaattcgctccagcggtattgatatgataataatagatagtgttgcggctttagtaccgaaatcagagattgagggcgaaatgggtgatgctcaaatggcttctcaagcaaggttaatgagccaggctttgcgtaaacttactgcatcaattaatcgcaccaattgtattactgttttcatcaatcaaatcagaatgaaaataggtgtgatgttcggtagtcctgaaactacgacaggcggtaatgccttaaaattctatgcttctgttaggatcgatataagaagaatcggctccattaaagataaagaagaagtaataggcagccaaaccaaagtaaaagtagtcaaaaacaaagtatctcctccatttaaaactgcagattttgatataatgtacggttcaggtatttcaaaagaaggcgagataatcgaccttggagttaagcttgatattgttgagaaatccggctcttggttttcctacaagaacgtacgcataggtcaagggcgtgaaaacgtcaaacaatatttaaaagaacatccacaaatttccaacgaaattgagaaaataatacgtgaaaaatcgtcaaaaattactaatataaatcttgatcaaacggaggaagaaaatgattga

SEQ ID NO: 100446 - protein, 343 aa, Rickettsia conorii
MSNTDKERAIAAALAQIEKSYGKGSVMKLGQRPHVDIEAVSTGSLGLDIALGIGGVPKGRIIEIFGPESSGKTTLTLHLIAEAQKKGGTCAFIDAEHALDPAYAKKLGVNIDELIISQPDTGEQALEIADTLIRSSGIDMIIIDSVAALVPKSEIEGEMGDAQMASQARLMSQALRKLTASINRTNCITVFINQIRMKIGVMFGSPETTTGGNALKFYASVRIDIRRIGSIKDKEEVIGSQTKVKVVKNKVSPPFKTADFDIMYGSGISKEGEIIDLGVKLDIVEKSGSWFSYKNVRIGQGRENVKQYLKEHPQISNEIEKIIREKSSKITNINLDQTEEEND

SEQ ID NO: 100447 - DNA, 1032 bp, Rickettsia felis
  CDS (1)..(1032): transl_table=11
atgtcaaatacagataaggaaagagccattgccgcagcactcgcacaaatcgaaaaaagctacggtaaaggttcggtaatgaaactagggcagcgtccgaacattgatatagaagccgtatcaaccggttcacttgggcttgatatagctcttggaatcggcggtgttcctaaaggtagaatcattgaaatttttggtcctgaaagctcaggtaaaaccactttaacgctacatttaattgccgaagcacagaaaaagggcggtacatgtgcctttattgatgccgagcatgcccttgaccctgcttatgctaaaaaattaggcgtaaatattgatgagcttattatttcacaaccagatacaggtgaacaagctctagaaattgccgatacgttaattcgttccggcggtattgatatgataataatagatagtgttgcggctttagtaccgaaatcagagattgagggcgagatgggtgatgcccaaatggcttctcaagcaagattaatgagccaggctttacgtaaacttaccgcatcaattaatcgtaccaattgtattactgttttcatcaaccaaatcagaatgaaaataggcgtaatgttcggtaatcccgaaactacgacaggcggtaatgctttgaaattctatgcttctgttaggatcgatataagaagaataggctccattaaagataaagaagaagtaataggcagccaaactaaagtaaaagtagtcaagaacaaagtatctcctccgtttaaaactgcagattttgatataatgtacggttcaggtatttcaaaagaaggcgagataatcgaccttggagttaagcttgatattgttgagaaatccggctcttggttttcctataataacgtacgaatcggtcaagggcgtgaaaacgtcaaacaatatttaaaagaacatccacaaatttccaatgaaattgagaaaatcatacgcgaaaaatcgtcaaaaattactaatataaatcttgatcaaacggaggaagaaaatgattga

SEQ ID NO: 100448 - protein, 343 aa, Rickettsia felis
MSNTDKERAIAAALAQIEKSYGKGSVMKLGQRPNIDIEAVSTGSLGLDIALGIGGVPKGRIIEIFGPESSGKTTLTLHLIAEAQKKGGTCAFIDAEHALDPAYAKKLGVNIDELIISQPDTGEQALEIADTLIRSGGIDMIIIDSVAALVPKSEIEGEMGDAQMASQARLMSQALRKLTASINRTNCITVFINQIRMKIGVMFGNPETTTGGNALKFYASVRIDIRRIGSIKDKEEVIGSQTKVKVVKNKVSPPFKTADFDIMYGSGISKEGEIIDLGVKLDIVEKSGSWFSYNNVRIGQGRENVKQYLKEHPQISNEIEKIIREKSSKITNINLDQTEEEND

SEQ ID NO: 100449 - DNA, 1023 bp, Rickettsia typhi
  CDS (1)..(1023): transl_table=11
atgtcaaatacagacaaggaacgagccattgctgcagcactcgcacaaatagaaaaaagctacggtaaaggttccgtaatgaaactagggcaacgtccaaatattgatatagaagcaatatcaacaggctcacttggactagatatagcacttggaataggaggtgtccctaaaggcagaataattgagatttttggacctgaaagctcaggtaaaactactttgacactacatttaattgcggaatctcaaaaaaatggtggtacatgtgcgtttattgatgcagagcatgccttagacccagcttatgcaaagaaattaggcgtaaatattgatgagcttatcatttcacaaccagatacaggtgaacaagcgctagaaattgctgatacgttaattcgctcaggtggtattgatatgataataatagatagtgttgctgctttagtaccaaaatcagaaattgaaggtgaaatgggtgatgcccaaatggcttctcaagcaagattaatgagccaggcactccgtaaacttactgcatcaattaatcgtacaaattgtattactgtttttatcaaccaaatcagaatgaaaataggtgttatgttcggtagtcctgaaactacaacaggcggtaatgctttaaaattctatgcttctgttagaattgatataagaagaattggctccattaaagataaagaagaagtaataggtagccaaactaaagtaaaagtagtcaaaaacaaagtatctccaccatttaaaactgcagattttgatataatgtatggttcaggtatttccaaagaaggtgagataattgatcttggtgttaagcttgagattattgagaaatcaggctcgtggtttgcttacaataaagtacgcataggtcaaggacgtgaaaacgtcaaacaatatttaaaagaacatccacaaattgccaacgaaattgagaaaataatacgagaaaaatcgtcagcaattactaatataaatcttgatcaaacggaggaataa

SEQ ID NO: 100450 - protein, 340 aa, Rickettsia typhi
MSNTDKERAIAAALAQIEKSYGKGSVMKLGQRPNIDIEAISTGSLGLDIALGIGGVPKGRIIEIFGPESSGKTTLTLHLIAESQKNGGTCAFIDAEHALDPAYAKKLGVNIDELIISQPDTGEQALEIADTLIRSGGIDMIIIDSVAALVPKSEIEGEMGDAQMASQARLMSQALRKLTASINRTNCITVFINQIRMKIGVMFGSPETTTGGNALKFYASVRIDIRRIGSIKDKEEVIGSQTKVKVVKNKVSPPFKTADFDIMYGSGISKEGEIIDLGVKLEIIEKSGSWFAYNKVRIGQGRENVKQYLKEHPQIANEIEKIIREKSSAITNINLDQTEE

SEQ ID NO: 100451 - DNA, 1062 bp, Salmonella paratyphi
  CDS (1)..(1062): transl_table=11
atggctatcgacgaaaacaaacagaaagcgttggcggcagcaatgggccaaattgaaaagcaatttggtaaaggctccatcatgcgtctgggtgaagaccgttctatggatgtggaaactatctccaccggttcgctttcactggacatcgcactcggtgcgggcggtctgccgatggggcgtatcgtcgaaatttacgggccggaatcttccggtaaaacgaccctgacgctgcaggtgattgccgctgcgcagcgtgaaggtaaaacctgtgcgtttatcgatgcggaacacgcgcttgaccctgtttacgcacgcaagctgggcgtcgatatcgataacctgctttgttctcagccggataccggcgagcaggcgctggaaatctgtgacgcgctggcgcgttcaggcgcggtggacgtcattgtggtcgactccgtagcggcgctaacgccgaaagcggaaatcgaaggcgaaattggcgactctcacatgggcctcgcggcgcgtatgatgagccaggcgatgcgtaagctggcggggaacctaaaacagtccaacacgctgttgattttcatcaaccagatccgtatgaagattggcgtgatgttcggtaacccggaaaccaccaccggcggtaacgcgctgaaattctacgcctctgttcgtcttgatatccgtcgtattggcgcggtgaaagagggcgataatgtcgtgggtagcgaaacacgtgtgaaagtggtgaaaaacaaaatcgccgcgccgtttaagcaggccgagttccagatcctctacggcgaaggcatcaacttctatggcgaactggttgacctgggcgtgaaagagaagctgatcgagaaagcgggcgcatggtacagctacaacggcgagaagattggccagggtaaagcgaacgcgactacctggctgaaagagaacccggcgacagcgaaagagatcgagaaaagggttcgtgaattactgttgagtaatcagaatgccacgcccgatttcgccgttgacgatagcgaaggcgttgcagaaaccaacgaagatttttaa

SEQ ID NO: 100452 - protein, 353 aa, Salmonella paratyphi
MAIDENKQKALAAAMGQIEKQFGKGSIMRLGEDRSMDVETISTGSLSLDIALGAGGLPMGRIVEIYGPESSGKTTLTLQVIAAAQREGKTCAFIDAEHALDPVYARKLGVDIDNLLCSQPDTGEQALEICDALARSGAVDVIVVDSVAALTPKAEIEGEIGDSHMGLAARMMSQAMRKLAGNLKQSNTLLIFINQIRMKIGVMFGNPETTTGGNALKFYASVRLDIRRIGAVKEGDNVVGSETRVKVVKNKIAAPFKQAEFQILYGEGINFYGELVDLGVKEKLIEKAGAWYSYNGEKIGQGKANATTWLKENPATAKEIEKRVRELLLSNQNATPDFAVDDSEGVAETNEDF

SEQ ID NO: 100453 - DNA, 1734 bp, Serratia marcescens
  CDS (621)..(1685): transl_table=11
gaattcgcgagggaggggttatgagtgaaaaccaactgcgccggctcagcgtgctggcgggggaaaaactgaaggctcagggccgctggatcacctgcgcggaatcctgcaccggcggcggcatcgccaaggccattaccgatattgccggcagctccgcctatttcgatcgcggtttcgtcacctacagtaatgcggcgaaacatgatctgctgggggtgagcgaagcgacgttgatggcgcacggcgcggtcagcgaagaggtggtgcgcgagatggcgataggggcgctgcgggcggcgcaggccgatctggcgctgtcggtgagcggcatcgccggcccggacggcggcagcgtggaaaagccggtcggcaccgtgtggttcggctttgccagcagcgatggccgggggctttcgcgcaagatgcaattcgagggcgaccgcgatgcggtgcggctgcaggcgacgattttcgcgctgcaaaccgccatcgacgaatttttgtaaattaggcttgatactgtatgaccatacagtataattagtgacatttcctgcacaacatacattcagtggcagtgtggggtaacaccggcattgcgaaacgaaggagcaaaaatggctattgatgagaacaagcaaaaggcgttagctgcggcactgggccagattgagaaacagttcggcaaaggctccatcatgcgtctgggtgaagaccgctccatggacgtggaaacgatctccaccggctcactgtcactcgatatcgccctgggcgccggcggcctgccgatgggccgcatcgtagaaatctacggcccggaatcgtccggtaaaaccactttgacgctgcaggtgatcgccgccgcgcagcgcgaaggcaaaacctgtgcgttcatcgacgccgaacacgcgctggatcctatctatgcgaaaaagctgggcgtcgatatcgacaacctgctgtgctcccagccggataccggcgagcaggcgctggaaatctgtgatgcgctgacccgctccggcgcggttgatgtcatcatcgtcgactccgtggcggcgctgacgccgaaagcggaaatcgaaggtgaaatcggcgattcgcacatgggcctggcggcgcgcatgatgagccaggcgatgcgtaagctggccggcaacctgaaaaacgccaataccctgctgatcttcatcaaccagatccgtatgaaaattggtgtgatgttcggcaacccggaaaccacgaccggcggtaacgccctgaagttctatgcttcggtgcgtttggatatccgtcgtatcggcgccatcaaagaaggcgacgaagtggtgggcagcgaaacccgcgtgaaagtggtgaagaacaaaatcgctgcgccgttcaaacaggctgagttccaaatcatgtacggcgaaggcatcaacagccgcggcgaactggtcgatctgggcgtgaagcacaagatgatcgaaaaagccggcgcctggtacagctataacggcgagaagatcggtcagggcaaggcgaatgcctgtaacttcctgaaagaaaacccggctattgccgccgagctggataagaagctgcgtgacctgctgctgcacagcggcggtgagctggtggctgcctccggtgacgacttcgaagacgacgaagcggaaaccagcgagcagttctaatcgctgaagatatgcgccgccgtttatgtggcgcctatcctctgaattc

SEQ ID NO: 100454 - protein, 354 aa, Serratia marcescens
MAIDENKQKALAAALGQIEKQFGKGSIMRLGEDRSMDVETISTGSLSLDIALGAGGLPMGRIVEIYGPESSGKTTLTLQVIAAAQREGKTCAFIDAEHALDPIYAKKLGVDIDNLLCSQPDTGEQALEICDALTRSGAVDVIIVDSVAALTPKAEIEGEIGDSHMGLAARMMSQAMRKLAGNLKNANTLLIFINQIRMKIGVMFGNPETTTGGNALKFYASVRLDIRRIGAIKEGDEVVGSETRVKVVKNKIAAPFKQAEFQIMYGEGINSRGELVDLGVKHKMIEKAGAWYSYNGEKIGQGKANACNFLKENPAIAAELDKKLRDLLLHSGGELVAASGDDFEDDEAETSEQF

SEQ ID NO: 100455 - DNA, 1074 bp, Shewanella oneidensis
  CDS (1)..(1074): transl_table=11
atgaaggtcgatccaaacaaagagaaagcacttgctgcggtattgagccaaattgagaagcaatttggtaaaggctccatcatgaagctgggcgaagaccgctctatggatgttgagaccatttctacaggttctctttcccttgacgtcgctcttggggcaggtggtttgcctatgggccgtatcgttgagatctatggtccagagtcatcaggtaaaacaactctgacattagaagtgattgccgccgctcagcgcgaaggtaaaacctgtgcctttatcgatgcagaacacgctcttgatcctatctacgcgaaaaaattaggcgttgatattgataacttattgtgttcacagcccgataccggtgagcaagcccttgagatttgtgatgcattaacccgttctggtgcggttgatgtgattatcgttgactcggtagcggcattaacaccaaaggcggagattgaaggtgaaattggtgactcacacatgggcttagcggctcgtatgatgagccaagcaatgcgtaagttagcgggtaacctcaagcaatcgaacactctgttaatcttcatcaaccaaattcgtatgaagattggggtgatgtttggtaacccagaaaccacaacgggtggtaatgctctgaaattctatgcctctgttcgtttggatatccgccgtacaggcgctatcaaagaaggtgatgaggtggttggtaacgagacacgcgtaaaagtcgttaaaaacaaagttgcagcgccatttaaacaagcagagttccaaattctatacggtcaaggtatcaaccgtactggcgagttagttgatttaggtgtagcccataaactgattgagaaagcaggcgcttggtatagctacaagggcgataaaattggtcaaggccgtgcaaatgcgggtaaatatttgactgaaaacccagctatagccgctgaaatcgataagacattgcgtgagctattgttgagtaacccgagtgccctggcatcatcggcatccgatgatgacaatgtcgaggggaatattgatttagaaacaggcgaagtgttctga

SEQ ID NO: 100456 - protein, 357 aa, Shewanella oneidensis
MKVDPNKEKALAAVLSQIEKQFGKGSIMKLGEDRSMDVETISTGSLSLDVALGAGGLPMGRIVEIYGPESSGKTTLTLEVIAAAQREGKTCAFIDAEHALDPIYAKKLGVDIDNLLCSQPDTGEQALEICDALTRSGAVDVIIVDSVAALTPKAEIEGEIGDSHMGLAARMMSQAMRKLAGNLKQSNTLLIFINQIRMKIGVMFGNPETTTGGNALKFYASVRLDIRRTGAIKEGDEVVGNETRVKVVKNKVAAPFKQAEFQILYGQGINRTGELVDLGVAHKLIEKAGAWYSYKGDKIGQGRANAGKYLTENPAIAAEIDKTLRELLLSNPSALASSASDDDNVEGNIDLETGEVF

SEQ ID NO: 100457 - DNA, 1336 bp, Shigella sonnei
  CDS (160)..(1221): transl_table=11
cgaccgtgatgcggtgcgtcgtcaggctactgcgtatgcattgcagaccttgtggcaacaatttctacaaaacacttgatactgtatgagtatacagtataattgcttcaacagaacatattgactatccggtattaccccggcatgacaggagtaaaaatggctatcgacgaaaacaaacagaaagcgttggcggcagcactgggccagattgagaaacaatttggtaaaggctccatcatgcgcctgggtgaagaccgttccatggatgtggaaaccatctctaccggttcgctttcactggatatcgcgcttggggcaggtggtctgccgatgggccgtatcgtcgaaatctacggaccggaatcttccggtaaaaccacgctgacgctgcaggtgatcgccgcagcgcagcttgaaggtaaaacctgtgcgtttatcgatgctgaacacgcgctggacccaatctacgcacgtaaactgggcgtcgatatcgataacctgctgtgctcccagccggacaccggcgagcaggcactggaaatctgtgacgccctggcgcgttctggcgcagtagacgttatcgtcgttgactccgtggcggcactgacgccgaaagcggaaatcgaaggcgaaatcggcgactctcacatgggccttgcggcacgtatgatgagccaggcgatgcgtaagctggcgggtaacctgaagcagtccaacacgctgctgatcttcatcaaccagatccgtatgaaaattggtgtgatgttcggtaacccggaaaccactaccggtggtaacgcgctgaaattctacgcctctgttcgtctcgacatccgtcgtatcggcgcggtgaaagagggcgaaaacgtggtgggtagcgaaacccgcgtgaaagtggtgaagaacaaaatcgctgcaccgtttaaacaggctgaatttcagatcctctacggcgaaggtatcaacttctacggcgaactggttgacctgggcgtaaaagagaagctgatcgagaaagcaggcgcgtggtacagctacaaaggtgagaagatcggtcagggtaaagcgaatgcaactgcctggctgaaagataacccggaaaccgcgaaagagatcgagaagaaagtacgtgagttgctgctgagcaacccgaactcaacgccggatttctctgtagatgacagcgaaggcgtagcagaaactaacgaagatttttaatcgttcgttattgatgataatagataatgtgtgcacggacggtccctcgcccctttggggagagggttagggtgaggggaacaggccaacactggcgtgaaaaattactctcacc

SEQ ID NO: 100458 - protein, 353 aa, Shigella sonnei
MAIDENKQKALAAALGQIEKQFGKGSIMRLGEDRSMDVETISTGSLSLDIALGAGGLPMGRIVEIYGPESSGKTTLTLQVIAAAQLEGKTCAFIDAEHALDPIYARKLGVDIDNLLCSQPDTGEQALEICDALARSGAVDVIVVDSVAALTPKAEIEGEIGDSHMGLAARMMSQAMRKLAGNLKQSNTLLIFINQIRMKIGVMFGNPETTTGGNALKFYASVRLDIRRIGAVKEGENVVGSETRVKVVKNKIAAPFKQAEFQILYGEGINFYGELVDLGVKEKLIEKAGAWYSYKGEKIGQGKANATAWLKDNPETAKEIEKKVRELLLSNPNSTPDFSVDDSEGVAETNEDF

SEQ ID NO: 100459 - DNA, 1044 bp, Silicibacter pomeroyi
  CDS (1)..(1044): transl_table=11
atgagcagcaaacagagcgcggacaagcagaaggcgctggacagcgccctggcccagatcgaacgacagttcggcaaggggtcgatcatgaggctgggcggcgagaacgccattcaggagatcgaggcaagctcgaccggttcgctggggctggacatcgcgttggggatcggtggcttgccgatgggccggatcgtcgagatctatgggccggaaagctcgggcaagaccacgctgaccctgcattgcatcgccgagcagcaaaaacgcggtggcgtctgtgcctttgtcgatgccgaacatgcgcttgacccgcaatatgcgcgcaagctgggcgtcgatctggacgagcttctgatcagccagcccgataccggagaacaggcgctggagatcaccgacacgctggtgcgctcgggcgcggtcaacatggtggtggtcgattcggtcgccgcgctgaccccgaaatccgagcttgaaggcgacatgggcgattccagcgtcggcgtgcatgcccgcctgatgagccaggccatgcgcaagctgaccggctcgatcagccgctcgaaatgcatggtgatcttcatcaaccagatccgcatgaagatcggcgtgatgttcggcagcccggaaaccaccaccggcggcaacgcattgaaattctacagttcggtgcgtctggatatccgtcgcatcggcgccatcaaggaccgcgatgaggtggtgggcaacgccacccgcgtcaaggtggtcaagaacaaggtggcaccgcccttcaagcaggtggaattcgacatcatgtatggcgaaggcatctccaagaccggcgaactgctggacctgggcgtcaaggccggtgtggtcgataaatccggcagctggttctcttatggggacgagcgcatcggccagggccgcgaaaacgccaagaccttcctgagggaaaaccagtccatcgcgctggcgatcgaagacaagatccgcgccgcgcacgggttggaattcgacatgagcgacgatggcgaggacatcctcgaagcgtga

SEQ ID NO: 100460 - protein, 347 aa, Silicibacter pomeroyi
MSSKQSADKQKALDSALAQIERQFGKGSIMRLGGENAIQEIEASSTGSLGLDIALGIGGLPMGRIVEIYGPESSGKTTLTLHCIAEQQKRGGVCAFVDAEHALDPQYARKLGVDLDELLISQPDTGEQALEITDTLVRSGAVNMVVVDSVAALTPKSELEGDMGDSSVGVHARLMSQAMRKLTGSISRSKCMVIFINQIRMKIGVMFGSPETTTGGNALKFYSSVRLDIRRIGAIKDRDEVVGNATRVKVVKNKVAPPFKQVEFDIMYGEGISKTGELLDLGVKAGVVDKSGSWFSYGDERIGQGRENAKTFLRENQSIALAIEDKIRAAHGLEFDMSDDGEDILEA

SEQ ID NO: 100461 - DNA, 1773 bp, Sodalis glossinidius
  CDS (12)..(1079): transl_table=11
taggagtaaaaatggctattgatgagaataaacaaaaggcgttagcggcagcactgggccagattgaaaagcaattcggcaagggctcgatcatgcgtctgggtgaagatcgctccatggatgttgaaacgatctccacaggttctctgtctctggatatagcgttgggcgccggtgggcttcccatgggccgcatcgtcgaaatctacggcccggaatcatcgggtaaaacgaccctgaccctgcaggtcatcgccgcggcgcagcgtgaagtcaaaacctgcgcctttatcgatgctgaacacgccctggatcccatctatgccaaaaagctgggcgtcgatatcgacaatctgctgtgctcccagccggataccggcgaacaggcgctggaaatctgtgacgccttgacccgctccggcgcggtagacgtcatcatcgtcgactccgtggcagcgctgacgccgaaagcagaaatcgagggcgaaatcggcgattcccatatggggctggccgcccgtatgatgagccaggcgatgcggaaactggcgggcaacctgaaaaacgccaacacactcctgattttcatcaaccagatccgtatgaagatcggcgtcatgttcggcaatccggaaaccaccaccggcggtaatgcgcttaagttttacgcgtcggttcgcctggatatccgtcgtatcggctcggtaaaagaaggcgatgtggtggtgggcagtgaaacccgcgtcaaagtcgtgaagaacaaagttgccgcgccgtttaaacaggccgaattccagatcatgtacggcgaaggtatcaatattcgcggtgaattggttgatttgggcgtcaagcacaagctaattgagaaagccggcgcctggtacagctacaacggcgagaagatcggccagggcaaagccaatgcctgcagcttcttgaaggatcatcccgaggtggcggctgagctggacaaaaagctgcgcgacatgttgctgcacagcgctgaaggcaacagcctggtcagcgacgtggaaagtgaggatgaaggcgctagcgagagcaatgaagagttttaacctaccggcagtgaaaacggcggttccggccgcgacgcgaggtcgctgacgcggtggccttccttcttgaccgggcttggggctattgtcccgccgcgatcacagcgaagccgggctgcagcgtaagctggcgataccgccggttgcgcgccgccgctttcgtgagcgtccggacgcgcaacccgtgcaggcggtaagccaggaagagattaaccaggctcacctactgtcacgagcatgactggcttgacgacgggcgttttgcccggcgatatgtcagccggcgtagtaaacaaggctatggcgaacagcgtatccgcatggagctgttgcaaaaaggcatcgacagggatgatatcgatgcggccttcgccgtagcggtaaaaaagttcggtcagccgctgccggacgcgccgcagatcaaaatcaaactacagcgttatcttctctcccgtggcttttccttcgacgaaatctgctctatttatacaaatttataaatagatggtgtgcgggattttacttcgcaccaaagaaaatttatcttattcccactttttacgatcctgaacgctactagagcgccttacaactgcgctattctgttcgagattcgatctttttgcatgattccgggacaactatgagcaagagcaccgctgagatccgtcaggcgtttctcgactttttccat

SEQ ID NO: 100462 - protein, 355 aa, Sodalis glossinidius
MAIDENKQKALAAALGQIEKQFGKGSIMRLGEDRSMDVETISTGSLSLDIALGAGGLPMGRIVEIYGPESSGKTTLTLQVIAAAQREVKTCAFIDAEHALDPIYAKKLGVDIDNLLCSQPDTGEQALEICDALTRSGAVDVIIVDSVAALTPKAEIEGEIGDSHMGLAARMMSQAMRKLAGNLKNANTLLIFINQIRMKIGVMFGNPETTTGGNALKFYASVRLDIRRIGSVKEGDVVVGSETRVKVVKNKVAAPFKQAEFQIMYGEGINIRGELVDLGVKHKLIEKAGAWYSYNGEKIGQGKANACSFLKDHPEVAAELDKKLRDMLLHSAEGNSLVSDVESEDEGASESNEEF

SEQ ID NO: 100463 - DNA, 1044 bp, Staphylococcus aureus
  CDS (1)..(1044): transl_table=11
ttggataacgatcgtcaaaaagctttagatacagtaattaaaaatatggagaaatctttcggtaaaggtgccgtaatgaagttgggtgacaatataggtcgccgagtttcaactacatcaactggttcagttacattagataatgcgctaggtgtaggtggctatcctaaaggacgaattattgaaatttatggtcctgaaagttctggtaagacaacagtagcgcttcacgctattgctgaagtacaaagtaatggcggggtggcagcatttatcgatgctgaacatgctttagatccagaatatgctcaagcattaggcgtagatatcgataatttatatttatcgcaaccggatcatggtgaacaaggtcttgaaatcgccgaagcatttgttagaagtggtgcagttgatattgtagttgtagactcagttgctgctttaacacctaaagctgaaattgaaggagaaatgggagacactcacgttggtttacaagctcgtttaatgtcacaagcgttacgtaaactttcaggtgctatttctaaatcaaatacaactgctattttcatcaaccaaattcgtgaaaaagttggtgttatgttcggtaatccagagactacaccaggtggacgtgcattaaaattctatagttcagtaagactagaagtacgtcgtgcagaacagcttaaacaaggacaagaaattgtaggtaatagaactaaaattaaagtcgttaaaaataaagtggcaccaccatttagagtagctgaagttgatattatgtatggacaaggtatttctaaagagggtgaacttattgatttaggtgttgaaaacgacatcgttgataaatcaggagcatggtattcttacaatggcgaacgaatgggtcaaggtaaggaaaatgttaaaatgtacttgaaagaaaatccacaaattaaagaagaaattgatcgtaaattgagagaaaaattaggtatatctgatggtgatgttgaagaaacagaagatgcaccaaagtcattatttgacgaagaatag

SEQ ID NO: 100464 - protein, 347 aa, Staphylococcus aureus
MDNDRQKALDTVIKNMEKSFGKGAVMKLGDNIGRRVSTTSTGSVTLDNALGVGGYPKGRIIEIYGPESSGKTTVALHAIAEVQSNGGVAAFIDAEHALDPEYAQALGVDIDNLYLSQPDHGEQGLEIAEAFVRSGAVDIVVVDSVAALTPKAEIEGEMGDTHVGLQARLMSQALRKLSGAISKSNTTAIFINQIREKVGVMFGNPETTPGGRALKFYSSVRLEVRRAEQLKQGQEIVGNRTKIKVVKNKVAPPFRVAEVDIMYGQGISKEGELIDLGVENDIVDKSGAWYSYNGERMGQGKENVKMYLKENPQIKEEIDRKLREKLGISDGDVEETEDAPKSLFDEE

SEQ ID NO: 100465 - DNA, 1119 bp, Streptomyces ambofaciens
  CDS (1)..(1119): transl_table=11
atggcaggaaccgaccgcgagaaggctcttgacgccgcactcgcacagattgaacggcagttcggcaagggcgcggtcatgcgcatgggcgaccggtcgaaggagcccatcgaggtcatcccgaccgggtcgaccgcgctcgacgtggccctcggcgtcggcggcctgccgcgcggccgcgtcatcgaggtctacggtccggagtcctccggtaagacgaccctgaccctgcacgccgtggcgaacgcgcagaaggccggcggccaggtggcgttcgtggacgcggagcacgccctcgaccccgagtacgcccagaagctcggcgtcgacatcgacaacctgatcctgtcccagccggacaacggtgagcaggccctggagatcgtggacatgctggtccgctccggcgccctcgacctcatcgtcatcgactccgtcgccgcgctcgtcccgcgcgcggagatcgagggcgagatgggtgacagccacgtcggtctccaggcccggctgatgagccaggcgctccggaagatcaccagcgcgctcaaccagtccaagaccaccgcgatcttcatcaaccagctccgcgagaagatcggcgtcatgttcggctccccggagaccacgaccggtggccgggcgctcaagttctacgcctcggtgcgactcgacatccgacgcatcgagacgctcaaggacggcaccgacgcggtcggcaaccgcacgcgcgtcaaggtcgtcaagaacaaggtcgcgccgcccttcaagcaggccgagttcgacatcctctacggccagggcatcagccgcgagggcggcctgatcgacatgggcgtggagcacggcttcgtccgcaaggccggcgcctggtacacgtacgagggcgaccagctcggccagggcaaggagaacgcgcgcaacttcctgaaggacaaccccgacctcgccaacgagatcgagaagaagatcaaggagaagctgggcgtcggagtccgtcccgaggagccgacggccaccgagtccggaccggacgccgcgacggccgaatccgcaccggcggtgcccgcgcccgcgaccgccaaggtcaccaaggccaaggccgcggcagccaagagctga

SEQ ID NO: 100466 - protein, 372 aa, Streptomyces ambofaciens
MAGTDREKALDAALAQIERQFGKGAVMRMGDRSKEPIEVIPTGSTALDVALGVGGLPRGRVIEVYGPESSGKTTLTLHAVANAQKAGGQVAFVDAEHALDPEYAQKLGVDIDNLILSQPDNGEQALEIVDMLVRSGALDLIVIDSVAALVPRAEIEGEMGDSHVGLQARLMSQALRKITSALNQSKTTAIFINQLREKIGVMFGSPETTTGGRALKFYASVRLDIRRIETLKDGTDAVGNRTRVKVVKNKVAPPFKQAEFDILYGQGISREGGLIDMGVEHGFVRKAGAWYTYEGDQLGQGKENARNFLKDNPDLANEIEKKIKEKLGVGVRPEEPTATESGPDAATAESAPAVPAPATAKVTKAKAAAAKS

SEQ ID NO: 100467 - DNA, 1134 bp, Streptomyces avermitilis
  CDS (1)..(1134): transl_table=11
atggcaggaaccgaccgcgagaaggcgctcgacgccgcgctcgcacagattgaacggcaattcggcaagggcgcggtgatgcgcctgggcgagcggccgaatgagcccatcgaggtcatccccaccgggtcgaccgcgctcgacgtcgccctcggcgtcggcggcctgccgcgcggccgagtggtggaggtgtacggcccggagtcctccggtaagacgaccctgacgctgcacgcggtggcgaacgcgcagaaggccggcggccaggtggccttcgtggacgccgagcacgccctcgaccccgagtacgcgaagaagctcggcgtcgacatcgacaacctgatcctgtcgcagccggacaacggtgagcaggctctggagatcgtggacatgctggtccgctccggcgcgctcgacctgatcgtcatcgactccgtcgccgccctggtgccgcgcgcggagatcgagggcgagatgggcgactcgcacgtgggtctgcaggcccgcctgatgagccaggccttgcggaagatcaccagcgcgctcaaccagtcgaagaccaccgcgatcttcatcaaccagctccgcgagaagatcggcgtgatgttcggctctccggagaccacgacgggtggccgggcgctgaagttctacgcctcggtgcggctcgacatccgtcgcatcgagacgctgaaggacggcaccgacgcggtcggcaaccgcacccgcgtcaaggtcgtcaagaacaaggtcgcgccgcccttcaagcaggccgagttcgacatcctctacgggcagggcatcagccgcgaaggcggcctgatcgacatgggcgtggagaacggcttcgtccgcaaggctggcgcctggtacacgtacgagggcgaccagctcggccagggcaaggagaacgcgcgcaacttcctgaaggacaaccccgacctcgccaacgagatcgagaagaagatcaaggagaagctgggcgtcggcgtacggccggaggagcccacggcggagccgggcgcggacgcggcggtcacgtcggccgcggctgccacggacgacaccgcgaagacggtgtccgctcccgcggccaagaccaccaagtccaaggccgcggcggccaagagctag

SEQ ID NO: 100468 - protein, 377 aa, Streptomyces avermitilis
MAGTDREKALDAALAQIERQFGKGAVMRLGERPNEPIEVIPTGSTALDVALGVGGLPRGRVVEVYGPESSGKTTLTLHAVANAQKAGGQVAFVDAEHALDPEYAKKLGVDIDNLILSQPDNGEQALEIVDMLVRSGALDLIVIDSVAALVPRAEIEGEMGDSHVGLQARLMSQALRKITSALNQSKTTAIFINQLREKIGVMFGSPETTTGGRALKFYASVRLDIRRIETLKDGTDAVGNRTRVKVVKNKVAPPFKQAEFDILYGQGISREGGLIDMGVENGFVRKAGAWYTYEGDQLGQGKENARNFLKDNPDLANEIEKKIKEKLGVGVRPEEPTAEPGADAAVTSAAAATDDTAKTVSAPAAKTTKSKAAAAKS

SEQ ID NO: 100469 - DNA, 1125 bp, Streptomyces coelicolor
  CDS (1)..(1125): transl_table=11
atggcaggaaccgaccgcgagaaggccctggacgccgcgctcgcacagattgaacggcaattcggcaagggcgcggtcatgcgcatgggtgaccggaccaacgagcccatcgaggtcatcccgaccgggtctaccgcgctcgacgtggccctcggcgtcggaggcatcccgcgtggccgtgtcgtggaggtctacggccccgagtcctcgggcaagacgaccctgaccctgcacgcggtggcgaacgcgcagaaggccggcggccaggtcgcgttcgtggacgccgagcacgccctcgaccccgagtacgcgaagaagctcggtgtcgacatcgacaacctgatcctgtcccagccggacaacggtgagcaggccctggagatcgtggacatgctggtccgctccggcgccctcgacctcatcgtcatcgactccgtcgccgcgctcgtcccgcgcgcggagatcgagggcgagatgggcgacagccacgtcggtctgcaggcccggctgatgagccaggccctgcggaagatcaccagcgcgctcaaccagtccaagaccaccgcgatcttcatcaaccagctccgcgagaagatcggcgtgatgttcggctccccggagaccacgaccggtggccgggcactgaagttctacgcctcggtgcgactcgacatccggcggatcgagacgctgaaggacggcaccgacgcggtcggcaaccgcacccgcgtcaaggtggtcaagaacaaggtcgcgccgcccttcaagcaggccgagttcgacatcctctacggccagggcatcagccgcgagggcggtctgatcgacatgggcgtggagaacggcttcgtccgcaaggccggcgcctggtacacgtacgagggcgaccagctcggtcagggcaaggagaacgcgcgcaacttcctgaaggacaaccccgacctggccaacgagatcgagaagaagatcaagcagaagctgggcgtcggcgtgcaccccgaggagtcggccaccgagcccggcgcggacgccgcctccgccgccccggccgacgccgcaccggcggtgcccgcacccacgaccgccaaggccaccaagtccaaggccacggcagccaagagctga

SEQ ID NO: 100470 - protein, 374 aa, Streptomyces coelicolor
MAGTDREKALDAALAQIERQFGKGAVMRMGDRTNEPIEVIPTGSTALDVALGVGGIPRGRVVEVYGPESSGKTTLTLHAVANAQKAGGQVAFVDAEHALDPEYAKKLGVDIDNLILSQPDNGEQALEIVDMLVRSGALDLIVIDSVAALVPRAEIEGEMGDSHVGLQARLMSQALRKITSALNQSKTTAIFINQLREKIGVMFGSPETTTGGRALKFYASVRLDIRRIETLKDGTDAVGNRTRVKVVKNKVAPPFKQAEFDILYGQGISREGGLIDMGVENGFVRKAGAWYTYEGDQLGQGKENARNFLKDNPDLANEIEKKIKQKLGVGVHPEESATEPGADAASAAPADAAPAVPAPTTAKATKSKATAAKS

SEQ ID NO: 100471 - DNA, 1125 bp, Streptomyces lividans
  CDS (1)..(1125): transl_table=11
atggcaggaaccgaccgcgagaaggccctggacgccgcgctcgcacagattgaacggcaattcggcaagggcgcggtcatgcgcatgggtgaccggaccaacgagcccatcgaggtcatcccgaccgggtctaccgcgctcgacgtggccctcggcgtcggaggcatcccgcgtggccgtgtcgtggaggtctacggccccgagtcctcgggcaagacgaccctgaccctgcacgcggtggcgaacgcgcagaaggccggcggccaggtcgcgttcgtggacgccgagcacgccctcgaccccgagtacgcgaagaagctcggtgtcgacatcgacaacctgatcctgtcccagccggacaacggtgagcaggccctggagatcgtggacatgctggtccgctccggcgccctcgacctcatcgtcatcgactccgtcgccgcgctcgtcccgcgcgcggagatcgagggcgagatgggcgacagccacgtcggtctgcaggcccggctgatgagccaggccctgcggaagatcaccagcgcgctcaaccagtccaagaccaccgcgatcttcatcaaccagctccgcgagaagatcggcgtgatgttcggctccccggagaccacgaccggtggccgggcactgaagttctacgcctcggtgcgactcgacatccggcgtatcgagacgctgaaggacggcaccgacgcggtcggcaaccgcacccgcgtcaaggtggtcaagaacaaggtcgcgccgcccttcaagcaggccgagttcgacatcctctacggccagggcatcagccgcgagggcggtctgatcgacatgggcgtggagaacggcttcgtccgcaaggccggcgcctggtacacgtacgagggcgaccagctcggtcagggcaaggagaacgcgcgcaacttcctgaaggacaaccccgacctggccaacgagatcgagaagaagatcaagcagaagctgggcgtcggcgtgcaccccgaggagtcggccaccgagcccggcgcggacgccgcctccgccgccccggccgacgccgcaccggcggtgcccgcacccacgaccgccaaggccaccaagtccaaggccgcggcagccaagagctga

SEQ ID NO: 100472 - protein, 374 aa, Streptomyces lividans
MAGTDREKALDAALAQIERQFGKGAVMRMGDRTNEPIEVIPTGSTALDVALGVGGIPRGRVVEVYGPESSGKTTLTLHAVANAQKAGGQVAFVDAEHALDPEYAKKLGVDIDNLILSQPDNGEQALEIVDMLVRSGALDLIVIDSVAALVPRAEIEGEMGDSHVGLQARLMSQALRKITSALNQSKTTAIFINQLREKIGVMFGSPETTTGGRALKFYASVRLDIRRIETLKDGTDAVGNRTRVKVVKNKVAPPFKQAEFDILYGQGISREGGLIDMGVENGFVRKAGAWYTYEGDQLGQGKENARNFLKDNPDLANEIEKKIKQKLGVGVHPEESATEPGADAASAAPADAAPAVPAPTTAKATKSKAAAAKS

SEQ ID NO: 100473 - DNA, 1131 bp, Streptomyces rimosus
  CDS (1)..(1131): transl_table=11
atggcaggcactgaccgcgagaaggcgctggacgccgcgctcgcacagattgaacggcaattcggcaagggtgccgtgatgaggatgggagagcgctcgaaggagcccatcgaggtcatccccaccgcgtcgaccgcactggacgtcgcgctcggcgtcggcggtatcccccgcggccgcgtggtggagatctacggcccggagtcctccggcaagacgaccctgaccctgcacgcggtggcgaacgcgcagaaggccggcggctccgtcgccttcatcgacgccgagcacgcgctcgaccccgagtacgccaagaagctgggcgtggacacggacgcgctgatcctgtcccagccggacaacggcgagcaggccctggagatcgtggacatgctggtccgctccggcgcgctcgacctcatcgtgatcgactcggtcgccgcgctggtgccccgggcggagatcgagggtgagatgggcgactcccacgtgggtctccaggcccgtctgatgagccaggcgctgcggaagatcaccagcgcgctcaaccagtccaagaccaccgcgatcttcatcaaccagctccgcgagaagatcggcgtgatgttcggctcgccggagaccacgaccggtggccgcgccctgaagttctacgcctcggtgcgcatcgacatccgccgtatcgagaccctcaaggacggcaccgaagcggtcggcaaccgcacccgctgcaaggtcgtcaagaacaaggtcgccccgcccttcaagcaggccgagttcgacatcctgtacggccagggcatcagccgtgagggcggcctgatcgacatgggcgtcgagcacggcttcatccgcaagtcgggcgcctggtacacctacgagggcgaccagctcggccagggcaaggagaacgcccgcaacttcctcaaggacaaccccgacctcgccaacgaggtggagaagaagatcaaggagaagctgggcgtcggcgtgaagccggaagacctgacggcggagcccggcgcggacgcggcgggtgcggcggccgacgcggaggccccggccaagtccgtaccggcaccggccgccaagagtgccaagggctccaaggccgcagcggccaagagctag

SEQ ID NO: 100474 - protein, 376 aa, Streptomyces rimosus
MAGTDREKALDAALAQIERQFGKGAVMRMGERSKEPIEVIPTASTALDVALGVGGIPRGRVVEIYGPESSGKTTLTLHAVANAQKAGGSVAFIDAEHALDPEYAKKLGVDTDALILSQPDNGEQALEIVDMLVRSGALDLIVIDSVAALVPRAEIEGEMGDSHVGLQARLMSQALRKITSALNQSKTTAIFINQLREKIGVMFGSPETTTGGRALKFYASVRIDIRRIETLKDGTEAVGNRTRCKVVKNKVAPPFKQAEFDILYGQGISREGGLIDMGVEHGFIRKSGAWYTYEGDQLGQGKENARNFLKDNPDLANEVEKKIKEKLGVGVKPEDLTAEPGADAAGAAADAEAPAKSVPAPAAKSAKGSKAAAAKS

SEQ ID NO: 100475 - DNA, 1134 bp, Streptomyces violaceus
  CDS (1)..(1134): transl_table=11
atggcaggaaccgaccgcgagaaggcgctcgacgccgcgctcgcacagattgaacgccaattcggcaagggcgccgtgatgcgcatgggcgaccgcacccaggagccgatcgaggtgatctccaccggatcgaccgccctcgacatcgccctcggcgtcggtggcctgccgcgcggccgtgtcgtggagatctacggaccggagtcctccggtaagacgaccctgacgctgcacgccgtggccaacgcacagaaggccggcggccaggtggcgttcgtggacgccgagcacgccctcgaccccgagtacgccaagaagctcggcgtcgacatcgacaacctcatcctgtcccagccggacaacggcgagcaggccctcgagatcgtcgacatgctggtccgctccggcgccctcgacctcatcgtcatcgactccgtcgccgcgctcgtcccgcgcgcggagatcgagggcgagatgggtgactcccacgtcggtctccaggcccgactgatgagccaggcgctccggaagatcaccagcgcgctcaaccagtccaagaccaccgcgatcttcatcaaccagctccgcgagaagatcggcgtgatgttcggctcgccggagaccacgaccggtggccgcgccctcaagttctacgcctcggtgcgcctcgacatccgtcgcatcgagaccctcaaggacggcaccgacgcggtcggcaaccgcacccgcgtcaaggtcgtcaagaacaaggtcgcgcccccgttcaagcaggccgagttcgacatcctctacggccagggcatcagccgcgagggcggtctgatcgacatgggcgtggagcacggcttcgtgcgcaaggccggtgcctggtacacgtacgagggcgaccagctcggccagggcaaggagaacgcccgcaacttcctcaaggacaaccccgacctcgccgacgagatcgagcggaagatcaaggagaagctgggcgtcggcgtccggcccgacgcggccaaggccgaggcggcgacggacgcggcggccgcggacaccgccggcacggacgacgcggccaagagcgtcccggcacccgcgagcaagaccgcgaaggcgaccaaggccaccgcggtcaagagctga

SEQ ID NO: 100476 - protein, 377 aa, Streptomyces violaceus
MAGTDREKALDAALAQIERQFGKGAVMRMGDRTQEPIEVISTGSTALDIALGVGGLPRGRVVEIYGPESSGKTTLTLHAVANAQKAGGQVAFVDAEHALDPEYAKKLGVDIDNLILSQPDNGEQALEIVDMLVRSGALDLIVIDSVAALVPRAEIEGEMGDSHVGLQARLMSQALRKITSALNQSKTTAIFINQLREKIGVMFGSPETTTGGRALKFYASVRLDIRRIETLKDGTDAVGNRTRVKVVKNKVAPPFKQAEFDILYGQGISREGGLIDMGVEHGFVRKAGAWYTYEGDQLGQGKENARNFLKDNPDLADEIERKIKEKLGVGVRPDAAKAEAATDAAAADTAGTDDAAKSVPAPASKTAKATKATAVKS

SEQ ID NO: 100477 - DNA, 1053 bp, Symbiobacterium thermophilum
  CDS (1)..(1053): transl_table=11
atggcattggatccggcgaagcagaaggccatcgacatggccctggcgcagattgagaagcagttcggcaagggttccatcatgcggctcggcgagcagatgtccaggctgaacgtcgaggtgatccccaccggttcggtcgccctggacgtggcgctgggggtcggggggctgccgcgcggccgcatcaccgagatctacgggccggagtcctcgggcaagacgacggtcgcgctgcacgtcatcgccgaggcccagaagatgggcggcgtggcggcgttcgtggacgcggagcacgcgctggacccggtgtacgcccaggcgctcggcgtggacatcgacaacctgctcgtctcccagcccgacaccggcgagcaggccctggagatcaccgagacgctggtgcggtccggcgccgtggacgtggtggtggtcgactccgtcgcggccctggtgccgaaggcggagatcgagggcgagatgggcgactcgtttgtggggctgcaggcccggctcatgtcccaggccctgcgcaagctgaccggcgccatctccaagtccaaggctgtggtcatcttcatcaaccagatccgcgagaaggtcggggtcatgttcggcaatcccgagaccacgccgggcgggcgcgccctgaagttctactcctcggtccggctggaggtgcggaagaccgagaccctgaagagcggccaggaggtggtgggctcccgcacccgggtcaaggtggtcaagaacaaggtcgcgccgcctttcaagcaggccgagttcgatatcctgtacggacagggcatctccaaggagggaagcctgatcgacatcggcaccgagctgaacccgccggtgatcgtcaagagcggcgcctggtactcttacggcgacctgcgcatcggccagggcaaggacaacgcccgggactggctgaggcagcaccccgaggttgcggccgagatcgagcagaagatcaaggagcggctgaacgtggcgtcgctaccggtgaagtacgccgacgaggaggccggcgacgccgatgtctga

SEQ ID NO: 100478 - protein, 350 aa, Symbiobacterium thermophilum
MALDPAKQKAIDMALAQIEKQFGKGSIMRLGEQMSRLNVEVIPTGSVALDVALGVGGLPRGRITEIYGPESSGKTTVALHVIAEAQKMGGVAAFVDAEHALDPVYAQALGVDIDNLLVSQPDTGEQALEITETLVRSGAVDVVVVDSVAALVPKAEIEGEMGDSFVGLQARLMSQALRKLTGAISKSKAVVIFINQIREKVGVMFGNPETTPGGRALKFYSSVRLEVRKTETLKSGQEVVGSRTRVKVVKNKVAPPFKQAEFDILYGQGISKEGSLIDIGTELNPPVIVKSGAWYSYGDLRIGQGKDNARDWLRQHPEVAAEIEQKIKERLNVASLPVKYADEEAGDADV

SEQ ID NO: 100479 - DNA, 1041 bp, Thiobacillus ferrooxidans
  CDS (1)..(1041): transl_table=11
atggatgaacagcgcagcaagggcctttcggcggccctgtcacagattgacaaacagtttggtaaaggcgccgtcatgcgtctcggtgatcataacgccatcaaggacatcgaggtctactccaccggctcgctgggtctggatctggcgctgggtgttggcggactgccccggggccgggtggtagagatctacgggccggaatcttccggtaaaacgactctcaccctgcatgccatagccagttgtcaggctgcaggcggcaccgccgcctttatcgatgccgagcacgcgctcgacccaggctatgcccacaagctcggcgtcgatctggaaaacctcctgatctcccagcctgataccggcgagcaggccctggaaatcgccgacatgctggtgcgctccggtgccgtggacctcatcgtcatcgactccgtggccgctctgacccccaaagcggaaatcgaaggcgagatgggcgattcccacgtcggtctgcaggcgcgtctgatgagtcaggctttgcgcaacttaaccgccaatatctcccggagcaacaccctggtcatttttatcaaccagattcgcatgaaaatcggggtgatgtatggcagtccggaaaccaccaccggtggtaatgcccttaaattctacgcttccgtgcgccttgatatccgccgcatcggcgcgatcaaaaagagcgacgaagtggtaggtaacgatacccgcgtcaaggtggtcaagaataaggtcgcaccacctttccgcgaagccgaatttgccatctattacggtgaaggcatctcccgactgtccgaactggtggacctcggtgtgaagttcgacatcgtcgaaaaaagcggcgcctggtacagttaccagggccaccgtattggtcagggcaaggacaatgcccgccagtacctcaaggtgcatccggaactggcggccaatatcgagcagcggatacgggcagcggcagcaggacaccccctggcctttgccgaagaggtggagagcccgcagcggtcggctagttga

SEQ ID NO: 100480 - protein, 346 aa, Thiobacillus ferrooxidans
MDEQRSKGLSAALSQIDKQFGKGAVMRLGDHNAIKDIEVYSTGSLGLDLALGVGGLPRGRVVEIYGPESSGKTTLTLHAIASCQAAGGTAAFIDAEHALDPGYAHKLGVDLENLLISQPDTGEQALEIADMLVRSGAVDLIVIDSVAALTPKAEIEGEMGDSHVGLQARLMSQALRNLTANISRSNTLVIFINQIRMKIGVMYGSPETTTGGNALKFYASVRLDIRRIGAIKKSDEVVGNDTRVKVVKNKVAPPFREAEFAIYYGEGISRLSELVDLGVKFDIVEKSGAWYSYQGHRIGQGKDNARQYLKVHPELAANIEQRIRAAAAGHPLAFAEEVESPQRSAS

SEQ ID NO: 100481 - DNA, 1320 bp, Vibrio anguillarum
  CDS (166)..(1212): transl_table=11
tggtgagtcactttttatcgcagccaaattgaacctagtcgaaattttttcgacacagctatagacactgtatgaatcaacagtataattaaccccaattggcgactaaagagtcgataaaaaatttaacgagccgctacccacagcgacagtttggagaaagtaatggacgaaaataagcagaaggcgctagccgcagcactgggtcaaattgaaaagcaatttggtaaaggttcgatcatgcgccttggtgacaaccgtacaatggatgttgaaaccatttctaccggttcactttctttggatattgcattgggtgctggcggtttaccaatgggacgtatcgttgaagtctacggccctgaatcatcaggaaaaacaacgttaacgctggaattgatcgcagcagcacaacgagtgggtaaaacctgtgcttttatcgatgcagaacatgcccttgacccaatttatgctaaaaaactgggtgtaaacatcgatgagctgttggtttcacaacctgatacgggcgaacaagcgcttgaaatttgtgatgccttggcccgttctggtgccattgatgttatcgtcattgactctgtggctgcactgacaccaaaagctgaaattgaaggtgaaatgggcgatagccacatgggtctacaagcccgtatgctttctcaagcgatgcgtaagttaacgggtaacctaaaacagtccaactgcatgtgtatcttcatcaaccagatccgtatgaaaattggtgtgatgtttggtaaccctgaaaccacaacaggtggtaatgcccttaaattctacgcttcagttcgtttagatattcgtcgtacaggctctattaaagagggtgacgaagctgtgggtaatgaaacgcgtattaaagtggttaagaacaaaatcgcggctccctttaaacaagcggatactcaaattctttacggacaaggttttaaccgtgaaggtgaattggttgatcttggcgtgaaacataaattggttgagaaagcgggcgcttggtatagctataacggtgataaaattggtcaaggtaaagcaaacgcctgtaaattcttgagagagaatccagccgccgccatggctcttgatactaagttacgtgaaatgctgctcaatccagccgagttaattgttgaagaacctattttgagcgaaatgcctcaagaagaagagttgtaatcttctccacgtttatatttccaacaaagcccctgcaatgcagggctttgttttatccatgaccaatagggacagtatgtattcctctaaattcaaatcgacgttacg

SEQ ID NO: 100482 - protein, 348 aa, Vibrio anguillarum
MDENKQKALAAALGQIEKQFGKGSIMRLGDNRTMDVETISTGSLSLDIALGAGGLPMGRIVEVYGPESSGKTTLTLELIAAAQRVGKTCAFIDAEHALDPIYAKKLGVNIDELLVSQPDTGEQALEICDALARSGAIDVIVIDSVAALTPKAEIEGEMGDSHMGLQARMLSQAMRKLTGNLKQSNCMCIFINQIRMKIGVMFGNPETTTGGNALKFYASVRLDIRRTGSIKEGDEAVGNETRIKVVKNKIAAPFKQADTQILYGQGFNREGELVDLGVKHKLVEKAGAWYSYNGDKIGQGKANACKFLRENPAAAMALDTKLREMLLNPAELIVEEPILSEMPQEEEL

SEQ ID NO: 100483 - DNA, 1632 bp, Vibrio cholerae
  CDS (121)..(1185): transl_table=11
ctatacaggggtggacactgtacaaatcaacagtataataaaccccaacatgacaaatcagcgtcgacccgatttcgacacaattacctatcacctgagagtgactatccggagagagtaatggacgagaataaacagaaggcacttgcggccgccctcggtcaaattgaaaagcaatttggtaaaggctccatcatgcgcttaggcgacaaccgcgcgatggatgtagaaaccatttcgaccggttctctgtctctggatatcgcgttgggtgctggtggtctaccaatgggacgtatcgttgagatcttcggccctgaatcttcgggtaaaacgacactgactctggaactgattgctgctgcacaacgtgaaggtaaaacctgtgcgtttatcgatgccgagcacgcactggatccggtttatgccaaaaaattgggcgtgaatatcgatgagctactggtttctcagccagataccggcgagcaagcactggaaatttgtgatgcactggctcgctctggtgctgtggatgtcatcgttgttgactcagtagcggctttgacaccaaaagcggaaattgaaggcgaaatgggcgatagccacatgggtctgcaagcgcgtatgttgtcgcaagcaatgcgtaaactgacgggtaacctcaagcaatccaactgtatgtgtatcttcatcaaccaaattcgtatgaagattggtgtgatgtttggtaacccagaaactaccactggcggtaacgcactgaaattctacgcttctgttcgtttggatattcgccgtactggcgcaatcaaagaaggcgaagaagtggtgggtaacgaaacccgtatcaaggttgtgaagaacaagattgctgcgccgtttaaagaagcgaacactcagatcatgtatggccaaggtttcaatcgtgaaggtgaattgatcgatcttggtgtgaaacacaaaatggttgagaagtcaggcgcttggtacagctataacggcgataaaatcggccaaggtaaagcgaatgcctgcaagtatctgaaagaaaacccagaaattgcgaaaactctagataaaaaactgcgtgaaatgctgttaaacccagaaaacatgcagctgatcgctgaaacatcttctgcggcggatgacgtcgaatttggcgcggtgccagaagagttttaatcggcaggctgaatgcaaagaggttcagcctctcaatctcgatgttgatgaagccctgcaatgcagggcttctttttggctgccaattgagtgagtgactcaaaactcaccgttagcctaatagggagttccatgagtttcgacttagccacttgccgacaaagtgccttacaacttctgagccgtcgcatcatagcgaatatgagctataccaaaaattagccctcaaaggtcatcctgctgaagtgattgatgaggttgtgaagtacgttttagagctagggtatttgagtgatgcccgttacgcagcgagtcaaggctcgacaaatcgttcataaaggttacggtgagcagcgtttgcgccacaactcaaagaaaagcgggttgcggaagaggtgattgagcaagccctcgccgagcaaacgatagattggtttgaactagcgc

SEQ ID NO: 100484 - protein, 354 aa, Vibrio cholerae
MDENKQKALAAALGQIEKQFGKGSIMRLGDNRAMDVETISTGSLSLDIALGAGGLPMGRIVEIFGPESSGKTTLTLELIAAAQREGKTCAFIDAEHALDPVYAKKLGVNIDELLVSQPDTGEQALEICDALARSGAVDVIVVDSVAALTPKAEIEGEMGDSHMGLQARMLSQAMRKLTGNLKQSNCMCIFINQIRMKIGVMFGNPETTTGGNALKFYASVRLDIRRTGAIKEGEEVVGNETRIKVVKNKIAAPFKEANTQIMYGQGFNREGELIDLGVKHKMVEKSGAWYSYNGDKIGQGKANACKYLKENPEIAKTLDKKLREMLLNPENMQLIAETSSAADDVEFGAVPEEF

SEQ ID NO: 100485 - DNA, 1220 bp, Vibrio natriegens
  CDS (174)..(1220): transl_table=11
cgtgataagctctgcggcaaagttatacgtagatcagctaaagttttttctatacaggtatagacactgtatgaatcaacagtataataactttcattgctgagcgattaactgctcaagaaaagtttaatgactattcgtcgcccaaaaagatgaataaatcggagaaagtaatggacgagaacaaacagaaagcgctcgccgctgcgctaggtcaaattgaaaaacaattcggtaaaggctcaatcatgcgccttggcgataaccgcgcaatggacgtagaaaccatctcaacgggttctctttctcttgatatcgctttgggtgctggtggcttaccgatgggccgtattgttgaagtatacggtccggaatcttcgggtaaaacgacactaactctggaacttattgcagcagcacagcgtgaaggcaaaacttgtgcgtttatcgatgcggagcacgctctggatcctgtatacgcgaagaagcttggcgtagatatcgatgcacttttggtttctcagcctgatacgggtgagcaagcgctagaaatctgtgacgcattagcgcgctctggtgctatcgacgtaatggttgtcgactctgtggcagcactgactccaaaagcagaaatcgaaggcgaaatgggcgacagccacatgggtctccaagctcgtatgctttctcaagcgatgcgtaagctaacaggtaacctgaagcagtctaactgtatgtgtatcttcatcaagcaaatccgtatgaagattggtgtgatgttcggtaacccagaaacaacaactggcggtaacgcacttaaattctacgcatcggttcgtcttgatatccgtcgtactggcgcaatcaaagaaggcgacgaagttgtaggtaacgaaactcgcatcaaagtcgttaagaacaagattgcagcaccatttaaagaagcaaacacgcagatcatgtatggtcaaggctttaaccgcgaaggtgagctggtagacttaggcgtgaagcacaaactggttgaaaaagcaggtgcttggtacagctacaatggcgacaagatcggtcagggcaaagcaaatgcttgtaattacctgcgtgaacatacagaagttgctcagactatcgacaagaaacttcgtgagatgcttttgtctccagctgtagctgagggacctgaagccggtgaaatgccagagaagaaagaagaagagttttaa

SEQ ID NO: 100486 - protein, 348 aa, Vibrio natriegens
MDENKQKALAAALGQIEKQFGKGSIMRLGDNRAMDVETISTGSLSLDIALGAGGLPMGRIVEVYGPESSGKTTLTLELIAAAQREGKTCAFIDAEHALDPVYAKKLGVDIDALLVSQPDTGEQALEICDALARSGAIDVMVVDSVAALTPKAEIEGEMGDSHMGLQARMLSQAMRKLTGNLKQSNCMCIFIKQIRMKIGVMFGNPETTTGGNALKFYASVRLDIRRTGAIKEGDEVVGNETRIKVVKNKIAAPFKEANTQIMYGQGFNREGELVDLGVKHKLVEKAGAWYSYNGDKIGQGKANACNYLREHTEVAQTIDKKLREMLLSPAVAEGPEAGEMPEKKEEEF

SEQ ID NO: 100487 - DNA, 1044 bp, Vibrio parahaemolyticus
  CDS (1)..(1044): transl_table=11
atggacgagaacaaacagaaagcgctcgccgctgcgctaggtcaaattgaaaagcaattcggtaaaggctctatcatgcgccttggtgataaccgcgcaatggatgtagaaaccatttcaacgggttcgctttctcttgatatcgctttgggtgctggtggtctaccaatgggtcgtatcgtagaaatctacggtccagaatcttcaggtaaaacaacgctaactctcgagcttatcgctgctgcacaacgtgaaggtaaaacttgtgcgtttatcgatgctgagcacgcgttggatcctgtgtacgctaaaaagcttggtgttgatatcgatgcgctattggtatctcagccagacactggtgagcaagctctagagatttgtgatgcattagctcgctctggcgccatcgacgtaatggttgttgactctgttgctgctctaacacctaaagctgagatcgaaggcgaaatgggcgacagccacatgggtctccaagctcgtatgctttctcaagcaatgcgtaagcttacaggtaacctgaaacagtctaactgtatgtgtatcttcatcaaccaaatccgtatgaagattggtgtgatgttcggtaaccctgaaacgactactggcggtaacgcgcttaagttttacgcttctgttcgtttagatatccgtcgtactggcgcaatcaaagaaggcgatgaagttgtaggtaacgaaacgcgtatcaaagtggttaagaacaagattgcagcaccatttaaagaagcaaacacgcaaatcatgtatggccaaggctttaaccgtgaaggtgagttgattgacttaggcgtgaagcacaagctagtagaaaaagcgggtgcttggtacagctacaatggcgataagattggtcaaggtaaagcaaacgcttgtaactacctgcgtgagcatccagaaatcgcgaaaacaatcgataccaaactgcgtgaaatgctactttctccagctcaaccagaagcacctgctgccggtgagaagcctgagcaagaagaagagttttaa

SEQ ID NO: 100488 - protein, 347 aa, Vibrio parahaemolyticus
MDENKQKALAAALGQIEKQFGKGSIMRLGDNRAMDVETISTGSLSLDIALGAGGLPMGRIVEIYGPESSGKTTLTLELIAAAQREGKTCAFIDAEHALDPVYAKKLGVDIDALLVSQPDTGEQALEICDALARSGAIDVMVVDSVAALTPKAEIEGEMGDSHMGLQARMLSQAMRKLTGNLKQSNCMCIFINQIRMKIGVMFGNPETTTGGNALKFYASVRLDIRRTGAIKEGDEVVGNETRIKVVKNKIAAPFKEANTQIMYGQGFNREGELIDLGVKHKLVEKAGAWYSYNGDKIGQGKANACNYLREHPEIAKTIDTKLREMLLSPAQPEAPAAGEKPEQEEEF

SEQ ID NO: 100489 - DNA, 996 bp, Wigglesworthia glossinidia brevipalpis
  CDS (1)..(996): transl_table=11
atgataattgaaaacaataaaaaaaaagctttagaaaaagctttagataaaattgaaaaacaattcggaaaaggatctataatgactcttggagaaaatagatctatggatatagaaactatttctacagggtctttgtctttagatattgctttaggcacaggaggtcttccaatgggaagaattgttgaaatttacggtcctgaatcttctggaaaaacaacattaacattagaagttatttatgaagcacaaaaaaagggtaaaatatgtgcatttatagatgctgaacatgctttagatccaatatatgctaaaaatctaggagtagatattaataatttattatgctctcaacctgataatggagagcaagctttagaaatttgtgattcattaactagatcaggagcagtagatcttattatagtagattctgtggcagcgttgactccaaaagctgaaatagatggagaaataggcgatttacatttaggattagcggctagaatgatgagccaggcaatgaggaagctggcaggaaatcttaaaaatgccaatactcttttgatttttatcaaccaaattcgagttaaaataggaactatatttggtagccctgaagttactactggagggaacgctttaaaattttatgcttcagtaagattggatattagaaaaattggaactattaaagatggagatattattataggaaacgaaactagagtaaaagtagtaaaaaataaaatatctgctccttttaggcaagcagaatttcaaattttatatggaaatggaataaacactgaaggagaattaatcactttaggagttaatcataatataattgaaaaatcaggttcatggtatagttataataaaaataaaataggacaaggaaaaaataatgcatgcaattttttaaaaaacaatccaaatatttctaaagaaatttctagaaaaatcagagaaattaatttgattaaataa

SEQ ID NO: 100490 - protein, 331 aa, Wigglesworthia glossinidia brevipalpis
MIIENNKKKALEKALDKIEKQFGKGSIMTLGENRSMDIETISTGSLSLDIALGTGGLPMGRIVEIYGPESSGKTTLTLEVIYEAQKKGKICAFIDAEHALDPIYAKNLGVDINNLLCSQPDNGEQALEICDSLTRSGAVDLIIVDSVAALTPKAEIDGEIGDLHLGLAARMMSQAMRKLAGNLKNANTLLIFINQIRVKIGTIFGSPEVTTGGNALKFYASVRLDIRKIGTIKDGDIIIGNETRVKVVKNKISAPFRQAEFQILYGNGINTEGELITLGVNHNIIEKSGSWYSYNKNKIGQGKNNACNFLKNNPNISKEISRKIREINLIK

SEQ ID NO: 100491 - DNA, 1068 bp, Wolbachia pipientis wMel
  CDS (1)..(1068): transl_table=11
atggcaagtaacccagaagaaagaaatagtgataaacaaaaagcgctagataacgcaataagccagattgaaaaagcattcggtaaaggtgcaataatgaagttgaagcaaaaccctgtagaaaaaatagacacaatatccacaggatcaattgcgcttgattcggctctaggtgttggaggtctgccaaaagggcgtataattgaaatatttggccccgagagttctggtaaaaccactcttgccttgcacgtgattgctgaagcacaaaaaaaaggaggatcatgcgcatttatcgatgcagaacatgcattggatgtcttatatgctcgtaaacttggggtaagcactgatgatttagtgatttcacaaccagacactggagagcaggcgttgcatattgttgagtatttagtgtgttctggtgcggttgatgtgatagttattgactctgtcgcagcattaactccaagagctgaaattgaaggtgatatgggtgatcaacatatggggctgcaagcaaggcttctaagtcatgggctacggaaactaacctctgccgtttcaaaagcgaactgtatattgatatttattaatcaaattcgtatgaaaataggagtagtgtatggaaatcctgaaactaccacgggtggaaatgcattaaaattctatacttctgtaaggcttgatataagaaaagttggtgtaataaaagacaaagaaaatattacaggtaatgaaacaagagttaaagttgtaaaaaataaagttgctcctccatttagagaagcgaaatttgatataatgtacaatgaaggtatatcaaaactcggagaaataatagatatgggagcaaagcttggtgtgcttgaaaaagcaggcgcttactattcatataacaacacacgtcttgggcaaggaagagagaatgtaaaaacttacctaaaaacaaacaaagaagtcgcaaatgaaatagaaacgaaaatcagagatttactcagaaatcatgataattctatcataatagacgaggatagtgagcaacttttagaagaatcagttttctga

SEQ ID NO: 100492 - protein, 355 aa, Wolbachia pipientis wMel
MASNPEERNSDKQKALDNAISQIEKAFGKGAIMKLKQNPVEKIDTISTGSIALDSALGVGGLPKGRIIEIFGPESSGKTTLALHVIAEAQKKGGSCAFIDAEHALDVLYARKLGVSTDDLVISQPDTGEQALHIVEYLVCSGAVDVIVIDSVAALTPRAEIEGDMGDQHMGLQARLLSHGLRKLTSAVSKANCILIFINQIRMKIGVVYGNPETTTGGNALKFYTSVRLDIRKVGVIKDKENITGNETRVKVVKNKVAPPFREAKFDIMYNEGISKLGEIIDMGAKLGVLEKAGAYYSYNNTRLGQGRENVKTYLKTNKEVANEIETKIRDLLRNHDNSIIIDEDSEQLLEESVF

SEQ ID NO: 100493 - DNA, 1053 bp, Wolinella succinogenes
  CDS (1)..(1053): transl_table=11
atggcactagatgagaacaaacgcaaagcgatcgatctagcgatcaaacagattgacaaggcctttggcaaaggcgccctcgtgcgacttggcgaaaaacccgtggaaaagatcgattcgattagcacgggctcattagggctcgacattgccctaggaatcggaggaatcccccaaggaagaatcatcgaaatctatggacctgagagctctggaaagaccacgctcgcacttcaagtgatcgctgagtgtcaaaaaaagggcggaatctgcgcttttatcgatgccgagcacgccctagatgtctcctacgccaaacgccttggggtggatgcagagaatcttcttgtctcccagcctgattatggtgaacaggcgttagagattctagagaccctcacacgaagcggagcggtcgatctcatcgtggtcgattcggtggctgccctcacccccaaaagtgaaattgatggcgatatgggcgatcaacacgtagggctccaagcacgcctcatgagccaagccctgcgaaaagtcacgggcgtgctccacaagatgaacaccaccgtgattttcatcaaccaaatccgtatgaaaatcggaatgatgggctatggaagccctgagacgaccacaggcggaaatgcgctcaaattctatgctagcgtgagaatcgatgtaagaagaatcgcctccctcaaacagggcgaacagcacattgggaatcgcgtcaaagccaaagtggtcaaaaacaaagtcgcgcccccctttagagaagcagaatttgacattatgtttggtgagggaatcagccaagaaggcgagctcatcgactatggcgtgaaactggacattgtcgataagagcggctcatggctcagttatggtgacaaaaaattaggtcaaggcaaagagaatgccaaagcctttttgaaagaaaacaaagaaattgcaaatgaaattcaggctaaaattatcggcgccatcggctcaagtgatgaaatcactacttttggggacgatgaagacgaatcagaaaacctagaatcataa

SEQ ID NO: 100494 - protein, 350 aa, Wolinella succinogenes
MALDENKRKAIDLAIKQIDKAFGKGALVRLGEKPVEKIDSISTGSLGLDIALGIGGIPQGRIIEIYGPESSGKTTLALQVIAECQKKGGICAFIDAEHALDVSYAKRLGVDAENLLVSQPDYGEQALEILETLTRSGAVDLIVVDSVAALTPKSEIDGDMGDQHVGLQARLMSQALRKVTGVLHKMNTTVIFINQIRMKIGMMGYGSPETTTGGNALKFYASVRIDVRRIASLKQGEQHIGNRVKAKVVKNKVAPPFREAEFDIMFGEGISQEGELIDYGVKLDIVDKSGSWLSYGDKKLGQGKENAKAFLKENKEIANEIQAKIIGAIGSSDEITTFGDDEDESENLES

SEQ ID NO: 100495 - DNA, 1035 bp, Xanthomonas axonopodis pv
  CDS (1)..(1035): transl_table=11
atggacgagaacaagaagcgcgccctttccgccgcactgagccagatcgaaaagcaattcggcaagggctcggtcatgcgcatgggcgaccgcgtcattgaggcggtcgaagtcatcccgaccggctcgctgatgctggatatcgccctggggatcggcggcctgccgaagggtcgcgtggtcgaaatctacggcccggaatcctccggcaagaccaccttgaccctgcaagccatcgccgagtgccagaagaacggcggcaccgctgccttcatcgatgccgagcacgcactggacccgatttatgcggccaagctgggcgtcaatgtcgacgacctgctgctgtcgcagccggataccggtgagcaggcactggaaattgccgacatgctggtgcgttcgggttcggttgatatcgtggtggtcgactcggtcgctgcactgacgccgaaggcggaaatcgaaggcgagatgggcgaccagctgccaggtttgcaggctcgcttgatgagccaggcgctgcgcaagctcaccggcaatatcaagcgctccaacacgctggtggtcttcatcaatcagctgcgcatgaagatcggcgtcatgatgccgggccagagcccggaagtgaccaccggcggcaacgcgctgaagttctacgcctcggtgcgtctggatatccgccgtatcggtgcgatcaagaagggcgacgagatcatcggcaaccagaccaagatcaaggtggtcaagaacaagctggcgcctccgttcaagcaggtcgtgaccgaaatcctgtatggcgaaggcatcagtcgcgagggcgaattgatcgacatgggcgtggaagccaagctggtcgacaaggccggcgcctggtacagctatggcgatgagcgcatcgggcagggcaaggacaacgcgcgaacctacctgcgcgacaactcgcaggttgcgacccggctggaagcggagctgcgtgagaagttccaacctgccgaagcaccgcgtgaagccggcgacgacgaagacaaggagtaa

SEQ ID NO: 100496 - protein, 344 aa, Xanthomonas axonopodis pv
MDENKKRALSAALSQIEKQFGKGSVMRMGDRVIEAVEVIPTGSLMLDIALGIGGLPKGRVVEIYGPESSGKTTLTLQAIAECQKNGGTAAFIDAEHALDPIYAAKLGVNVDDLLLSQPDTGEQALEIADMLVRSGSVDIVVVDSVAALTPKAEIEGEMGDQLPGLQARLMSQALRKLTGNIKRSNTLVVFINQLRMKIGVMMPGQSPEVTTGGNALKFYASVRLDIRRIGAIKKGDEIIGNQTKIKVVKNKLAPPFKQVVTEILYGEGISREGELIDMGVEAKLVDKAGAWYSYGDERIGQGKDNARTYLRDNSQVATRLEAELREKFQPAEAPREAGDDEDKE

SEQ ID NO: 100497 - DNA, 2122 bp, Xenorhabdus bovienii
  CDS (589)..(1665): transl_table=11
cagcttagtattgaacttggaaagaaactccaacggaaaaaattatccttaacctgtgcagaatcctgcacagggggctggattgctaaagtgatcacagatattgcgggaagttcggcctattttaaccgcagtttcgtgacctatagcaatgattctaaaaatgaaatgctgggtgtatcacaggcatcactggtgcagtttggtgcggtgagtgaacaggtcgttaaagaaatggcagtaggggcattaaaggcggccagagcagattttgctgtttctgtcagtggcatcgcaggtccggatggtggcagtgaagaaaaaccgacgggaacggtctactttgggtttacctaccgtaatggtgaggatgtacataccgtgacatatcgccagcattttacgggtgatcgcaatgcagtacggctccaggctgtcattttttctttaaaaacactgctggaagaaatcataaaaaattagcttgatgctgtatgattatacagtataattaattccagcactttggtatcagaaacggtttatcagcagtggggcagccccttcattgcttacgaaggagtaaacatggctaacgatgaaaacaaacaaaaagcactagcagcggcgctgggtcaaattgaaaaacaatttggtaaaggttctatcatgcgtctgggcgaaaaccgctcaatggatgttgaaactatctctactggctcactgtcactggatatagcattaggtgcgggtggtttgccaatgggccgtattgttgaaatatacgggcctgaatcttcgggtaagacaacattgacactgcaagttattgcttctgcccagcgtgaaggcaaaacctgtgcttttattgatgccgaacatgcccttgatccggtttatgccaaaaagttgggcgtagatattgataacctgctgtgctcccagcctgatacaggtgaacaggcactggaaatctgtgatgccttgtcacgctctggggcggttgacgtcatcgttgttgactccgttgctgcattgaccccgaaagcggaaatcgaaggtgagatcggcgattcccatatgggcttggcagctcgtatgatgagtcaggccatgcgtaagttggcaggtaacctgaaaaactcgaatactctgctaatctttatcaaccagatccgtatgaaaattggtgtgatgtttggtaacccagaaaccacaacaggtggtaatgcactgaaattttatgcatctgtccgtttggacatccgccgcactggttccgtaaaaaatggcgatgaagttgttggcagcgagactcgtgtgaaagtagtcaagaacaaaattgcggcaccgttcaaacaagctgaattccagatcttgtatggtgaaggtattaacacctttggcgaattggtcgacttgggcgttaagcacaaaatggtcgaaaaagcaggtgcatggtacagctataacggagataaaattgggcagggtaaagctaatgccacgatttacctgaaagagcacccagaagtctctgctgagctggataaaaaactgcgtgaattgctgttgaataatacaggtggattcagtagtgcagtctctgattatgtagccgattatgaagataacggtgaagaagtgaaaaacgaagagttctaattactcgttcactctgttgtgacaaactgttttctgaagaaccacatcctgtcgggatgtggtttttgtttttataggagtaatcaacatcattgatacagggatactgaaactggcttgacaaacagactttcagaaaatgtccagacgaattacaatgctgaaaagcggatgaatttatatgggattttacttcttatggaagacattctatcttaaccctattttaatttattcgtgagttgaaatggtgatgcgctataccacctcaaccatacatgaatctgttttttcagcttgatttcgggacaattatgagcaaaagcaccgctgagatccgtcaggcgtttcttgacttttttcacactaaagggcaccagatagtaccaagcagttcactggtgccaaataatgatccaacctgttgttcactaatgcagggatgaaccagtttaaa

SEQ ID NO: 100498 - protein, 358 aa, Xenorhabdus bovienii
MANDENKQKALAAALGQIEKQFGKGSIMRLGENRSMDVETISTGSLSLDIALGAGGLPMGRIVEIYGPESSGKTTLTLQVIASAQREGKTCAFIDAEHALDPVYAKKLGVDIDNLLCSQPDTGEQALEICDALSRSGAVDVIVVDSVAALTPKAEIEGEIGDSHMGLAARMMSQAMRKLAGNLKNSNTLLIFINQIRMKIGVMFGNPETTTGGNALKFYASVRLDIRRTGSVKNGDEVVGSETRVKVVKNKIAAPFKQAEFQILYGEGINTFGELVDLGVKHKMVEKAGAWYSYNGDKIGQGKANATIYLKEHPEVSAELDKKLRELLLNNTGGFSSAVSDYVADYEDNGEEVKNEEF

SEQ ID NO: 100499 - DNA, 1594 bp, Xenorhabdus nematophilus
  CDS (142)..(1218): transl_table=11
tttaaaaattttgttggaagaaatcataaaaaattagcttgatgctgtatgattatacagtataatcatgcagcagctttggtatcagaaacagtttatcagcagtgaggcagccccttcattgcttgcgaaggagtaaacatggctaacgatgaaaacaaacaaaaagcactcgcagcagcgcttggacagattgagaaacaatttggtaaaggttccatcatgcgtttgggtgaaaaccgctcaatggatgttgaaactatctctactggttccctgtcattggatatcgcactaggcgcaggtggtttgccaatgggccgtattgttgagatatatgggcctgaatcttccggtaaaacaacgttaacattgcaagtgatcgctgctgcccagcgtgaaggcagaacgtgtgcttttattgatgccgaacatgcccttgatccagtttatgctaaaaaactgggcgtagatattgataacctgttgtgttcgcagcctgataccggtgaacaggcgttggaaatctgtgatgctttatcccgttccggcgcagtggatgtcattattgttgactccgttgcggcattgacaccaaaagcggaaattgaaggtgaaatcggtgattctcatatggggctggcagcgcgtatgatgagtcaggccatgcgtaagctggcaggtaacttgaaaaattcaaataccctgttgatcttcatcaaccagatccgtatgaaaattggtgtgatgtttggtaaccctgaaacaccgccgggtggtaatgcgctgaaattctatgcgtctgtccgtttggatatccgccgtacgggttccgtgaaaaatggtgatgaagttgttggtagcgaaacgcgtgtgaaagtcgttaaaaacaaagttgcagcaccattcaaacaggctgaattccaaattctttatggggaaggtattaatactctgggagagttgatcgatctgagtgttaaacacaaaatggtagaaaaagcaggtgcatggtatagctacaatggtgacaaaatcgggcagggtaaagccaacgccacgatttacctgaaagagcatccagaaactgctgctgagttgaataagaaactgcgtgatttgttgttgcacaatactggggatttcagtagcgcagcttcagattatgtgacagattacgaagacaacactgaagaagtgaataacgaagagttctaattgcttttcaatcactatctcgttttgaaaaccacatctatatcgggtgtggttttttgcttttaatgagggaataaacattcttgaaataagtatatcgaaacaggcttaatgaacagactttcagaaaatgcccagacgaattacaatgctgaaaagcgaatggatttatatgggattttacttcttacggaagacattctatcttaaccctattttaatttattcgtgagttgaaatgatgatgcgatatatcatcttaaacattcacaaatcttttttttcagcttgatttcgggacaattatgagcaaaagcaccgctgagatccgtcaagcgtttcttgacttttttcatactaaagggcaccaggtcgt

SEQ ID NO: 100500 - protein, 358 aa, Xenorhabdus nematophilus
MANDENKQKALAAALGQIEKQFGKGSIMRLGENRSMDVETISTGSLSLDIALGAGGLPMGRIVEIYGPESSGKTTLTLQVIAAAQREGRTCAFIDAEHALDPVYAKKLGVDIDNLLCSQPDTGEQALEICDALSRSGAVDVIIVDSVAALTPKAEIEGEIGDSHMGLAARMMSQAMRKLAGNLKNSNTLLIFINQIRMKIGVMFGNPETPPGGNALKFYASVRLDIRRTGSVKNGDEVVGSETRVKVVKNKVAAPFKQAEFQILYGEGINTLGELIDLSVKHKMVEKAGAWYSYNGDKIGQGKANATIYLKEHPETAAELNKKLRDLLLHNTGDFSSAASDYVTDYEDNTEEVNNEEF

SEQ ID NO: 100501 - DNA, 1044 bp, Xylella fastidiosa
  CDS (1)..(1044): transl_table=11
atggatgagaacaagaaacgcgccctttctgtcgctttaagccagattgaaaaacagttcggcaaggggtccgtgatgcggatgggcgatcgcgtgatcgaggccgtagaggcgatcccgacaggttcgctcatgttggatctggccctggggatcggtggtttgccaaagggacgtgtcgtggaaatctatgggccggaatcttctgggaagaccacattgactttgcaggcgatcgctcaatgccagaagaagggaggtacagcagcgttcattgatgctgagcatgccttggatccgatttatgcgggcaagttaggcgtcaatgttgatgatttgttgttgtctcagccagatactggggagcaggctctggaaatcgctgacatgctggtgcgctcggggtcgatcgatatcatggtcattgattcggttgcggcactcacgccaagggcggagattgagggtgagatgggagatcagttgcccggtcttcaggcgcgcttgatgagccaggcactgcgtaaattgaccggcaatatcaagcgctctaatacgctggtgatctttatcaaccagttgcgtatgaaaattggggtcatgatgccgggtcaaagccctgaaactacgacagggggtaatgcgctgaagttctatgcttcagtgcgtttggatattcgccgtattggcgcgatcaagaagggtgacgaaattatcgggaatcaaaccaaaatcaaggttgttaaaaacaagttggcgcctcccttcaaacaagtcgtgactgagattctctatggtgaaggcatcagtcgtgaaggggaattgattgagatgggcgtggaggccaagttggttgagaaagccggcgcttggtatagctacggtggtgagcggatcgggcaaggaaaagataatgcgcgcggctatctacgtgaaaacccgcatcttgcggccaagcttgaggctgatttgcgtgagaaatttgagccgaccgagctttctcgagaagagggcgatgaagatacgctcgaagatacaatgtaa

SEQ ID NO: 100502 - protein, 347 aa, Xylella fastidiosa
MDENKKRALSVALSQIEKQFGKGSVMRMGDRVIEAVEAIPTGSLMLDLALGIGGLPKGRVVEIYGPESSGKTTLTLQAIAQCQKKGGTAAFIDAEHALDPIYAGKLGVNVDDLLLSQPDTGEQALEIADMLVRSGSIDIMVIDSVAALTPRAEIEGEMGDQLPGLQARLMSQALRKLTGNIKRSNTLVIFINQLRMKIGVMMPGQSPETTTGGNALKFYASVRLDIRRIGAIKKGDEIIGNQTKIKVVKNKLAPPFKQVVTEILYGEGISREGELIEMGVEAKLVEKAGAWYSYGGERIGQGKDNARGYLRENPHLAAKLEADLREKFEPTELSREEGDEDTLEDTM

SEQ ID NO: 100503 - DNA, 1044 bp, Xylella fastidiosa
  CDS (1)..(1044): transl_table=11
atggatgagaacaagaaacgcgccctttctgtcgctttaagccagattgaaaaacagttcggcaaggggtccgtgatgcggatgggcgatcgcgtgatcgaagccgtagaggcgatcccgacaggttcgctcatgttggatctggccctggggataggtggtttgccaaagggacgtgtcgtggaaatctatgggccggaatcttctgggaagaccacattgactttgcaggcgatcgctcaatgccagaagaggggaggtacagcagcgttcattgatgctgagcatgccttggatccgatttatgcgggcaagttaggcgtcaatgttgatgatttgttgttgtctcagccagatactggggagcaggctctggaaatcgctgacatgctggtgcgctcggggtcgatcgatatcatggttattgattcggttgcggcactcacgccaagggcggagattgagggtgagatgggagatcagttgcccggtcttcaggcgcgattgatgagccaggcgctgcgtaaattgaccggcaatatcaagcgctctaatacgctggtgatttttatcaaccagttgcgtatgaaaattgggatcatgatgccgggtcaaagccctgaaactacgacagggggtaatgcgctgaagttctatgcttctgtgcgtttggatattcgccgtattggcgcgatcaagaaaggtgacgaaattatcgggaatcaaaccaaaatcaaggttgttaaaaacaagttggcgcctcccttcaaacaagtcgtgactgagattctctatggtgaaggcatcagtcgtgaaggggaattgattgaaatgggcgtggaggccaagttggttgagaaagccggcgcttggtatagctatggtggtgagcggatcgggcaaggaaaagataatgcgcgtggctatctacgcgaaaacccgcattttgcggccaagcttgaggctgatttgcgtgagaaatttgagccgaccgagctttctcgagaagagggcgatgaagatacgctcgaagatgcaatgtaa

SEQ ID NO: 100504 - protein, 347 aa, Xylella fastidiosa
MDENKKRALSVALSQIEKQFGKGSVMRMGDRVIEAVEAIPTGSLMLDLALGIGGLPKGRVVEIYGPESSGKTTLTLQAIAQCQKRGGTAAFIDAEHALDPIYAGKLGVNVDDLLLSQPDTGEQALEIADMLVRSGSIDIMVIDSVAALTPRAEIEGEMGDQLPGLQARLMSQALRKLTGNIKRSNTLVIFINQLRMKIGIMMPGQSPETTTGGNALKFYASVRLDIRRIGAIKKGDEIIGNQTKIKVVKNKLAPPFKQVVTEILYGEGISREGELIEMGVEAKLVEKAGAWYSYGGERIGQGKDNARGYLRENPHFAAKLEADLREKFEPTELSREEGDEDTLEDAM

SEQ ID NO: 100505 - DNA, 1071 bp, Yersinia pestis
  CDS (1)..(1071): transl_table=11
atggctattgatgagaataaacaaaaggcgttagcagcagcactgggccaaattgaaaaacaattcggtaaaggctctattatgcgccttggcgaagaccgctcaatggatgttgaaaccatctctaccggctccctttcccttgatattgcactgggggctggtggcttaccaatggggcgtatcgttgagatttatggcccagaatcatcaggtaagacgacactgacattacaggttatcgccgccgcacagcgtgaaggcaaaacgtgtgcatttatcgatgccgaacatgcccttgacccaatctatgccaagaaattgggtgtagatattgataacctattgtgttctcagccagatactggcgagcaggcactggaaatttgtgatgcgctgactcgctctggtgcggttgacgttatcatcgttgactccgtagcggcattgacaccaaaagctgaaattgaaggtgaaattggcgattctcatatgggccttgccgcgcgtatgatgagccaggctatgcgtaagctggcgggtaacctgaagaatgcgaataccttactgatttttatcaaccaaatccgcatgaaaattggcgtgatgtttggtaacccagaaaccactaccggtggcaacgctcttaaattttacgcttctgtacgtttggatatccgccgtattggtgcagtaaaagatggtgatgtggtcgtggggagtgaaacccgcgttaaagtcgttaaaaacaagattgctgcgccattcaaacaagctgaattccagatcctctacggtgaaggcattaatatcaacggtgaactggttgacttaggtgttaaacacaaactgattgagaaagctggcgcatggtatagctataacggtgataaaattggtcagggtaaagccaatgccagcaactatttaaaagaaaacccagccattgctgctgagttagataaaaaactgcgtgaaatgctacttaatggcggcaatggtgaacaacctgttgctgcggcaacagcagaattcgccgatggtgcagatgaaaccaacgaagaattttaa

SEQ ID NO: 100506 - protein, 356 aa, Yersinia pestis
MAIDENKQKALAAALGQIEKQFGKGSIMRLGEDRSMDVETISTGSLSLDIALGAGGLPMGRIVEIYGPESSGKTTLTLQVIAAAQREGKTCAFIDAEHALDPIYAKKLGVDIDNLLCSQPDTGEQALEICDALTRSGAVDVIIVDSVAALTPKAEIEGEIGDSHMGLAARMMSQAMRKLAGNLKNANTLLIFINQIRMKIGVMFGNPETTTGGNALKFYASVRLDIRRIGAVKDGDVVVGSETRVKVVKNKIAAPFKQAEFQILYGEGININGELVDLGVKHKLIEKAGAWYSYNGDKIGQGKANASNYLKENPAIAAELDKKLREMLLNGGNGEQPVAAATAEFADGADETNEEF

SEQ ID NO: 100507 - DNA, 1071 bp, Yersinia pseudotuberculosis
  CDS (1)..(1071): transl_table=11
atggctattgatgagaataaacaaaaggcgttagcagcagcactgggccaaattgaaaaacaattcggtaaaggctctattatgcgccttggcgaagaccgctcaatggatgttgaaaccatctctaccggttccctttcccttgatattgcactgggggctggtggcttaccaatggggcgtatcgttgagatttatggcccagaatcatcaggtaagacgacactgacattacaggttatcgccgccgcacagcgtgaaggcaaaacgtgtgcatttatcgatgccgaacatgcccttgacccaatctatgccaagaaattgggtgtagatattgataacctactgtgttctcagccagatactggcgagcaggcactggaaatttgtgatgcgctgactcgctctggtgcggttgacgttatcatcgttgactccgtagcggcattgacaccaaaagctgaaattgaaggtgaaattggcgattctcatatgggccttgccgcgcgtatgatgagccaggctatgcgtaagctggcgggtaacctgaagaatgcgaataccttactgatttttatcaaccaaatccgcatgaaaattggcgtgatgtttggtaacccagaaaccactaccggtggcaacgctcttaaattttacgcttctgtacgtttggatatccgccgtattggtgcagtaaaagatggtgatgtggtcgtggggagtgaaacccgcgttaaagtcgttaaaaacaagattgccgcgccattcaaacaagctgaattccagatcctctacggtgaaggcattaacatcaacggtgaactggttgacttaggtgttaaacacaaactgattgagaaagctggcgcatggtatagctataacggtgataaaattggtcagggtaaagccaatgccagcaactatttaaaagaaaacccagccattgctgctgagttagataaaaaactgcgtgaaatgctacttaatggcggcaatggtgaacaacctgttgctgcggcaacagcagaattcgccgatggtgtagatgaaaccaacgaagaattttaa

SEQ ID NO: 100508 - protein, 356 aa, Yersinia pseudotuberculosis
MAIDENKQKALAAALGQIEKQFGKGSIMRLGEDRSMDVETISTGSLSLDIALGAGGLPMGRIVEIYGPESSGKTTLTLQVIAAAQREGKTCAFIDAEHALDPIYAKKLGVDIDNLLCSQPDTGEQALEICDALTRSGAVDVIIVDSVAALTPKAEIEGEIGDSHMGLAARMMSQAMRKLAGNLKNANTLLIFINQIRMKIGVMFGNPETTTGGNALKFYASVRLDIRRIGAVKDGDVVVGSETRVKVVKNKIAAPFKQAEFQILYGEGININGELVDLGVKHKLIEKAGAWYSYNGDKIGQGKANASNYLKENPAIAAELDKKLREMLLNGGNGEQPVAAATAEFADGVDETNEEF

SEQ ID NO: 100509 - DNA, 1020 bp, Zymomonas mobilis
  CDS (1)..(1020): transl_table=11
atggacaagcaaaaagcccttgaagcggctttagctcagattgaccgcgcttttggtaaaggttcggttatgcgcttggggtctcgtgaaaaaatcgagattgatacaatttccagcggatcacttggccttgatattgcgctgggcattggcggcttgccccgtggccgtatcgtcgaaatctatggtcctgaaagctcgggtaaaacaactttagccctccatgctatcgccgaagcacaaaaagcaggtggaacagcggcctttgtcgatgctgaacatgcgcttgatccggtctatgccaaaaaactgggtgttaatacggatgatctaatcgtctctcagcctgatacgggtgagcaggctctggaaattacagataccctgatccgttctaacgctgttgatatattggttgtcgattctgttgcggccttaacgcctcgtgctgaaatcgaaggcgaaatgggcgatagtcacgttggtttgcaagcccgtttgatgagtcaggcgcttcgcaaaattaccggctcaatcaaccgctctcaaactttggttatttttattaaccaagtccggatgaaaatcggggttatgtatggcaaccctgaaacaacaacgggcggtaatgctttgaaattctatgccagcgttcggcttgatatccgtcgtgtaggacaaattaaagatcgcgatgaaatcgttggtaatgctacccgtgtcaaagtggtaaaaaacaagctggctccgcctttcaagcaggttgaattcgatatcatgtatggagaaggtgtctccaagatgggcgaaattctcgatctgggcgtaaaagccggtattatcgacaagtcaggctcatggttcagtcatgattccgttcgcatcggtcagggacgtgaaaatgccaaaacgttcttgcgtgaacatcctgaaatgactgaaaaaattgaaaaaatgattcgtcataatacggctgaaattgccgacgaaatgctggatccatctatccctgaagattag

SEQ ID NO: 100510 - protein, 339 aa, Zymomonas mobilis
MDKQKALEAALAQIDRAFGKGSVMRLGSREKIEIDTISSGSLGLDIALGIGGLPRGRIVEIYGPESSGKTTLALHAIAEAQKAGGTAAFVDAEHALDPVYAKKLGVNTDDLIVSQPDTGEQALEITDTLIRSNAVDILVVDSVAALTPRAEIEGEMGDSHVGLQARLMSQALRKITGSINRSQTLVIFINQVRMKIGVMYGNPETTTGGNALKFYASVRLDIRRVGQIKDRDEIVGNATRVKVVKNKLAPPFKQVEFDIMYGEGVSKMGEILDLGVKAGIIDKSGSWFSHDSVRIGQGRENAKTFLREHPEMTEKIEKMIRHNTAEIADEMLDPSIPED

SEQ ID NO: 100511 - DNA, 1293 bp, Zea mays
  CDS (1)..(1293)
atggcgatcctccttaggcgcgcgtcgctgcggcgcgtcatcgccttcgccgccgcctcctcctcctcctcttctttgcactctgagatttataagcaaggggtttgtggatccatgtttcattgccgagagttcgcatcaaaagccaaaaaaaagaagtcaagtggaacagactccgatgaggagagtatgtcaaagaaagacttggctttacaccaggctatcgatcaaataacgtctgcatttgggaagggggcaataatgtggcttgggcgttcgcaaggccttagagatgtacctgttgtgtctactgggtctttcgctttggatatggctctaggaactggtggtcttccaaaggggcgtgtcatagaggtctatggtccagaggcttcaggcaagacaacacttgctctacatgtcattgcagaagcacaaaagaatgggggttactgtgcctttgtagatgcagaacacgctttggatccagctcttgcagagtcaattggtgttgacactaacaatttgctcgtctctcagccagactgcgctgagcaagcactcagtcttgtggacacactgattcgaagtggatctgttgatgttgttgtagtagacagtgtagctgcgcttgttccaaagactgagcttgatggtgagatgggtgatgcacatgttgctcttcaggctaggttgatgagccaagctcttcgcaagcttagccactcactttcactttcgcagacagttttgttatttattaatcagatcagggccaaggtagccacatttggatttggaggaccaactgaggtcacttctggtggtaacgccttgaagttttatgcttctgttcgcttgaacatcaggcgtattggttttttaaaggaaggtgaagagacaataggtagtcaggttgctgtgaagattgtaaaaaataagcatgccccacccttcaagactgcacagtttgagcttgaatttggaaaggggatatgccgcagttctgagctttttgaacttgggttgaagcacaagcttatccaaaagactggcggtgcatattatagattcaatgatatgagtttcaaaggtaaaaataaccttaaatcttaccttactgaaaacaagagtgttgcaaatgatctggagacgaaactaaggagattgatgggaaccgaagcacctaaagagcaggaggcagaagacagttcgccgagtgatttgcctgaagaggttgtcacacctgaagcatcctcagaagaggatatgggagtcgtaatcgaggcttga

SEQ ID NO: 100512 - protein, 430 aa, Zea mays
MAILLRRASLRRVIAFAAASSSSSSLHSEIYKQGVCGSMFHCREFASKAKKKKSSGTDSDEESMSKKDLALHQAIDQITSAFGKGAIMWLGRSQGLRDVPVVSTGSFALDMALGTGGLPKGRVIEVYGPEASGKTTLALHVIAEAQKNGGYCAFVDAEHALDPALAESIGVDTNNLLVSQPDCAEQALSLVDTLIRSGSVDVVVVDSVAALVPKTELDGEMGDAHVALQARLMSQALRKLSHSLSLSQTVLLFINQIRAKVATFGFGGPTEVTSGGNALKFYASVRLNIRRIGFLKEGEETIGSQVAVKIVKNKHAPPFKTAQFELEFGKGICRSSELFELGLKHKLIQKTGGAYYRFNDMSFKGKNNLKSYLTENKSVANDLETKLRRLMGTEAPKEQEAEDSSPSDLPEEVVTPEASSEEDMGVVIEA

SEQ ID NO: 100513 - DNA, 1077 bp, Zea mays
  CDS (1)..(1077)
atgttactcaggaatctgtacaaatttccagttgatatgcagttagactatgagagtgatccccctcttgacgatacaaaagctattgagaaggagtcatcacttaatgttgctgtttctcaactcgcaattgacttcgatagagactctaatttatgtttggagcgattttcccgtgcaaggaaagcatctgtagtctctactggttctcttaagcttgacctcgctctcggcgttggaggattaccgaagggtagaatggtggagatatatgggaaagaagcatctgggaagacaacactcgcgcttcatgttattaaggaagctcaaaagaatggaggttattgtgcttatattgatgcagaaaatgccttcaacccttcatttgctgaatctattggcgtagacagtgaaaggctcttgatagcccaacctgattctgctgaaaattctctaagcattgtaaacactcttgttggtggttctgttgctgttgttgttgtggacagtgtggcagcacttattcccaaatgtgaaattgaaggtgaaatatacacaaattgtggagacatccaatcccatttgatgactcgggcccttagaaaaattcagtacactttatgtcgatctgaaacacttattatttttgtgaatcaggttagaacaaagcggacatcaagtaatcctgggatctacaaggaggtgccttgcggtggtaatgcactaggattctatgctgcagtcagaatgaggacttcaaggagagaactgcgctatagtgaagatgaggctaccggcgtaggtatatcagtgcagatcatcaagaacaaattggctccagcgaacctgaagaaggaagccggcatcgacatcacattcggtaaggggatctgccacgagtcggagatcctggagacggcttcctccgtcggagtgatcctgaaagacgggtgtgggtattggatcaacaacgagttcctggcaggcaaggtggaagcggagaagttcctgcgtgaaaacgctgcagtggcagatgagatctgcaataccgtgaggaacgagttcttgcaaaggtga

SEQ ID NO: 100514 - protein, 358 aa, Zea mays
MLLRNLYKFPVDMQLDYESDPPLDDTKAIEKESSLNVAVSQLAIDFDRDSNLCLERFSRARKASVVSTGSLKLDLALGVGGLPKGRMVEIYGKEASGKTTLALHVIKEAQKNGGYCAYIDAENAFNPSFAESIGVDSERLLIAQPDSAENSLSIVNTLVGGSVAVVVVDSVAALIPKCEIEGEIYTNCGDIQSHLMTRALRKIQYTLCRSETLIIFVNQVRTKRTSSNPGIYKEVPCGGNALGFYAAVRMRTSRRELRYSEDEATGVGISVQIIKNKLAPANLKKEAGIDITFGKGICHESEILETASSVGVILKDGCGYWINNEFLAGKVEAEKFLRENAAVADEICNTVRNEFLQR

SEQ ID NO: 100515 - DNA, 1173 bp, Brassica napus
  CDS (1)..(1173)
atgggtcgtctctcactaaccagttcgattcacagattccgcttcttctcctacttatctcagcataatgtaagaagaggtgttctcgcttgctctagctatggaagtcattatctttcgtctttagctgaagcttcagactgtgagcttgacgaatatccagaagatgataccaacataacggagaaagacactaatctccgttcagcattatcacagctctcagtgtcaggcgtcttcgatcaagactctaagctctggctgcagcgcttctccagaacaaggagagtctctgttatatccaccggctcactcaaccttgatctagctctaggcgttggaggcttgccaaagggaagaatggttgaggtttacggcaaagaagcttctggaaagacaactctagctctccacatcatcaaggaagctcagaagctcggaggctattgcgcttaccttgacgtggagaacgccatggatcctacgctagctgagtcgataggtgtgaacacggaggagcttctgatatcgagacctgattccgctgaaaacatgctgagtattgtcgatgtgttgaccaagtgtggatcggtagatgttattgtggttgatagtgttgctgctcttgtccctcaatgtgaagttggtgctcctctaggagaaagttacagagacagacaatcagtgataatgacgcaggcgcttaggaaaatacactactcggttgctaattctcggacgctcattgtttttcttaatcaggtcagatcacatgccaaagctaacatgcgtttcccacattctgaagaagtgacttgtgggggaaacgcattgcggtttcaggcagctatacgactcaaaatgataagaacagggctgattaagactgatagtgaggtaagtggtctgaatgtgtgcgtggaagtggtgaaaaacaaactgacgccagggaagaagaaatctgaattggggattcacttcggtcgtggcttctacgtggagcgtgaggtgttagaattggcttgtgagcatggagttattgcaagagaaggtaatagccatttgattgaaggcgaggttgttgatggcaaagacgcagctgaaaagtatctgacggagaataagaaggtccttgataccgtcatcaatatcctgaggaagcagctcttctag

SEQ ID NO: 100516 - protein, 390 aa, Brassica napus
MGRLSLTSSIHRFRFFSYLSQHNVRRGVLACSSYGSHYLSSLAEASDCELDEYPEDDTNITEKDTNLRSALSQLSVSGVFDQDSKLWLQRFSRTRRVSVISTGSLNLDLALGVGGLPKGRMVEVYGKEASGKTTLALHIIKEAQKLGGYCAYLDVENAMDPTLAESIGVNTEELLISRPDSAENMLSIVDVLTKCGSVDVIVVDSVAALVPQCEVGAPLGESYRDRQSVIMTQALRKIHYSVANSRTLIVFLNQVRSHAKANMRFPHSEEVTCGGNALRFQAAIRLKMIRTGLIKTDSEVSGLNVCVEVVKNKLTPGKKKSELGIHFGRGFYVEREVLELACEHGVIAREGNSHLIEGEVVDGKDAAEKYLTENKKVLDTVINILRKQLF

SEQ ID NO: 100517 - DNA, 1278 bp, Zea mays
  CDS (1)..(1278)
atgacgaccctcctcaggcgcgcgtcgctgcggcgcgtcattgccgccgccgccgcctcttctttgcaccctgagagctataagcaagggatctgtggatccacatttcattgccgagagttcgcatcaaaagcaaaaaagaagtcaagtggaacagactctggggaggagaacatgtcaaagaaagacttggctttacaccaggctattgatcagataacgtctgcatttgggaagggggcaataatgtggcttgggcgttcacaaggccatagagatgtaccagtcgtgtctactgggtctttcgctttggatatggctctaggaactggtggtcttccaaaggggcgtgtcatagaggtctatggtccagaggcttcaggcaagacaacacttgctctacatgtcattgcagaagcacaaaagaatgggggttactgtgcctttgtagatgcagaacacgctttggatccagctcttgcagagtcaattggtgttgacactaacaatttgctcgtctctcagccagactgcgctgagcaagcactcagtcttgtggacacactgattcgaagtggatctgttgatgttgttgtagtagacagtgtagctgcgcttgttccaaagactgagcttgatggtgagatgggtgatgcacatgttgctcttcaggctaggttgatgagccaagcccttcgcaagcttagccactcactttcactttcgcaaacaattttgttatttattaatcagatcagggccaaggtagccacatttggatttggaggaccaactgaggttacttctggtggcaacgccttgaagttttatgcgtctgttcgcttgaacatcaggcgtattggtttggtaaagaaaggcgaagagacaataggtagtcagattgctgtgaagattgtaaaaaacaagcatgccccacccttcaagactgcacagtttgagcttgaatttggaaaggggatatgccgcagttctgagctttttgaacttggattgaagcacaagcttatccgaaagagtggtggttcatattatagtttcaatggtaaggctttcaatggtaaaagtaaccttaaatcttaccttactgaaaacaagagcgttgcaaatgatctggagatggaactaaagagattgatgggaactgatgcgtctaaagagcaggaggcaggagacagttcgcagagtgatttgcctgaagagagtgtcacacctgaagcatcgtcagaagaggatctgggagccataattgaaggttag

SEQ ID NO: 100518 - protein, 425 aa, Zea mays
MTTLLRRASLRRVIAAAAASSLHPESYKQGICGSTFHCREFASKAKKKSSGTDSGEENMSKKDLALHQAIDQITSAFGKGAIMWLGRSQGHRDVPVVSTGSFALDMALGTGGLPKGRVIEVYGPEASGKTTLALHVIAEAQKNGGYCAFVDAEHALDPALAESIGVDTNNLLVSQPDCAEQALSLVDTLIRSGSVDVVVVDSVAALVPKTELDGEMGDAHVALQARLMSQALRKLSHSLSLSQTILLFINQIRAKVATFGFGGPTEVTSGGNALKFYASVRLNIRRIGLVKKGEETIGSQIAVKIVKNKHAPPFKTAQFELEFGKGICRSSELFELGLKHKLIRKSGGSYYSFNGKAFNGKSNLKSYLTENKSVANDLEMELKRLMGTDASKEQEAGDSSQSDLPEESVTPEASSEEDLGAIIEG

SEQ ID NO: 100519 - DNA, 1299 bp, Glycine max
  CDS (1)..(1299)
atggcgagtctgcttcggaacgctaacacatccctcctcaaacgttctctcttccactccgaccttctaacgcgcttttgctttaaaccgggagtgttgggcacgtctcaagttttaagcttttcaactcgtaaaaggaggtctaaatcagatggaagtgactcaggtgaagagaacatgtctaagaaagatatggcattacaacaagctattgatcaaatcacatctgcatatggaaagggatctatcatgtggcttggtcgttccatggcaccaaaaaatgtacctgtggtgtctactggttcttttgctctggatatagcacttggggttggaggtcttccaaaggggcgtgttgtggaaatatttggtccagaggcttctgggaaaacaactcttgctttgcatatgattgcggaagcacaaaagctaggaggctactgtgcctttgttgatgctgagcatgcacttgataagacacttgcagagtcaattggtgtagatactaagaacttgcttctctcacaacccgattgtggtgaacaagcacttagccttgtggataccttaatccggagtggttcagttgatgcaattgttgttgatagtgtagctgctcttgttcctaaaggcgagcttgatggggagatgggtgatgctcacatggcaatgcaggctaggttgatgagccaggctcttcggaaattgtgccactccttgtcactttcacagtgtatattagtttttataaaccaggtgaggtcaaaaaattctacttttgggggatatggtgggcccactgaagttacttgtggtggtaatgcactgaagttttatgcttctgtgcggctaaatatcaaaagaattgggtttgtcaagaagggtgaagagactttaggaagtcaggttcttgtcaaggttgtgaagaacaagcatgcccctccatttaaaactgcacagtttgagattgagttcggcaagggtataagtagagaagcggagatcatagagttgagcgtaaaatacaaaatcataaagaagagtggttcattttttgaatataatggccggaatttccatggcaaggatgctctaaagagattcctggcggagagtgatggagtacaagaattagcaacaatgctcagggagaagattcttgatgctgagccagaactggagccagaggagcaggagatgatgggagatgttatggaactaatggaagaaatggtatcgcttgattccactgatgaagcagcttctcgtgctcctgcccctgttgctgcagaagcttaa

SEQ ID NO: 100520 - protein, 432 aa, Glycine max
MASLLRNANTSLLKRSLFHSDLLTRFCFKPGVLGTSQVLSFSTRKRRSKSDGSDSGEENMSKKDMALQQAIDQITSAYGKGSIMWLGRSMAPKNVPVVSTGSFALDIALGVGGLPKGRVVEIFGPEASGKTTLALHMIAEAQKLGGYCAFVDAEHALDKTLAESIGVDTKNLLLSQPDCGEQALSLVDTLIRSGSVDAIVVDSVAALVPKGELDGEMGDAHMAMQARLMSQALRKLCHSLSLSQCILVFINQVRSKNSTFGGYGGPTEVTCGGNALKFYASVRLNIKRIGFVKKGEETLGSQVLVKVVKNKHAPPFKTAQFEIEFGKGISREAEIIELSVKYKIIKKSGSFFEYNGRNFHGKDALKRFLAESDGVQELATMLREKILDAEPELEPEEQEMMGDVMELMEEMVSLDSTDEAASRAPAPVAAEA

SEQ ID NO: 100521 - DNA, 1308 bp, Triticum aestivum
  CDS (1)..(1308)
atggcgaccctcctgaggcgcgcgtcgctgcggcgggccatcgcctccgccgcctcggccgccaccgcctccgcctcctgccccgagagctataggcaggtgatctgtggctctacctttcattgccgagatttcgcatctaaagccaaaaagaagtcaaagtcaagtggcaccgactccggtgaggagaatatgtcaaagaaagacttggctttacatcaggccatcgatcaaataacaacttcgtttgggaaaggagcaataatgtggcttggccgctctgaaggtcatagagaagtacctgttgtgtctaccggatctttctctttggatctggcactgggaattggtgggcttccaaagggacgtgttgtagaggtttacggcccagaggcttcaggaaagacaactcttgctcttcacgttattgcagaagcacaaaagcttagcggcggtggttattgtgcatttgtagatgcagagcatgctttggatccaactctggcagagtcgattggtgtcgacactagtaacttacttctctctcagccagactctgctgagcaggcactcagtcttgtagacacgctgattcgaagtggctctgttgatgttgttgttgttgacagtgtagcagctcttgtccccaagaccgagcttgatggagagatgggtgatgcacatgtggctctccaagccagactgatgagtcaagctcttcgcaagctgagccattctctttcactatcccagacagttttgctatttattaatcagatcaggtctaaggtacagacatttgggggaggattaggagggccacaagaggtcacttccggtggaaatgcccttaaattttatgcctcggtccgcctgaacatcaggcgaattggtatggtaaagaaaggtgaagagattataggaagtcaggttactgtgaagattgtgaaaaacaagcatgccccaccgttcaggactgcacagtttgagctggaatttggaaaaggaatatgccgcagctcagagcttttcgatcttggggtaaagcacaagcttgttaagaagaccgggggcgcgtactactctttcaacgaacagcagttccatggtaaagatgccgttaaagctttccttacaaaaaatgagagtgttgcgaaagaactggagatggagctaaggagattgatccaaactgaaccgcctagaaagccggaggctgaggacgatctgctggacgattcgcctgaagagattgtcagacctgaaacgtcatcggaagaggatatggccgctataatcagggcttaa

SEQ ID NO: 100522 - protein, 435 aa, Triticum aestivum
MATLLRRASLRRAIASAASAATASASCPESYRQVICGSTFHCRDFASKAKKKSKSSGTDSGEENMSKKDLALHQAIDQITTSFGKGAIMWLGRSEGHREVPVVSTGSFSLDLALGIGGLPKGRVVEVYGPEASGKTTLALHVIAEAQKLSGGGYCAFVDAEHALDPTLAESIGVDTSNLLLSQPDSAEQALSLVDTLIRSGSVDVVVVDSVAALVPKTELDGEMGDAHVALQARLMSQALRKLSHSLSLSQTVLLFINQIRSKVQTFGGGLGGPQEVTSGGNALKFYASVRLNIRRIGMVKKGEEIIGSQVTVKIVKNKHAPPFRTAQFELEFGKGICRSSELFDLGVKHKLVKKTGGAYYSFNEQQFHGKDAVKAFLTKNESVAKELEMELRRLIQTEPPRKPEAEDDLLDDSPEEIVRPETSSEEDMAAIIRA

SEQ ID NO: 100523 - DNA, 1293 bp, Zea mays
  CDS (1)..(1293)
atggcgatcctccttaggcgcgcgtcgctgcggcgcgtcatcgccttcgccgccgcctcctcctcctcctcttctttgcactctgagatttataagcaaggggtttgtggatccatgtttcattgccgagagttcgcatcaaaagccaaaaaaaagaagtcaagtggaacagactccgatgaggagagtatgtcaaagaaagacttggctttacaccaggctatccatcaaataacgtctgcatttgggaagggggcaataatgtggcttgggcgttcgcaaggccttagagatgtacctgttgtgtctactgggtctttcgctttggatatggctctaggaactggtggtcttccaaaggggcgtgtcatagaggtctatggtccagaggcttcaggcaagacaacacttgctctacatgtcattgcagaagcacaaaagaatgggggttactgtgcctttgtagatgcagaacacgctttggatccagctctcgcagagtcaattggtgttgacactaacaatttactcctctctcagccagactgcgctgagcaagcactcagtcttgtggacacactgattcgaagtggatctgttgatgttgttgtagtagacagtgtagctgcgcttgttccaaagactgagcttgatggtgagatgggtgatgcacatattgctcttcaggctaggttgatgagccaagcccttcgcaagcttagccactcactttcactttcacaaacaattttgttatttattaatcagatcagggccaaggtagccacatttggatttggaggaccaactgaggtcacttctggtggtaacgccttgaagttttatgcttctgttcgcttgaacatcaggcgtattggttttttaaaggaaggtgaagagacaataggtagtcaggttgctgtgaagattgtaaaaaataagcatgccccacccttcaagactgcacagtttgagcttgaatttggaaaggggatatgccgcagttctgagctttttgaacttgggttgaagcacaagcttatccaaaagactggcggtgcatattatagattcaatgatatgagtttcaaaggtaaaaataaccttaaatcttaccttactgaaaacaagagtgttgcaaatgatctggagacgaaactaaggagattgatgggaaccgaagcacctaaagagcaggaggcagaagacagttcgccgagtgatttgcctgaagaggttgtcacacctgaagcatcctcagaagaggatatgggagtcgtaatcgaggcttga

SEQ ID NO: 100524 - protein, 430 aa, Zea mays
MAILLRRASLRRVIAFAAASSSSSSLHSEIYKQGVCGSMFHCREFASKAKKKKSSGTDSDEESMSKKDLALHQAIHQITSAFGKGAIMWLGRSQGLRDVPVVSTGSFALDMALGTGGLPKGRVIEVYGPEASGKTTLALHVIAEAQKNGGYCAFVDAEHALDPALAESIGVDTNNLLLSQPDCAEQALSLVDTLIRSGSVDVVVVDSVAALVPKTELDGEMGDAHIALQARLMSQALRKLSHSLSLSQTILLFINQIRAKVATFGFGGPTEVTSGGNALKFYASVRLNIRRIGFLKEGEETIGSQVAVKIVKNKHAPPFKTAQFELEFGKGICRSSELFELGLKHKLIQKTGGAYYRFNDMSFKGKNNLKSYLTENKSVANDLETKLRRLMGTEAPKEQEAEDSSPSDLPEEVVTPEASSEEDMGVVIEA

SEQ ID NO: 100525 - DNA, 1278 bp, Zea mays
  CDS (1)..(1278)
atgacgaccctcctcaggcgcgcgtcgctgcggcgcgtcattgccgccgccgccgcctcttcttttcaccctgagagctataagcaagggatctgtggctccacatttcattgccgagagttcgcatcaaaagcaaaaaagaagtcaagtggaacagactctggggaggagaacatgtcaaagaaagacttggctttacaccaggctattgatcagataacgtctgcatttgggaagggggcaataatgtggcttgggcgttcacaaggccatagagatgtaccagtcgtgtctactgggtctttggatttggatatggctctaggaactggtggtcttccaaaggggcgtgttgtagaggtatatggtccagaggcttcaggcaagacaacgcttgctctacatgtcattgcagaagcacaaaagaatggaggttactgtgcctttgtagatgcagagcacgctttggatccagctctcgccgagtcaattggtgttgacactaacaatttactcctttctcagcccgattgtgctgagcaggcactcagtcttgtggacacactgattcgaagtggatctgttgatgttgttgtagtagacagtgttgctgcgcttgttccaaagactgagcttgatggtgagatgggtgatgcacatattgctcttcaggctaggttgatgagtcaagcccttcgcaagcttagccactccctttcactttcacaaacaattttgttatttattaatcagatcagggccaaggtagccacatttggatttggaggaccaactgaggttacttctggtggcaacgccttgaagttttatgcatctgttcgcttgaacatcaggcgtattggtttggtaaagaaaggcgaagagacaataggtagtcagattgctgtgaagattgtaaaaaacaagcatgccccacccttcaagactgcacagtttgagcttgaatttggaaaggggatatgccgcagttctgagctttttgaacttggattgaagcacaagcttatccgaaagagtggtggttcgtattatagtttcaatggtaaggctttcaatggtaaaagtaaccttaaatcttaccttactgaaaacaagagtgttgccaatgatctggagatggaactaaagagattgatgggaactgatgcgtctaaagagcaggaggcaggagacagttcgcagagtgattttcctgaagagagtgtcacacctgaagcatcgtcagaagaggatctgggagccataattgaaggttag

SEQ ID NO: 100526 - protein, 425 aa, Zea mays
MTTLLRRASLRRVIAAAAASSFHPESYKQGICGSTFHCREFASKAKKKSSGTDSGEENMSKKDLALHQAIDQITSAFGKGAIMWLGRSQGHRDVPVVSTGSLDLDMALGTGGLPKGRVVEVYGPEASGKTTLALHVIAEAQKNGGYCAFVDAEHALDPALAESIGVDTNNLLLSQPDCAEQALSLVDTLIRSGSVDVVVVDSVAALVPKTELDGEMGDAHIALQARLMSQALRKLSHSLSLSQTILLFINQIRAKVATFGFGGPTEVTSGGNALKFYASVRLNIRRIGLVKKGEETIGSQIAVKIVKNKHAPPFKTAQFELEFGKGICRSSELFELGLKHKLIRKSGGSYYSFNGKAFNGKSNLKSYLTENKSVANDLEMELKRLMGTDASKEQEAGDSSQSDFPEESVTPEASSEEDLGAIIEG

SEQ ID NO: 100527 - DNA, 1230 bp, Zea mays
  CDS (1)..(1230)
atgcgagggatcctctcctcttcctccgctctcctccggcgagccggcgcccagctctcgcgcacggactgcagtagcccctcagcgtccgcgacctctcctctccgccgctcccctcttcagaatgggaaaagagacacattttgttcgctttggttcaaaggtcgttcggtatcaaccacagttgatatgcagttagactatgagagtgatccccctcttgacgatacaaaagctattgagaaggagtcatcacttaatgttgctgtttctcaactcgcaattgacttcgatagagactctaatttatgtttggagcgattttcccgtgcaaggaaagcatctgtagtctctactggttctcttaagcttgacctcgctctcggcgttggaggattaccgaagggtagaatggtggagatatatgggaaagaagcatctgggaagacaacactcgcgcttcatgttattaaggaagctcaaaagaatggaggttattgtgcttatattgatgcagaaaatgccttcaacccttcatttgctgaatctattggcgtagacagtgaaaggctcttgatagcccaacctgattctgctgaaaattctctaagcattgtaaacactcttgttggtggttctgttgctgttgttgttgtggacagtgtggcagcacttattcccaaatgtgaaattgaaggtgaaatatacacaaattgtggagacatccaatcccatttgatgactcgggcccttagaaaaattcagtacactttatgtcgatctgaaacacttattatttttgtgaatcaggttagaacaaagcggacatcaagtaatcctgggatctacaaggaggtgccttgcggtggtaatgcactaggattctatgctgcagtcagaatgaggacttcaaggagagaactgcgctatagtgaagatgaggctaccggcgtaggtatatcagtgcagatcatcaagaacaaattggctccagcgaacctgaagaaggaagccggcatcgacatcacattcggtaaggggatctgccacgagtcggagatcctggagacggcttcctccgtcggagtgatcctgaaagacgggtgtgggtattggatcaacaacgagttcctggcaggcaaggtggaagcggagaagttcctgcgtgaaaacgctgcagtggcagatgagatctgcaataccgtgaggaacgagttcttgcaaaggtga

SEQ ID NO: 100528 - protein, 409 aa, Zea mays
MRGILSSSSALLRRAGAQLSRTDCSSPSASATSPLRRSPLQNGKRDTFCSLWFKGRSVSTTVDMQLDYESDPPLDDTKAIEKESSLNVAVSQLAIDFDRDSNLCLERFSRARKASVVSTGSLKLDLALGVGGLPKGRMVEIYGKEASGKTTLALHVIKEAQKNGGYCAYIDAENAFNPSFAESIGVDSERLLIAQPDSAENSLSIVNTLVGGSVAVVVVDSVAALIPKCEIEGEIYTNCGDIQSHLMTRALRKIQYTLCRSETLIIFVNQVRTKRTSSNPGIYKEVPCGGNALGFYAAVRMRTSRRELRYSEDEATGVGISVQIIKNKLAPANLKKEAGIDITFGKGICHESEILETASSVGVILKDGCGYWINNEFLAGKVEAEKFLRENAAVADEICNTVRNEFLQR

SEQ ID NO: 100529 - DNA, 24 bp, Artificial sequence
  primer
atggctatcgacgaaaacaaacag

SEQ ID NO: 100530 - DNA, 27 bp, Artificial sequence
  primer
ttaaaaatcttcgttagtttctgctac

SEQ ID NO: 100531 - protein, 318 aa, Artificial sequence
  consensus sequence
  Variant (3)..(4): Xaa in position 3 to 4 is any amino acid
  Variant (6)..(7): Xaa in position 6 to 7 is any amino acid
  Variant (10)..(12): Xaa in position 10 to 12 is any amino acid
  Variant (13)..(14): Xaa in position 13 to 14 is any or no amino acid
  Variant (19)..(20): Xaa in position 19 to 20 is any amino acid
  Variant (22)..(23): Xaa in position 22 to 23 is any amino acid
  Variant (25)..(34): Xaa in position 25 to 34 is any amino acid
  Variant (35)..(37): Xaa in position 35 to 37 is any or no amino acid
  Variant (41)..(42): Xaa in position 41 to 42 is any amino acid
  Variant (45)..(45): Xaa in position 45 is any amino acid
  Variant (49)..(49): Xaa in position 49 is any amino acid
  Variant (54)..(54): Xaa in position 54 is any amino acid
  Variant (57)..(58): Xaa in position 57 to 58 is any amino acid
  Variant (72)..(72): Xaa in position 72 is any amino acid
  Variant (74)..(76): Xaa in position 74 to 76 is any amino acid
  Variant (78)..(79): Xaa in position 78 to 79 is any amino acid
  Variant (81)..(82): Xaa in position 81 to 82 is any amino acid
  Variant (83)..(83): Xaa in position 83 is any or no amino acid
  Variant (85)..(86): Xaa in position 85 to 86 is any amino acid
  Variant (87)..(88): Xaa in position 87 to 88 is any or no amino acid
  Variant (91)..(91): Xaa in position 91 is any amino acid
  Variant (100)..(100): Xaa in position 100 is any amino acid
  Variant (103)..(103): Xaa in position 103 is any amino acid
  Variant (108)..(110): Xaa in position 108 to 110 is any amino acid
  Variant (111)..(111): Xaa in position 111 is any or no amino acid
  Variant (114)..(114): Xaa in position 114 is any amino acid
  Variant (119)..(119): Xaa in position 119 is any amino acid
  Variant (127)..(127): Xaa in position 127 is any amino acid
  Variant (129)..(129): Xaa in position 129 is any amino acid
  Variant (131)..(131): Xaa in position 131 is any amino acid
  Variant (135)..(136): Xaa in position 135 to 136 is any amino acid
  Variant (138)..(139): Xaa in position 138 to 139 is any amino acid
  Variant (141)..(141): Xaa in position 141 is any amino acid
  Variant (148)..(148): Xaa in position 148 is any amino acid
  Variant (150)..(150): Xaa in position 150 is any amino acid
  Variant (156)..(156): Xaa in position 156 is any amino acid
  Variant (160)..(162): Xaa in position 160 to 162 is any amino acid
  Variant (176)..(187): Xaa in position 176 to 187 is any amino acid
  Variant (193)..(193): Xaa in position 193 is any amino acid
  Variant (195)..(195): Xaa in position 195 is any amino acid
  Variant (201)..(201): Xaa in position 201 is any amino acid
  Variant (203)..(203): Xaa in position 203 is any amino acid
  Variant (204)..(207): Xaa in position 204 to 207 is any or no amino acid
  Variant (215)..(215): Xaa in position 215 is any amino acid
  Variant (221)..(221): Xaa in position 221 is any amino acid
  Variant (230)..(233): Xaa in position 230 to 233 is any amino acid
  Variant (235)..(240): Xaa in position 235 to 240 is any amino acid
  Variant (241)..(242): Xaa in position 241 to 242 is any or no amino acid
  Variant (244)..(245): Xaa in position 244 to 245 is any amino acid
  Variant (247)..(247): Xaa in position 247 is any amino acid
  Variant (255)..(255): Xaa in position 255 is any amino acid
  Variant (259)..(260): Xaa in position 259 to 260 is any amino acid
  Variant (262)..(265): Xaa in position 262 to 265 is any amino acid
  Variant (267)..(267): Xaa in position 267 is any amino acid
  Variant (269)..(269): Xaa in position 269 is any amino acid
  Variant (272)..(272): Xaa in position 272 is any amino acid
  Variant (275)..(277): Xaa in position 275 to 277 is any amino acid
  Variant (279)..(281): Xaa in position 279 to 281 is any amino acid
  Variant (283)..(283): Xaa in position 283 is any amino acid
  Variant (285)..(291): Xaa in position 285 to 291 is any amino acid
  Variant (292)..(293): Xaa in position 292 to 293 is any or no amino acid
  Variant (295)..(295): Xaa in position 295 is any amino acid
  Variant (297)..(297): Xaa in position 297 is any amino acid
  Variant (298)..(298): Xaa in position 298 is any or no amino acid
  Variant (300)..(301): Xaa in position 300 to 301 is any amino acid
  Variant (303)..(306): Xaa in position 303 to 306 is any amino acid
  Variant (307)..(307): Xaa in position 307 is any or no amino acid
  Variant (311)..(312): Xaa in position 311 to 312 is any amino acid
  Variant (314)..(317): Xaa in position 314 to 317 is any amino acid
ALXXAXXQIXXXXXFGKGXXMXXGXXXXXXXXXXXXXTGSXXLDXALGXGGLPXGRXXEIYGPESSGKTTLXLXXXAXXQXXXGXXXXAFXDAEHALDPXYAXKLGVXXXXLLXSQPDXGEQALEIXDXLXRSGXXDXXVXDSVAALXPXAEIEGXMGDXXXGLQARLMSQALRKXXXXXXXXXXXXIFINQXRXKIGVMXGXXXXXPETTTGGXALKFYXSVRLDIRRXXXXKXXXXXXXXGXXTXVKVVKNKXAPPXXFXXXXFXIXYGXGIXXXGXXXDXGXXXXXXXXXKXGXXWXXYXXXXXGQGXXNXXXXL

SEQ ID NO: 100532 - protein, 20 aa, Artificial sequence
  protein pattern
  Variant (3)..(3): Xaa in position 3 is Pro or Thr
  Variant (6)..(6): Xaa in position 6 is any amino acid
  Variant (12)..(12): Xaa in position 12 is Ala, Ser or Thr
  Variant (16)..(16): Xaa in position 16 is any amino acid
  Variant (17)..(17): Xaa in position 17 is Asp or Glu
  Variant (18)..(18): Xaa in position 18 is Ile or Val
  Variant (20)..(20): Xaa in position 20 is Lys or Arg
TTXGGXALKFYXSVRXXXRX

SEQ ID NO: 100533 - protein, 29 aa, Artificial sequence
  protein pattern
  Variant (2)..(2): Xaa in position 2 is any amino acid
  Variant (5)..(5): Xaa in position 5 is Ile or Val
  Variant (6)..(6): Xaa in position 6 is any amino acid
  Variant (9)..(9): Xaa in position 9 is Phe or Tyr
  Variant (13)..(13): Xaa in position 13 is any or no amino acid
  Variant (15)..(15): Xaa in position 15 is any or no amino acid
  Variant (20)..(20): Xaa in position 20 is Leu, Met or Val
  Variant (21)..(21): Xaa in position 21 is Ala, Cys, Ser or Thr
  Variant (23)..(25): Xaa in position 23 to 25 is any amino acid
  Variant (27)..(27): Xaa in position 27 is Ala, Glu, Asn, Gln or Ser
  Variant (28)..(28): Xaa in position 28 is any amino acid
PXGRXXEIXGPEXSXGKTTXXLXXXAXXQ

SEQ ID NO: 100534 - protein, 18 aa, Artificial sequence
  protein pattern
  Variant (2)..(5): Xaa in position 2 to 5 is any amino acid
  Variant (8)..(8): Xaa in position 8 is any amino acid
  Variant (11)..(12): Xaa in position 11 to 12 is Leu or Met
  Variant (14)..(14): Xaa in position 14 is any amino acid
  Variant (16)..(16): Xaa in position 16 is Leu or Met
GXXXXGLXARXXSXAXRK

SEQ ID NO: 100535 - protein, 16 aa, Artificial sequence
  protein pattern
  Variant (3)..(3): Xaa in position 3 is any amino acid
  Variant (5)..(5): Xaa in position 5 is Ile, Leu or Val
  Variant (7)..(7): Xaa in position 7 is any amino acid
  Variant (12)..(12): Xaa in position 12 is Phe, Ile, Met or Val
  Variant (13)..(13): Xaa in position 13 is Phe or Tyr
  Variant (15)..(15): Xaa in position 15 is Asn or Ser
FIXQXRXKIGVXXGXP

SEQ ID NO: 100536 - protein, 19 aa, Artificial sequence
  protein pattern
  Variant (3)..(3): Xaa in position 3 is Ile or Val
  Variant (11)..(12): Xaa in position 11 to 12 is any amino acid
  Variant (15)..(16): Xaa in position 15 to 16 is any amino acid
  Variant (19)..(19): Xaa in position 19 is Ala, Ile or Val
AFXDAEHALDXXYAXXLGX

SEQ ID NO: 100537 - protein, 22 aa, Artificial sequence
  protein pattern
  Variant (3)..(4): Xaa in position 3 to 4 is Ile or Val
  Variant (8)..(9): Xaa in position 8 to 9 is any amino acid
  Variant (10)..(10): Xaa in position 10 is any or no amino acid
  Variant (12)..(12): Xaa in position 12 is any or no amino acid
  Variant (14)..(14): Xaa in position 14 is Lys or Arg
  Variant (15)..(15): Xaa in position 15 is any amino acid
  Variant (16)..(16): Xaa in position 16 is Ala, Thr or Val
  Variant (17)..(17): Xaa in position 17 is any amino acid
  Variant (19)..(19): Xaa in position 19 is any amino acid
  Variant (20)..(20): Xaa in position 20 is Ile, Leu or Met
  Variant (21)..(21): Xaa in position 21 is any amino acid
  Variant (22)..(22): Xaa in position 22 is Phe or Tyr
VKXXKNKXXXPXFXXXXFXXXX

SEQ ID NO: 100538 - protein, 21 aa, Artificial sequence
  protein pattern
  Variant (5)..(5): Xaa in position 5 is any amino acid
  Variant (13)..(13): Xaa in position 13 is Ala, Cys, Thr or Val
  Variant (14)..(14): Xaa in position 14 is Asp or Glu
  Variant (15)..(15): Xaa in position 15 is any amino acid
  Variant (17)..(17): Xaa in position 17 is any amino acid
  Variant (20)..(20): Xaa in position 20 is Ala, Gly, Asn or Ser
  Variant (21)..(21): Xaa in position 21 is Ala, Gly or Ser
SQPDXGEQALEIXXXLXRSXX

SEQ ID NO: 100539 - protein, 15 aa, Artificial sequence
  protein pattern
  Variant (2)..(2): Xaa in position 2 is any or no amino acid
  Variant (9)..(9): Xaa in position 9 is Thr or Val
  Variant (11)..(11): Xaa in position 11 is Lys or Arg
  Variant (14)..(14): Xaa in position 14 is Ile or Leu
  Variant (15)..(15): Xaa in position 15 is Asp or Glu
VXDSVAALXPXAEXX

SEQ ID NO: 100540 - protein, 12 aa, Artificial sequence
  protein pattern
  Variant (3)..(3): Xaa in position 3 is Asp, Glu or Thr
  Variant (4)..(5): Xaa in position 4 to 5 is any amino acid
  Variant (6)..(6): Xaa in position 6 is Phe, His or Tyr
  Variant (10)..(10): Xaa in position 10 is Ala, Ser or Thr
  Variant (11)..(11): Xaa in position 11 is Ala, Ile or Val
QIXXXXGKGXXM

SEQ ID NO: 100541 - protein, 15 aa, Artificial sequence
  protein pattern
  Variant (2)..(2): Xaa in position 2 is Ala or Ser
  Variant (4)..(4): Xaa in position 4 is Ala or Ser
  Variant (6)..(6): Xaa in position 6 is Phe or Tyr
  Variant (7)..(7): Xaa in position 7 is Ala, Ser or Thr
  Variant (9)..(12): Xaa in position 9 to 12 is any amino acid
  Variant (13)..(13): Xaa in position 13 is Ile, Leu or Val
KXGXWXXYXXXXXGQ

SEQ ID NO: 100542 - protein, 14 aa, Artificial sequence
  protein pattern
  Variant (4)..(4): Xaa in position 4 is Phe, Ile, Leu or Val
  Variant (5)..(5): Xaa in position 5 is any amino acid
  Variant (8)..(8): Xaa in position 8 is any amino acid
  Variant (12)..(12): Xaa in position 12 is any amino acid
TGSXXLDXALGXGG

SEQ ID NO: 100543 - DNA, 585 bp, Escherichia coli
  CDS (1)..(585): transl_table=11
atgaataaagttacaaaaacagctattgcgggcttacttgcgcttttcgcaggtaatgccgctgcaaccgatggtgaaatagtttttgatggcgagattttaaaatccgcttgtgaaatcaatgactctgataagaaaattgaagttgctcttggtcactataatgccgaacagtttcgtaatattggcgagcgtagcccaaaaattccattcactattcctttagttaactgcccaatgactgggtgggagcacgataacggcaacgttgaagcgtctttccgtctatggctggaaacgcgagataatggcaccgtccctaacttccctaatctggcaaaagtaggctcttttgctggcatagcggcaacaggtgtgggtatccgtattgacgatgcggaaagcggaaacattatgccactgaatgctatgggcaatgataacacggtttatcagatcccggcggaatccaatggtattgtcaatgttgacctcatcgcttactacgtatcaaccgtagttccatcagaaatcaccccaggggaagcagacgctatcgttaacgtaacgctggattaccgttaa

SEQ ID NO: 100544 - protein, 194 aa, Escherichia coli
MNKVTKTAIAGLLALFAGNAAATDGEIVFDGEILKSACEINDSDKKIEVALGHYNAEQFRNIGERSPKIPFTIPLVNCPMTGWEHDNGNVEASFRLWLETRDNGTVPNFPNLAKVGSFAGIAATGVGIRIDDAESGNIMPLNAMGNDNTVYQIPAESNGIVNVDLIAYYVSTVVPSEITPGEADAIVNVTLDYR

SEQ ID NO: 100545 - DNA, 519 bp, Klebsiella pneumoniae subsp. pneumoniae MGH 78578
  CDS (1)..(519): transl_table=11
atgaaaaaattatcagcagctgcgtttgcatttggtctgttatctgtgtctgtatctcaggcattggcggcggatgccaccgttaacttcagcggaaccattcttcaggaagcctgcagtgtagatacttcagacaatactgttaacgttcagctaggcacctacggtgctgctcaattcccgacggtagggacaacgacccttcctgttcctttcgccatcaacttaacgggttgtccggcttcaggtggcccgacggctgcactggtgaccttttcaggggccgcggatgcggccggtgacctggcgttgaccgcaggcggcgcatcgggcgtttccattaatatcaaaaaagcagatggtaccaacattgatattaactctaccgattccggtattgcactgactagcgctacgacccaacagctccgctttaccgctaattacatcagtactgcggcttctgtcaccgcaggcgcggctaacgccgtcgcccaggtaaacatctcttatatgtaa

SEQ ID NO: 100546 - protein, 172 aa, Klebsiella pneumoniae subsp. pneumoniae MGH 78578
MKKLSAAAFAFGLLSVSVSQALAADATVNFSGTILQEACSVDTSDNTVNVQLGTYGAAQFPTVGTTTLPVPFAINLTGCPASGGPTAALVTFSGAADAAGDLALTAGGASGVSINIKKADGTNIDINSTDSGIALTSATTQQLRFTANYISTAASVTAGAANAVAQVNISYM

SEQ ID NO: 100547 - DNA, 567 bp, Escherichia coli O157:H7 EDL933
  CDS (1)..(567): transl_table=11
atgtttaaaggacaaaaaacactggccgccctggccatatctctactattcgcttcacctgtttttgctgcagatgaaggatctggtgaaatccactttaaaggtgaagttattgaagcaccatgtgaaattcaccctgatgaccttgatatgaacattgacctgggtgaagtaaccacatcccacataaatcgagaacatcatagcgagaaaaaacctgtcaatattcgcttaatcaactgtgatattgcaggctgggatgatggcaagggtggcgtggtctcaaaggtaggcgtgaccttcgacagcacggctaaaacgacaggtgcaaccccgctccttagtaacatcagtgctggcgaggctaccggcgttggcgtacgtctcatgaacaaagatgaatcatttgttacattgggaacagaagcgccaacaattgacttattggcaagttcaacagaacaaacgttaaacttctttgcctggatggaacagatggataacgcagtttcggttaccgcgggggccgttactgctaacgcaacttacgttctggattaccaataa

SEQ ID NO: 100548 - protein, 188 aa, Escherichia coli O157:H7 EDL933
MFKGQKTLAALAISLLFASPVFAADEGSGEIHFKGEVIEAPCEIHPDDLDMNIDLGEVTTSHINREHHSEKKPVNIRLINCDIAGWDDGKGGVVSKVGVTFDSTAKTTGATPLLSNISAGEATGVGVRLMNKDESFVTLGTEAPTIDLLASSTEQTLNFFAWMEQMDNAVSVTAGAVTANATYVLDYQ

SEQ ID NO: 100549 - DNA, 531 bp, Escherichia coli O157:H7 EDL933
  CDS (1)..(531): transl_table=11
atgaaatacaataacattattttcctcggtttatgtctggggttaaccacctattctgctttatccgcagatagcgttattaaaattagcgggcgcgtcctcgattatggctgcacagtctcatcggattcgcttaattttaccgtagatctccaaaaaaacagtgccagacaatttccaacgaccggtagcacaagtccagccgtcccttttcagattacgttaagtgaatgcagcaaagggacaacgggggttcgggttgcatttaacggtattgaggacgcagaaaataatactctgttgaaactggatgagggaagcaatacggcctccggtttaggtatagaaatactggacggaaatatgcgtccggtgaaactgaatgaccttcatgccgggatgcagtggatcccactggtaccagaacagaacaatattttgccttactccgctcgtctgaagtcaactcagaagtccgtcaatccgggactggtgagggcttcggcaacctttacccttgaatttcaataa

SEQ ID NO: 100550 - protein, 176 aa, Escherichia coli O157:H7 EDL933
MKYNNIIFLGLCLGLTTYSALSADSVIKISGRVLDYGCTVSSDSLNFTVDLQKNSARQFPTTGSTSPAVPFQITLSECSKGTTGVRVAFNGIEDAENNTLLKLDEGSNTASGLGIEILDGNMRPVKLNDLHAGMQWIPLVPEQNNILPYSARLKSTQKSVNPGLVRASATFTLEFQ

SEQ ID NO: 100551 - DNA, 585 bp, Escherichia coli O157:H7 EDL933
  CDS (1)..(585): transl_table=11
atgaataaagttacaaaaacagctattgcgggcttacttgcgcttttcgcaggtaatgccgctgcaaccgatggtgaaatagtttttgatggcgagattttaaaatccgcttgtgaaatcaatgactctgataagaaaattgaagttgctcttggtcactataatgccgaacagtttcgttctgtaggcgatcgtagcccaaaaattccattcactattcctttagttaactgcccagtgactgggtgggagcacgataacggcaacgttgaagcgtctttccgtttatggctggaaacgcgggataatggtaccgtccctaacttccctaacttggcaaaagtgggctcttttgctggcacagcagcaacaggtgtgggtatccgtattgacgatgcggaaagcggaaaccttatgccactaaatgctatgggcaatgataacacagtttatcagatccctgcggactccgctggaattgtcaatgttgacctcatcgcttactacgtatcaaccgttgaagcatccgaaatcaccccaggggaagcagacgctgtcgttaacgtaacgctggattaccgttaa

SEQ ID NO: 100552 - protein, 194 aa, Escherichia coli O157:H7 EDL933
MNKVTKTAIAGLLALFAGNAAATDGEIVFDGEILKSACEINDSDKKIEVALGHYNAEQFRSVGDRSPKIPFTIPLVNCPVTGWEHDNGNVEASFRLWLETRDNGTVPNFPNLAKVGSFAGTAATGVGIRIDDAESGNLMPLNAMGNDNTVYQIPADSAGIVNVDLIAYYVSTVEASEITPGEADAVVNVTLDYR

SEQ ID NO: 100553 - DNA, 537 bp, Escherichia coli O157:H7 EDL933
  CDS (1)..(537): transl_table=11
  misc_feature (304)..(304): r is g or a
atggagtttttcatgaaaaaggtcgtttttgccttaaccgcactggcgttaacttctggcactgtattcgcagcagagtctggtgacggcacggttaaatttacaggcgagatcgtggattcaccttgcgtactgtccgttgactctcagaaccaggaagttgtgttgggtcaggtacaaaaatctgtatttgctgcggttggtgacaaatccccggcaaaacctttcgaaatcaaactggaagattgcgataccaccacgatgaaaaaagccaatgtgagctttagtggtgttggtgatgcarataaatctgatctgatttctgttagcactgaagcgggcgcggccaaaggtgttggtatcggtatttatgataacagcaataccctggtcgctcttaacggtggtaaagcaagtgttgatctgagtaaaggccagacggttctctactttaccgctaactacgtttctactctggcaacggtaacgaccggttacggcaatgcgcaggtcgatttcaacctgtcttacgagtaa

SEQ ID NO: 100554 - protein, 178 aa, Escherichia coli O157:H7 EDL933
MEFFMKKVVFALTALALTSGTVFAAESGDGTVKFTGEIVDSPCVLSVDSQNQEVVLGQVQKSVFAAVGDKSPAKPFEIKLEDCDTTTMKKANVSFSGVGDABKSDLISVSTEAGAAKGVGIGIYDNSNTLVALNGGKASVDLSKGQTVLYFTANYVSTLATVTTGYGNAQVDFNLSYE

SEQ ID NO: 100555 - DNA, 603 bp, Escherichia coli O157:H7 EDL933
  CDS (1)..(603): transl_table=11
atgaaaccaaatatgattgtaggagcattagcgttaacttctgtgtttatggcaggtcacctacaggcggctgatggaacagtccatttccgtggtgaaattattgacagtacttgcgaagtcactcctgaaactaaagatcaggtcgttgatttaggcaaagtaaaccgtacagcctttagtggcgtcgatgatgtggctgccccgacggctttttctatcgatctgactcaatgcccggaaacctttaagtccgccgcaattcgtttcgatggtaatgaagatgctcatggtaatggcaacctggcaattggtaccccgctggataactctaacgatgctgccgctggtattagcccgagtgataacagtggggattatactggtgcgggtgccgttagtgcagcgaaaggcgtagctattcgtttatataaccgtgcagataacactcaggtcaagttatatgaaaattctgcatcaactccgatttctaatggtaatgcatccatgaagttcatggctcgttatattgctacggaaacgactattgaccctggtacagctaacgccgactcgcagtttacagttgaatatataaaataa

SEQ ID NO: 100556 - protein, 200 aa, Escherichia coli O157:H7 EDL933
MKPNMIVGALALTSVFMAGHLQAADGTVHFRGEIIDSTCEVTPETKDQVVDLGKVNRTAFSGVDDVAAPTAFSIDLTQCPETFKSAAIRFDGNEDAHGNGNLAIGTPLDNSNDAAAGISPSDNSGDYTGAGAVSAAKGVAIRLYNRADNTQVKLYENSASTPISNGNASMKFMARYIATETTIDPGTANADSQFTVEYIK

SEQ ID NO: 100557 - DNA, 531 bp, Escherichia coli O157:H7 EDL933
  CDS (1)..(531): transl_table=11
atgagaaacaaacctttttatcttctgtgcgcttttttgtggctggcagtgagtcacgctttggctgcggatagcacgattactatccgcggctatgtcagagataacggctgtagtgtggccgctgaatcaaccaattttactgttgatctgatggaaaacgcggcgaagcaatttaacaacattggcgcgacgactcctgtcgttccatttcgtattttgctgtcaccctgtggtaacgccgtttctgccgtaaaagttgggtttaccggcgttgcagatagccacaatgccaacctgcttgcacttgaaaatacggtgtcagcggcttcgggactgggaatacagcttctgaatgagcagcaaaatcagataccccttaatgctccatcgtccgcgatttcgtggacgaccctgacgccgggtaaaccaaatacgttgaatttttacgcccggctaatggcgacacaggtgcctgtcactgcggggcatatcaatgccacggctaccttcactcttgaatatcagtaa

SEQ ID NO: 100558 - protein, 176 aa, Escherichia coli O157:H7 EDL933
MRNKPFYLLCAFLWLAVSHALAADSTITIRGYVRDNGCSVAAESTNFTVDLMENAAKQFNNIGATTPVVPFRILLSPCGNAVSAVKVGFTGVADSHNANLLALENTVSAASGLGIQLLNEQQNQIPLNAPSSAISWTTLTPGKPNTLNFYARLMATQVPVTAGHINATATFTLEYQ

SEQ ID NO: 100559 - DNA, 546 bp, Salmonella typhimurium LT2
  CDS (1)..(546): transl_table=11
atgaacagatcacactgcgctctttttgccatgggactgatgctgtgtccacaaatcaatgccagcgctgacgacctcgcttataacctcgaatttaccggcactattgtggcgcaaacctgcgacatagatatttccagtctcagtcaaagtattgatttagggcagtttgcagttggcgatttcccctcgacgggaacaacgacaaaatttaagccctttaatatcaacctcaaaaattgttcccgaggaattaccggggcgaagatctggtttaccggcgaacccgatccggacaatcccgcgctactggcgataaccgacaccgggatgggaagcggaaacatgttagcaagcggggttggggtggaaattctgaatgatgatcaggataccatcagtatcaataatgccgactcggtggtctatccgttgaaagccggacgcaacacgctgtctttttatattcgctataaatcgacccggccgacggtcacgtccgggaacgcgacggcggtcatgtatttcgatatgcagtatgaatga

SEQ ID NO: 100560 - protein, 181 aa, Salmonella typhimurium LT2
MNRSHCALFAMGLMLCPQINASADDLAYNLEFTGTIVAQTCDIDISSLSQSIDLGQFAVGDFPSTGTTTKFKPFNINLKNCSRGITGAKIWFTGEPDPDNPALLAITDTGMGSGNMLASGVGVEILNDDQDTISINNADSVVYPLKAGRNTLSFYIRYKSTRPTVTSGNATAVMYFDMQYE

SEQ ID NO: 100561 - DNA, 561 bp, Salmonella typhimurium LT2
  CDS (1)..(561): transl_table=11
atgaatacagcagtaaaagctgcggttgctgccgcactggttatgggtgtttccagctttgccaatgctgcgggcagtaatactggtacggtgacttttaccggtactattgaagattcaccgtgttcaatcgtggttggcgacgaacaccagaccgttaacctgggccatatcggtaccggttctctgatgggcggtaaagaatcttcaaaagtcgatttccatatcggtctggaaaactgcgcattcaccactgagaaagaagcgtctaccgttttctctgccatcggtaacgaatccagcgctaatccgggcagcgttgcgctgatgcgtatcggcggcggcgaaatggcgggttccagcattgttatcggcaaccacctgggttccgcgatcaaattgggcgacgcttacagcgaaaacctgacgatgaacggcagcgttgcggcggcgaaacagactcttaacttcaaagcctgggtgaaaggcgattctgctgccaccactatcgataccggcgaattcagcagcaccgtaaacttcacgatcagctatctgtaa

SEQ ID NO: 100562 - protein, 186 aa, Salmonella typhimurium LT2
MNTAVKAAVAAALVMGVSSFANAAGSNTGTVTFTGTIEDSPCSIVVGDEHQTVNLGHIGTGSLMGGKESSKVDFHIGLENCAFTTEKEASTVFSAIGNESSANPGSVALMRIGGGEMAGSSIVIGNHLGSAIKLGDAYSENLTMNGSVAAAKQTLNFKAWVKGDSAATTIDTGEFSSTVNFTISYL

SEQ ID NO: 100563 - DNA, 543 bp, Salmonella typhimurium LT2
  CDS (1)..(543): transl_table=11
atgacctctactattgcgagtctgatgtttgtcgctggcgcagcggttgcggctgatcctactccggtgagcgtgagtggcggtactattcatttcgaaggtaaactggttaatgcagcctgtgccgtcagcactaaatccgccgatcaaacggtgacgctgggtcaataccgtaccgccagctttacggcgattggtaatacgactgcgcaggtgcctttctccatcgtcctgaatgactgcgatccgaaagtggcggccaacgctgccgtggctttctctggtcaggcagataacaccaaccctaatttgctggctgtctcctctgcggacaatagcactaccgcaaccggcgtcgggattgagattcttgataatacctcttcaccgttgaagccggacggcgcgaccttctcggcgaagcagtcgctggttgaaggcaccaatacgctgcgttttaccgcacgctataaggcaaccgccgccgccacgacgccaggccaggctaatgccgacgccacctttatcatgaaatacgaataa

SEQ ID NO: 100564 - protein, 180 aa, Salmonella typhimurium LT2
MTSTIASLMFVAGAAVAADPTPVSVSGGTIHFEGKLVNAACAVSTKSADQTVTLGQYRTASFTAIGNTTAQVPFSIVLNDCDPKVAANAAVAFSGQADNTNPNLLAVSSADNSTTATGVGIEILDNTSSPLKPDGATFSAKQSLVEGTNTLRFTARYKATAAATTPGQANADATFIMKYE

SEQ ID NO: 100565 - DNA, 546 bp, Salmonella typhimurium LT2
  CDS (1)..(546): transl_table=11
atgtttaataagaaaataatcatcctggcaatgttaactgccgtagcatccacaccggtatttgcccagaacacgattacgttcaatggcaaaatttacgatcaggcgtgtacggttcaggtgaatggctccacggataccaccattgatttgggtaattacagcaaagaacgcatcgcggaaaaaggcgccacaaccgattacgtgccgtttaccgtaagcctggttagctgcccggaagcagggactggcgtaccaacccaagccatgttccgcttccacggcgcaacagatgattctaacccaacgtacttcaaaaacgcggacgaaggatcggaaacgggcgccgcgggtgtcggtatttctattcagaacgcttcacatagcgatgtgacagataacacggatgatgccgcagtaaacctgccaaccgacggctcgacagcagactttacctattacgccgccatggcaaacgatggttccgcaaccgtaaccggtggagatgttagcactcaggttacgtataccgtttcgtatcagtaa

SEQ ID NO: 100566 - protein, 181 aa, Salmonella typhimurium LT2
MFNKKIIILAMLTAVASTPVFAQNTITFNGKIYDQACTVQVNGSTDTTIDLGNYSKERIAEKGATTDYVPFTVSLVSCPEAGTGVPTQAMFRFHGATDDSNPTYFKNADEGSETGAAGVGISIQNASHSDVTDNTDDAAVNLPTDGSTADFTYYAAMANDGSATVTGGDVSTQVTYTVSYQ

SEQ ID NO: 100567 - DNA, 573 bp, Shigella flexneri 2a str. 301
  CDS (1)..(573): transl_table=11
atgaagcgtaatattataggcggtgcattcactctggcatctctaatgctggccgggcatgcactggcagaagatggtgttgttaacttcgtcggtgaaattgtcgacactacttgtgaagttacctccgatacagccgatcaaattgtcccactgggtaaagtcagtaaaaatgcattttcaggtgtaggtagtctggcgtcgccacagaagttcagtattaaacttgaaaattgcccggcaacgtacactcaagcagccgttcgttttgatggtacagaagcgcctggcggcgacggcgacctgaaagtgggtacgccgcttacagcaggcaaccctggtgattttaccggtacaggacaagcgattgcggcaaccggcgttggtattcgtatttttaaccagtccgataattcgcaggttaaactttataacgactctgcttataccgctatcgatgctgaaggcaaggctgaaatgaagtttattgcacgctatgtggcaaccaatgcgaccgtaacggctggtacggcgaacgctgattcacaatttactgtcgaatataagaaataa

SEQ ID NO: 100568 - protein, 190 aa, Shigella flexneri 2a str. 301
MKRNIIGGAFTLASLMLAGHALAEDGVVNFVGEIVDTTCEVTSDTADQIVPLGKVSKNAFSGVGSLASPQKFSIKLENCPATYTQAAVRFDGTEAPGGDGDLKVGTPLTAGNPGDFTGTGQAIAATGVGIRIFNQSDNSQVKLYNDSAYTAIDAEGKAEMKFIARYVATNATVTAGTANADSQFTVEYKK

SEQ ID NO: 100569 - DNA, 540 bp, Pseudomonas putida KT2440
  CDS (1)..(540): transl_table=11
atgaagaagtccttagttctatccctcggcctgcttactggcctggcaagcaatgctgcattcgcttccggctcgatattctttgaaggccgcatcacgcccgaaacgtgtcctatcgagatcgtcaatcccggtgacggcaatgtcagtgaccgcgtcgccatgggcgaaattcccatggggcgattccccgctgccaacgttgaagtccgtggcgcatcttttaacatccgcgtacccgacaaaacagtctgcagcatcagcgaagacaatgccttcgtgaagtttgacggtgccgctgatgccagcggcgactatttcagcattggtaacagtgccggcacggcagaaaacatctcgattgtgatcagggacaagtccaaggcatcgatcaaacccggtggaacctcggttgattacccactcaacgcgacaggcccaaccgacctccggttcgacgcctactaccgttccactgccagcaccgtgacgcacggccttgcatccgcccaggttcgttacaccgtcgactatcaataa

SEQ ID NO: 100570 - protein, 179 aa, Pseudomonas putida KT2440
MKKSLVLSLGLLTGLASNAAFASGSIFFEGRITPETCPIEIVNPGDGNVSDRVAMGEIPMGRFPAANVEVRGASFNIRVPDKTVCSISEDNAFVKFDGAADASGDYFSIGNSAGTAENISIVIRDKSKASIKPGGTSVDYPLNATGPTDLRFDAYYRSTASTVTHGLASAQVRYTVDYQ

SEQ ID NO: 100571 - DNA, 540 bp, Escherichia coli CFT073
  CDS (1)..(540): transl_table=11
atgaaaaggaagagattatttctgttagcgtcgttgctgccaatgtttgctctggccggaaataaatggaataccacgctgcccggcggaaatatgcaatttcagggcgtcattattgcggaagcttgccggattgaagccggtgataaacaaatgacggtcaatatggggcaaatcagcagtaaccggtttcatgcggtaggggaagatagctcaccggtgccttttgttatttatttacgggaatgtagcacggtggtgagtgaacgtgtgggtgtggcgtttcacggtgtcgcggatggtaaaaatccggatgtgctttccgtgggagaggggccagggatagccaccaatattggcgtagcgttatttgatgatgaaggaaacctcgtaccgattaatcgtcctccagcaaactggaaacggctttactcaggctctacttcgctacatttcatcgccaaatatcgtgctaccgggcgtcgggttactggcggcatcgccaatgcccaggcctggttctctttaacctatcagtaa

SEQ ID NO: 100572 - protein, 179 aa, Escherichia coli CFT073
MKRKRLFLLASLLPMFALAGNKWNTTLPGGNMQFQGVIIAEACRIEAGDKQMTVNMGQISSNRFHAVGEDSSPVPFVIYLRECSTVVSERVGVAFHGVADGKNPDVLSVGEGPGIATNIGVALFDDEGNLVPINRPPANWKRLYSGSTSLHFIAKYRATGRRVTGGIANAQAWFSLTYQ

SEQ ID NO: 100573 - DNA, 552 bp, Pseudomonas syringae pv. tomato str. DC3000
  CDS (1)..(552): transl_table=11
gtgaataaaacgctatccgcactcggtcttgctctggccactgccctgactggcaccgccgtatctgccaacaccggcactatcaactttgaaggccagatcaccggcagcacctgccctatcgaagtggtcaacccaggtgacggtgcagttggcaacctggtgaaaatgggctctgtcgacgctggccgcttcaccgccgtcggccaggaatacagcggcaagagctttgccctgcgcgtcaaagacaatggcagttgcggtcttacaggcaccgccgatgttgcaactgtaaagtttgacggtgccgcggacggttccagcagctactttgctgtcacaccaacggcagatggcgcaacgggcgtcgccattgccattcgtgactttagcggagactctatcgagcctggaaccgagtctgccccctaccctctggtcgttggcggtgtcaccgacatgaccttcgacgcctactatcgctcgacagccgccacagtgacgccgggcactgcctcggcagatatcaacttcaccgtcgccatcaactga

SEQ ID NO: 100574 - protein, 183 aa, Pseudomonas syringae pv. tomato str. DC3000
MNKTLSALGLALATALTGTAVSANTGTINFEGQITGSTCPIEVVNPGDGAVGNLVKMGSVDAGRFTAVGQEYSGKSFALRVKDNGSCGLTGTADVATVKFDGAADGSSSYFAVTPTADGATGVAIAIRDFSGDSIEPGTESAPYPLVVGGVTDMTFDAYYRSTAATVTPGTASADINFTVAIN

SEQ ID NO: 100575 - DNA, 531 bp, Photorhabdus luminescens subsp. laumondii TTO1
  CDS (1)..(531): transl_table=11
atgaaagctaaactgattatttcatccttacttgcatcttctgtatttatttctgtagcaaatgcagcagacggaaaaatcaactttacaggtaatatcatcgcgaatgcctgtaaaatcgataccgactctgcaaatcaaaacgtaaacatgggaacaattagctcaaatgcatttagtggcgtagatagtaccgcggctgcaacaccctttagcattaagatgagtgattgcccaccagaatatactcatgcacaagttaaatttgatgggcagatagataatagaaataacaatctcctggccttatccaatgataaaggccaggaagtcgccgatggcgttgctattggtatctatgaagaagataactcaacgctgattcctttggcaaaagcttccaaatcccaggcttttactgatcaaaaaacagcagaattgaagttcattgcaaaatatgttgctacagctcaagcaattagcccgggctcaggtgatgcagtcgccaattttacgattgtttataactaa

SEQ ID NO: 100576 - protein, 176 aa, Photorhabdus luminescens subsp. laumondii TTO1
MKAKLIISSLLASSVFISVANAADGKINFTGNIIANACKIDTDSANQNVNMGTISSNAFSGVDSTAAATPFSIKMSDCPPEYTHAQVKFDGQIDNRNNNLLALSNDKGQEVADGVAIGIYEEDNSTLIPLAKASKSQAFTDQKTAELKFIAKYVATAQAISPGSGDAVANFTIVYN

SEQ ID NO: 100577 - DNA, 528 bp, Serratia entomophila
  CDS (1)..(528): transl_table=11
atgaaaatcaataaaattgcgtctgttttattactggcctccggcctgactgcatttggtgcgaatgctgcagatcaaggttctggccgtgtaactttcaccggttctattattgaggccgcttgttctgtgaatccagagtcttcagatcaagaagttgacttggggcagattgctgcttcccaactggcggatggtggttcttctacgccgcgtaatttcgaaatcctgctggaaaactgtgcgctggatgctgataaagccaataccgttaccgtgaccttcggtggctctgctgcagatagctctaaccagctgctaggtattaccggcaccgcttctggcgctggcgtggcagttaccgacggttctggcaatctgattacgttgggccaggcaacgggagctcgtgaattgatcgagggttccaacaccctgaacttctctgcttatctgcaggggattagcactgaaatcagcaccggtgaattccagtctgtagctgactttaccctggcttaccagtaa

SEQ ID NO: 100578 - protein, 175 aa, Serratia entomophila
MKINKIASVLLLASGLTAFGANAADQGSGRVTFTGSIIEAACSVNPESSDQEVDLGQIAASQLADGGSSTPRNFEILLENCALDADKANTVTVTFGGSAADSSNQLLGITGTASGAGVAVTDGSGNLITLGQATGARELIEGSNTLNFSAYLQGISTEISTGEFQSVADFTLAYQ

SEQ ID NO: 100579 - DNA, 513 bp, Burkholderia vietnamiensis G4
  CDS (1)..(513): transl_table=11
atgaaaaagattttggcagcagcggcgctcgccgcagtttcggcatcgacgtttgcggcggcgaccccgggcacgatccggttccagggcgagatcgtcgccggcgcatgcggcatcagccaggaaacgctcgaccagaccgtgtcgctcggtcaggttccgtcgcacgtgttcaagaaggtcggcgatcgttcggaggcgaagaatttcaacatcgtgctcaccgactgcgatacgtcgacgcagaccaacgcgttcttcacgttcacgggcgcgtccgacgccaccaacgcagacctgatcgccacgaccggcagcgcgagcaacgtcggtattcgcctgcaggcgggcgcgaacgattacctgaagaacggcaccgagcagtcgtccccggttgtgctgtcgaagagcggcaacaccgtgacgttcggcgcgatgtatgaggcgacggccgcagcggtcacgccgggtatcgcgaacgcggtcgccaacttcaccgtgcgctaccagtaa

SEQ ID NO: 100580 - protein, 170 aa, Burkholderia vietnamiensis G4
MKKILAAAALAAVSASTFAAATPGTIRFQGEIVAGACGISQETLDQTVSLGQVPSHVFKKVGDRSEAKNFNIVLTDCDTSTQTNAFFTFTGASDATNADLIATTGSASNVGIRLQAGANDYLKNGTEQSSPVVLSKSGNTVTFGAMYEATAAAVTPGIANAVANFTVRYQ

SEQ ID NO: 100581 - DNA, 513 bp, Burkholderia sp. 383
  CDS (1)..(513): transl_table=11
atgaaaaaatccctcctgaccgctgtcgcactcgcggccctgtcgacctcggccttcgcagcgggcaccggcacgatcaccttcaagggcgagatcgtcgcgggcgcatgcggcatcgattcgggttcggtcaaccagaccgtgcaactcggcaaggtgccgaccaacgcgttcacgaaggctggcgacaagtcccagccggttccgttccagatcacgctgacggattgcgataccagcgttgcgaagcaggcgaagttcacgttcacgggcacgtcgaacgcaacgcagccgaagctgctcgcgacgatcggttccgcaaccaacgtcggcatccgtctgcagagcgcgtcgggtgaagacctcgacaacggcgtcgagcaagctgcgccgacgctgctgtcgaatggcaacaacatcgtgacgttcggcgcgcgctacgaagcgacggctgccggcgtgacgccgggtacggccgacagcgtcgcgaacttcacggttcgctacgagtaa

SEQ ID NO: 100582 - protein, 170 aa, Burkholderia sp. 383
MKKSLLTAVALAALSTSAFAAGTGTITFKGEIVAGACGIDSGSVNQTVQLGKVPTNAFTKAGDKSQPVPFQITLTDCDTSVAKQAKFTFTGTSNATQPKLLATIGSATNVGIRLQSASGEDLDNGVEQAAPTLLSNGNNIVTFGARYEATAAGVTPGTADSVANFTVRYE

SEQ ID NO: 100583 - DNA, 531 bp, Shewanella sp. MR-7
  CDS (1)..(531): transl_table=11
atgttaaacaaaaaaatcagtttattggctttgatggctggacttgctatttcttataacgcaaatgctagtgacggacagatcaactttacaggcacgattacagatgagacttgcactgtgactaattcaccaagcagtcctttgtcagtgacactcggttctgttgctaaaagtgcatttagcggagtcggttcaaccgctgcagctactaagttcaccattatgctaacaggatgtcctcaaagcgctaacgtcaattctgtatcagtgaagtttgatggaatagccgacggaacaaataaagatgtacttgcattgactgctggagaaggggttgctgaaggtgtaggtattcaattaaccgaagacaatggcacagtcttaccattgttcagtgcatcttcctctttcactctggcagatggtgataacaaactgaactttatcgcacgatacatagctacttctgcaactgtgactgcgggtacagctaacgctgtcagtaactttacaattatctataactga

SEQ ID NO: 100584 - protein, 176 aa, Shewanella sp. MR-7
MLNKKISLLALMAGLAISYNANASDGQINFTGTITDETCTVTNSPSSPLSVTLGSVAKSAFSGVGSTAAATKFTIMLTGCPQSANVNSVSVKFDGIADGTNKDVLALTAGEGVAEGVGIQLTEDNGTVLPLFSASSSFTLADGDNKLNFIARYIATSATVTAGTANAVSNFTIIYN

SEQ ID NO: 100585 - DNA, 534 bp, Edwardsiella tarda
  CDS (1)..(534): transl_table=11
atgaagaaaattttactgcctgttatggccctgagcgctagcgtgatgagtggtcaggtcagcgccgccaacggtactgttaattttaccggtgaaatcattaactctacttgtcaggtgagtggtgattcaaaaaatatcgacgtatacctgggcaagtatccgacctccgcgtttaaggcgatcggtgataaatctgcctctaaggccttccagattaacctggaacagtgtgagccggggacttataccgtgcgtttcgacggtaacaccgtcgcagggcatcccgatttgctggcggtcagtggtgacggttctaccgccgcgacacaagggctcggtatcgagatcaccgatattaatggtaagcattttgccattgctaacaaggcgacaggtgaggaaccgacggtgaaagttgttggtgataagaaggctgtcttcaatttgcaagcgcgttatcgctcttacgccgatacggttaccgccggtctggctaacgcgaccagcccgttcaccatcgaatataaataa

SEQ ID NO: 100586 - protein, 177 aa, Edwardsiella tarda
MKKILLPVMALSASVMSGQVSAANGTVNFTGEIINSTCQVSGDSKNIDVYLGKYPTSAFKAIGDKSASKAFQINLEQCEPGTYTVRFDGNTVAGHPDLLAVSGDGSTAATQGLGIEITDINGKHFAIANKATGEEPTVKVVGDKKAVFNLQARYRSYADTVTAGLANATSPFTIEYK

SEQ ID NO: 100587 - DNA, 534 bp, Edwardsiella tarda
  CDS (1)..(534): transl_table=11
atgaagaaaattttactgcctgttatggccctgagcgctagcgtgatgagtggtcaggtcagcgccgccaacggtactgttaattttaccggtgaaatcattaactctacttgtcaggtgagtggtgattcaaaaaatatcgacgtatacctgggcaagtatccgacctccgcgtttaaggcgatcggtgataaatctgcctctaaggccttccagattaacctggaacagtgtgagccggggacttataccgtgcgtttcgacggtaacaccgtcgcagggcatcccgatttgctggcggtcagtggtgacggttctaccgccgcggcacaagggctcggtatcgagatcaccgatattaatggtaagcattttgccattgctaacaaggcgacaggtgaggaaccgacggtgaaagttgttggtgataagaaggctgtcttcaatttgcaagcgcgttatcgctcttacgccgatacggttaccgccggtctggctaacgcgaccagcccgttcaccatcgaatataaataa

SEQ ID NO: 100588 - protein, 177 aa, Edwardsiella tarda
MKKILLPVMALSASVMSGQVSAANGTVNFTGEIINSTCQVSGDSKNIDVYLGKYPTSAFKAIGDKSASKAFQINLEQCEPGTYTVRFDGNTVAGHPDLLAVSGDGSTAAAQGLGIEITDINGKHFAIANKATGEEPTVKVVGDKKAVFNLQARYRSYADTVTAGLANATSPFTIEYK

SEQ ID NO: 100589 - DNA, 549 bp, Escherichia coli
  CDS (1)..(549): transl_table=11
  misc_feature (514)..(514): n is a, g, c or t
  misc_feature (540)..(540): n is a, g, c or t
atgaaaattaaaactctggcaatcgttgttctgtcggctctgtccctcagttccgcagcggctctggccgatactacgacggtaaatggtgggaccgttcactttaaaggggaagttgttaacgccgcttgcgcagttgatgcaggctctgttgatcaaaccgttcagttgggccaggttcgtaccgctagcctgaagcaggctggagcaaccagctctgccgttggttttaacattcagctgaatgattgcgataccactgttgccacaaaagccgctgttgccttcttaggtacggcaattgatgctacgcatactgatgtactggctctgcagagttcagctgcgggtagcgcaacaaacgttggtgtgcagatcctggacagaacgggtgctgcgctggcgctggacggtgcgacatttagctcagaaacaaccctgaataacggaaccaacaccattccgttccaggcgcgttattttgcaaccggtgccgcaacccctggcgcaactnatgcggatgcgaacttcaaggttcantatcaataa

SEQ ID NO: 100590 - protein, 182 aa, Escherichia coli
  misc_feature (172)..(172): The Xaa at location 172 stands for Asn, Asp, His, or Tyr.
  misc_feature (180)..(180): The Xaa at location 180 stands for Gln, or His.
MKIKTLAIVVLSALSLSSAAALADTTTVNGGTVHFKGEVVNAACAVDAGSVDQTVQLGQVRTASLKQAGATSSAVGFNIQLNDCDTTVATKAAVAFLGTAIDATHTDVLALQSSAAGSATNVGVQILDRTGAALALDGATFSSETTLNNGTNTIPFQARYFATGAATPGATXADANFKVXYQ

SEQ ID NO: 100591 - DNA, 549 bp, Escherichia coli
  CDS (1)..(549): transl_table=11
atgaaaattaaaactctggcaatcgttgttctgtcggctctgtccctcagttccgcagcggctctggccgatactacgacggtaaatggtgggaccgttcactttaaaggggaagttgttaacgccgcttgcgcagttgatgcaggctctgttgatcaaaccgttcagttgggccaggttcgtaccgctagcctgaagcaggctggagcaaccagctctgccgttggttttaacattcagctgaatgattgcgataccactgttgccacaaaagccgctgttgccttcttaggtacggcaattgatgctacgcatactgatgtactggctctgcagagttcagctgcgggtagcgcaacaaacgttggtgtgcagatcctggacagaacgggtgctgcgctggcgctggacggtgcgacatttagttcagaaacaaccctgaataacggaaccaacaccattccgttccaggcgcgttattttgcaaccggtgccgcaacccctggcgcagctaatgcggatgcgaccttcaaggttcagtataaataa

SEQ ID NO: 100592 - protein, 182 aa, Escherichia coli
MKIKTLAIVVLSALSLSSAAALADTTTVNGGTVHFKGEVVNAACAVDAGSVDQTVQLGQVRTASLKQAGATSSAVGFNIQLNDCDTTVATKAAVAFLGTAIDATHTDVLALQSSAAGSATNVGVQILDRTGAALALDGATFSSETTLNNGTNTIPFQARYFATGAATPGAANADATFKVQYK

SEQ ID NO: 100593 - DNA, 540 bp, Escherichia coli
  CDS (1)..(540): transl_table=11
atgaaaaggaagagattatttctattagcgtcgttactgccaatgtttgctctggccggaaataaatggaataccacgctgcccggcggaaatatgcaatttcagggcgtcattattgcggaaacttgccgagttgaagctggtgataaacaaatgacggtcaatatggggcaaatcagcagtaaccggtttcatgcggtaggggaagatagcgcaccggtgccttttgttattcatttacgggaatgtagcacggtggtgagtgaacgtgtgggtgtggcgtttcacggtgtcgcggatggtaaaaatccggatgtgctttccgtgggagaggggccagggatagccacaaatattggcgtagcgttatttgatgatgaaggaaacctcgtaccgattaatcgtcctccagcaaactggaaacggctttactcaggctctacttcgctacatttcatcgccaaatatcgtgctaccgggcgtcgggttactggcggcatcgccaatgcccaggcctggttctctttaacctatcagtaa

SEQ ID NO: 100594 - protein, 179 aa, Escherichia coli
MKRKRLFLLASLLPMFALAGNKWNTTLPGGNMQFQGVIIAETCRVEAGDKQMTVNMGQISSNRFHAVGEDSAPVPFVIHLRECSTVVSERVGVAFHGVADGKNPDVLSVGEGPGIATNIGVALFDDEGNLVPINRPPANWKRLYSGSTSLHFIAKYRATGRRVTGGIANAQAWFSLTYQ

SEQ ID NO: 100595 - DNA, 573 bp, Escherichia coli
  CDS (1)..(573): transl_table=11
atgaagcgtaatattataggcggtgcattcactctggcatctttaatgctggccggacatgcactggcagaagatggtgttgttcacttcgtcggtgaaattgtcgacactacttgtgaagttacctccgatacagccgatcaaaccgtaccactgggtaaagtcagtaaaaatgctttttcaggtgtaggtagtctggcgtcaccacagcagttcagtattaaacttgaaaagtgcccggcaacctacactcaggcagccgttcgttttgatggtacagaagcgcctggcggcgacggcgacctgaaagtgggtacgccgcttacagcgggcaaccctggcgattttaccggtacaggacaagcgattgcggcaacgggtgtcggtattcgtatttttaaccagtcagataactcgcaggttaaactttataacgattctgcctataccgctatcgacgctgaaggcaaggctgaaatgaagtttattgcacgctatgtggcaaccaatgcaactgtaacggcgggtacggcgaacgccgattcacaatttactgtcgaatataagaaataa

SEQ ID NO: 100596 - protein, 190 aa, Escherichia coli
MKRNIIGGAFTLASLMLAGHALAEDGVVHFVGEIVDTTCEVTSDTADQTVPLGKVSKNAFSGVGSLASPQQFSIKLEKCPATYTQAAVRFDGTEAPGGDGDLKVGTPLTAGNPGDFTGTGQAIAATGVGIRIFNQSDNSQVKLYNDSAYTAIDAEGKAEMKFIARYVATNATVTAGTANADSQFTVEYKK

SEQ ID NO: 100597 - DNA, 528 bp, Serratia marcescens
  CDS (1)..(528): transl_table=11
atgaaaaaagtattattgcctttggccgccctggtattgtctgcaactgcttccaacgcaatggcagcaaacggcaacgttaaattcaccggtgaaattgtacagtccacctgtaaagttgttgataaagaccagaataaagaagtttacctgggtaaatatcctactaccgctttcccaactgccggttctaccagcggtgctaaagctttcgatattagcctggagaaatgtgaagcgggtaactacaccctgcgtttcgacggtaacacccctgcgggccacccagagctgttggctgtaactggcggcccggctggcgttggcgttgaaattctggataacaacggctctactctgcctatctctcaggaagtggctaccccagctaccgttactgttgctgctgatggcgataacccaggcgctgcgactttcaacctgcgcgctcgttacaaatccttccaggatctggtaactgccggtcaggcaaactctaacgctaccttcaccatcgaatacaaataa

SEQ ID NO: 100598 - protein, 175 aa, Serratia marcescens
MKKVLLPLAALVLSATASNAMAANGNVKFTGEIVQSTCKVVDKDQNKEVYLGKYPTTAFPTAGSTSGAKAFDISLEKCEAGNYTLRFDGNTPAGHPELLAVTGGPAGVGVEILDNNGSTLPISQEVATPATVTVAADGDNPGAATFNLRARYKSFQDLVTAGQANSNATFTIEYK

SEQ ID NO: 100599 - DNA, 546 bp, Escherichia coli
  CDS (1)..(546): transl_table=11
atgcggaaaattcaatttatccttggaatactggcggctgcgtcatcttctgctacgcttgcttatgacggtacaattacttttaatggaaaagttgttgatcaaacttgttctgttacgacagaaagcaagaatttgacagttacgctaccaactgtctcctctaattcattaacttcaaatggggaggtggcaggccttacccctttcacaatttcactggaaggctgtaccagtcctgcttcagcaggtgctgagaatgtgaaggcctattttgagcctaatgcgaccactgattatgatagtcataaccttaatattgcaagcggctctggtaatgcaacaaatgttcagatccagcttctgaatgccgatggtaccacaccgatattactcggtactgattctgctggtcaggcggtaacacctgttgctattaatggtacaaatgtgacgttacgttataacgcacggtactatgcaacgggtcaggccaccgccggcaacgtttctgccactgtgaattacaccatcgcttatcagtaa

SEQ ID NO: 100600 - protein, 181 aa, Escherichia coli
MRKIQFILGILAAASSSATLAYDGTITFNGKVVDQTCSVTTESKNLTVTLPTVSSNSLTSNGEVAGLTPFTISLEGCTSPASAGAENVKAYFEPNATTDYDSHNLNIASGSGNATNVQIQLLNADGTTPILLGTDSAGQAVTPVAINGTNVTLRYNARYYATGQATAGNVSATVNYTIAYQ

SEQ ID NO: 100601 - DNA, 543 bp, Escherichia coli
  CDS (1)..(543): transl_table=11
atgcggaaaattcaatttatccttggaatactggcggctgcgtcatcttctgctacgcttgcttatgacggtaaaattaattttactgggaaagtcgttgcccaaacttgttctgttgctactggaagtgagagtttgtcggtagtccttccgacggtttctacgactactttatctactgatgcaaaaacagcaggccttacaccatttactattcaactaacgggatgtacagtttctgccgcatcaggagttgataaagtaaatgcttatttcgaacctaatgcgaacacggattacaccactggtaatttaactaatacggcttcttctggtgcatctaatgttcagatacagctactgaatgcagatggagttactcccataaaactaggccaggatgctacaggacagaatgttacagccgtacagattgataacgcagctatgaaactgcgttataatgcacaatattatgccacagcgccggctacagctggtgatgtctctgccacagtaaattacaccatcgtttatcagtaa

SEQ ID NO: 100602 - protein, 180 aa, Escherichia coli
MRKIQFILGILAAASSSATLAYDGKINFTGKVVAQTCSVATGSESLSVVLPTVSTTTLSTDAKTAGLTPFTIQLTGCTVSAASGVDKVNAYFEPNANTDYTTGNLTNTASSGASNVQIQLLNADGVTPIKLGQDATGQNVTAVQIDNAAMKLRYNAQYYATAPATAGDVSATVNYTIVYQ

SEQ ID NO: 100603 - DNA, 540 bp, Escherichia coli
  CDS (1)..(540): transl_table=11
atgaaaaggaagagattatttctgttagcgtcgttgctgccaatgtttgctctggccggaaataaatggaataccacgctgcccggcggaaatatgcaatttcagggtgtcattattgcggaagcttgccggattgaagccggtgataaacaaatgacggtcaatatggggcaaatcagcagtaaccggtttcatgcggtaggggaagatagctcaccggtgccttttgttattcatttacgggaatgtagcacggtggtgagtgaacgtgtgggtgtggcgtttcacggtgtcgcggatggtaaaaatccggatgtgctttccgtgggagaggggccagggatagccaccaatattggcgtagcgttgtttgatgatgaaggaaacctcgtaccgattaaccgtcctccagcaaactggaaacggctttactcaggctctacttcgctacatttcatcgccaaatatcgtgctaccgggcgtcgggttactggcggcatcgccaatgcccaggcctggttctctttaacctatcagtaa

SEQ ID NO: 100604 - protein, 179 aa, Escherichia coli
MKRKRLFLLASLLPMFALAGNKWNTTLPGGNMQFQGVIIAEACRIEAGDKQMTVNMGQISSNRFHAVGEDSSPVPFVIHLRECSTVVSERVGVAFHGVADGKNPDVLSVGEGPGIATNIGVALFDDEGNLVPINRPPANWKRLYSGSTSLHFIAKYRATGRRVTGGIANAQAWFSLTYQ

SEQ ID NO: 100605 - DNA, 558 bp, Salmonella enteritidis
  CDS (1)..(558): transl_table=11
atgaaacataaattaatgacctctactattgcgagtctgatgtttgtcgctggcgcagcggttgcggctgatcctactccggtgagcgtgagtggcggtactattcatttcgaaggtaaactggttaatgcagcctgtgccgttagcactaaatccgccgatcaaacggtgacgctgggtcaataccgtaccgccagctttacggcgattggtaatacgactgcgcaggtgcctttctccatcgtcctgaatgactgcgatccgaaagtggcggccaccgctgccgtggctttctctggtcaggcagataacaccaaccctaatttgctggctgtctcctctgcggacaatagcaccaccgcaaccggcgtcgggattgagattcttgataatacctcttcaccgttgaagccggacggcgcgaccttctcggcgaagcaggcgctggttgaaggcaccaatacgctgcgttttaccgcacgctataaggcaaccgccaccgccacgacgccaggccaggctaatgccgacgccacctttatcatgaaatacgaataa

SEQ ID NO: 100606 - protein, 185 aa, Salmonella enteritidis
MKHKLMTSTIASLMFVAGAAVAADPTPVSVSGGTIHFEGKLVNAACAVSTKSADQTVTLGQYRTASFTAIGNTTAQVPFSIVLNDCDPKVAATAAVAFSGQADNTNPNLLAVSSADNSTTATGVGIEILDNTSSPLKPDGATFSAKQALVEGTNTLRFTARYKATATATTPGQANADATFIMKYE

SEQ ID NO: 100607 - DNA, 564 bp, Escherichia coli
  CDS (1)..(564): transl_table=11
atgaatatattacaaaaatttattctattaatgtttagatcattgttcatgatggtgatttcatataacgcactggctaacgatactgtagtggtcacatttacaggacaattattagcgaaaacgtgtgatattacaactggaagtaaagaccagccagtaaacatgggaacttatgacgtcaatgattttttgaatgtaggggatgtttctggcagccatacatttacgatcaatctggaaggatgtcctacaacaaccagtactgtttatagttcaggagtaagtgctaatgtgcagtttaccggggatgctgatgctataaataccactttattacgccttacttccagcgcggatagtgcaactggagtgggcatcgaaattttagacagtaatgataaaattatagcaattaatagtgaatcaggattcaaagagttaattttaaataataatggcgatgccagtttaacctttaaactccgctataagtcaactcagcaaaacgtacatgcgggacaggcgaacgcactattgtactttgatatagactatcagtga

SEQ ID NO: 100608 - protein, 187 aa, Escherichia coli
MNILQKFILLMFRSLFMMVISYNALANDTVVVTFTGQLLAKTCDITTGSKDQPVNMGTYDVNDFLNVGDVSGSHTFTINLEGCPTTTSTVYSSGVSANVQFTGDADAINTTLLRLTSSADSATGVGIEILDSNDKIIAINSESGFKELILNNNGDASLTFKLRYKSTQQNVHAGQANALLYFDIDYQ

SEQ ID NO: 100609 - DNA, 525 bp, Escherichia coli
  CDS (1)..(525): transl_table=11
atgaaaaaggttctgtttgccttatctgcgcttgcgctgacctctacttccgtattcgcagctgatgcgggcgacggtactgttaaattcaccggtgagattgttgacgccgcttgtgttgtgtctccagacactcaaaaacaagaagttgttctgggtcaggtgaacaagtctgtatttactgctatgggtgataaatccacagcaacgccgttcaaaatcagactggaaaactgcgatatctccactttcaaaaatgtggaaatcagctttaacggcgttggcgatgcagacaacagcaaactggtttctgtaagcactgaaccaggtgccgcaactggcgtaggtatcggtatttatgataacaccaataccctggttgacctgaatactggtaaatctgctactgtcctgaaagaaggtcagaccgttctgtatttcaccgctaactatgtctctaccaaagatgcagtaaccacgggttacggtaacgctgaagtcgtcttcaacctgacttacaactaa

SEQ ID NO: 100610 - protein, 174 aa, Escherichia coli
MKKVLFALSALALTSTSVFAADAGDGTVKFTGEIVDAACVVSPDTQKQEVVLGQVNKSVFTAMGDKSTATPFKIRLENCDISTFKNVEISFNGVGDADNSKLVSVSTEPGAATGVGIGIYDNTNTLVDLNTGKSATVLKEGQTVLYFTANYVSTKDAVTTGYGNAEVVFNLTYN

SEQ ID NO: 100611 - DNA, 549 bp, Escherichia coli
  CDS (1)..(549): transl_table=11
atgaaaattaaaactctggcaatcgttgttctgtcggctctgtccctcagttccacagcggctctggccgctgccacgacggttaatggtgggaccgttcactttaaaggggaagttgttaacgccgcttgcgcagttgatgcaggctctgttgatcaaaccgttcagttagggcaggttcgtaccgcatcgctggcacaagaaggagcaaccagttctgctgtcggttttaacattcaactgaacgattgtgacactactgttgcagacaaagcagctattgccttccttggtaccgcaattgatggaaatcatcctaacgtattggctctgcagagttcagctgcgggtagcgcaacaaatgttggtgtgcagattctggacagaacaggcaatgctctgacgctggacggtgcgacatttagtgcacaaacaaccctgaataacggtaccaacaccattccgttccaggcgcgttattatgcaatcggcgaggcaaccccgggtgcagctaatgcggatgcgaccttcaaggttcagtatcaataa

SEQ ID NO: 100612 - protein, 182 aa, Escherichia coli
MKIKTLAIVVLSALSLSSTAALAAATTVNGGTVHFKGEVVNAACAVDAGSVDQTVQLGQVRTASLAQEGATSSAVGFNIQLNDCDTTVADKAAIAFLGTAIDGNHPNVLALQSSAAGSATNVGVQILDRTGNALTLDGATFSAQTTLNNGTNTIPFQARYYAIGEATPGAANADATFKVQYQ

SEQ ID NO: 100613 - DNA, 540 bp, Edwardsiella ictaluri
  CDS (1)..(540): transl_table=11
atgataatgaaaaaatttttactgcctgttatggttctggccgctgccgcggtgagtggccaggcaagtgcagctaacggtaaagttgagtttacaggtgaaatcgttaattctacctgtcaagtaagcagcgactctcaaaatattaatgtgtatttaggtaaatatccgacctccgcatttaaaacggttggcgataagtctgcatccaaggctttccagattaacctggagcagtgtgagccgggaacttacaccgtccgtttcgatggcaacaccgttgccggtcatcctgacctgctggccgtctccagtagtggcgcaacagcggcggcgaaaggcgtgggtattgaaattacggacgttaacggcaaagcgttcccgatcgccgatcagagccagggtgatgtgcccacggtgacggtcgttagcgataagaaagcgatatttaacctgcaggcacgctatcgctcttatgttaatacggttaccgccggtctggccaacgcgaccagtccgttcaccatcgaatataaataa

SEQ ID NO: 100614 - protein, 179 aa, Edwardsiella ictaluri
MIMKKFLLPVMVLAAAAVSGQASAANGKVEFTGEIVNSTCQVSSDSQNINVYLGKYPTSAFKTVGDKSASKAFQINLEQCEPGTYTVRFDGNTVAGHPDLLAVSSSGATAAAKGVGIEITDVNGKAFPIADQSQGDVPTVTVVSDKKAIFNLQARYRSYVNTVTAGLANATSPFTIEYK

SEQ ID NO: 100615 - DNA, 540 bp, Edwardsiella tarda
  CDS (1)..(540): transl_table=11
atgataatgaagaaaattttactgcctgttatggctctggccgccgccgctgtgagtggtcaggcaagcgcagctaacggtaaagttgagtttacgggtgaaatcgttaactccacctgccaggtaagcagcgactctcaaaatatcaacgtgtatttgggtaaatatccgacctctgcatttaaagcggttggcgataagtccgcatccaaggctttccagatcaacctggagcagtgtgagccggggagctacaccgtacgtttcgatggcaataccgttgccggtcatcctgacctgctggccgtctccagcagcggcgccaccgcggcggcgaaaggcgtgggtatcgaaattacggacgttaacggcaagccgttcccgatcgccgatcagagccagggcgatgtgcccacggtgacggttgttagcgataagaaggcgatatttaacctgcaggcgcgctatcgctcttacgccaacacggttacagccggtctggccaacgcgaccagcccgttcaccatcgaatataaataa

SEQ ID NO: 100616 - protein, 179 aa, Edwardsiella tarda
MIMKKILLPVMALAAAAVSGQASAANGKVEFTGEIVNSTCQVSSDSQNINVYLGKYPTSAFKAVGDKSASKAFQINLEQCEPGSYTVRFDGNTVAGHPDLLAVSSSGATAAAKGVGIEITDVNGKPFPIADQSQGDVPTVTVVSDKKAIFNLQARYRSYANTVTAGLANATSPFTIEYK

SEQ ID NO: 100617 - DNA, 525 bp, Escherichia coli
  CDS (1)..(525): transl_table=11
atgaagcgaacaatacttgcgttatgcctgctgcctctttccttttcgtcattcgcggcaaccacggatttagggccgaaaggaacattgaaattcacccttaaaatcagccagggtgcttgcgaactggtgaaagacagcgttgaggttgacatgggcaccgcggttctcaaaaagccggtaagaatcggaacggaaattaatcccactcctttttccatcggcctgaaaaactgtagcgaagtggtcagagcctacgtgactatggacggtacacccaatgcagacgactcaaatctttttgcgctggatgcgggtggcgctacaggcgttgggctgaaaatcaaaaccgctgctggagtacaacagttcccggaaaatacaacgccgacaccggttgagtttgcaattaacggtgatggcgcacatcaactgaactatatcgccagctacgtgcctattcgcgccgatgcaactattggtcgcgcagatgcaacggtcgactttactgtacagtacgaataa

SEQ ID NO: 100618 - protein, 174 aa, Escherichia coli
MKRTILALCLLPLSFSSFAATTDLGPKGTLKFTLKISQGACELVKDSVEVDMGTAVLKKPVRIGTEINPTPFSIGLKNCSEVVRAYVTMDGTPNADDSNLFALDAGGATGVGLKIKTAAGVQQFPENTTPTPVEFAINGDGAHQLNYIASYVPIRADATIGRADATVDFTVQYE

SEQ ID NO: 100619 - DNA, 555 bp, Escherichia coli
  CDS (1)..(555): transl_table=11
atgaaaattaaaactctggcaattgttgttctgtcggctctgtccctgagttctacagcggctctggctgatactacacccacgacggtaaatggtgggaccgttcactttaaaggggaagttgttaacgccgcttgcgcagttgatgcaggctctgttgatcaaaccgttcagttaggacaggttcgtaccgccactttgaagcaggctggagcaaccagctctgctgtcggttttaacattcagctgaatgattgcgataccattgttgccacaaaagccgctgttgccttcttggggacggcgattgacagtactcatcctaaagtcctggctctacagagttcagctgcgggtagcgcaacaaacgttggcgtgcagattctggacagaacaggtaatgagctgacgctggacggtgcgacatttagtgcagaaacaaccctgaataacggtactaacaccattccgttccaggcgcgttattttgcaaccggtgctgcaaccccaggtgctgctaatgcggatgcgaccttcaaggttcagtatcaataa

SEQ ID NO: 100620 - protein, 184 aa, Escherichia coli
MKIKTLAIVVLSALSLSSTAALADTTPTTVNGGTVHFKGEVVNAACAVDAGSVDQTVQLGQVRTATLKQAGATSSAVGFNIQLNDCDTIVATKAAVAFLGTAIDSTHPKVLALQSSAAGSATNVGVQILDRTGNELTLDGATFSAETTLNNGTNTIPFQARYFATGAATPGAANADATFKVQYQ

SEQ ID NO: 100621 - DNA, 549 bp, Escherichia coli
  CDS (1)..(549): transl_table=11
atgaaaattaaaactctggcaatcgttgttctgtcggctctgtccctcagttccgcagcggctctggccgatactacgacggtaaatggtgggaccgttcactttaaaggggaagttgttaacgccgcttgcgcagttgatgcaggctctgttgatcaaaccgttcagttaggacaggttcgtaccgctagcctgaagcaggctggagcaaccagctctgccgttggttttaacattcagctgaatgattgcgataccactgttgccacaaaagccgctgttgccttcttaggtacggcaattgatgctacgcatactaatgtactggctctgcagagttcagctgcgggtagcgcaacaaacgttggtgtgcagatcctggacagaacgggtgctgcgctggcgctggacggtgcgacatttagttcagaaacaaccctgaataacggaaccaacaccattccgttccaggcgcgttattttgcaaccggtgccgcaaccccgggtgctgctaatgcggatgcgaccttcaaggttcagtatcaataa

SEQ ID NO: 100622 - protein, 182 aa, Escherichia coli
MKIKTLAIVVLSALSLSSAAALADTTTVNGGTVHFKGEVVNAACAVDAGSVDQTVQLGQVRTASLKQAGATSSAVGFNIQLNDCDTTVATKAAVAFLGTAIDATHTNVLALQSSAAGSATNVGVQILDRTGAALALDGATFSSETTLNNGTNTIPFQARYFATGAATPGAANADATFKVQYQ

SEQ ID NO: 100623 - DNA, 549 bp, Escherichia coli
  CDS (1)..(549): transl_table=11
atgaaaattaaaactctggcaattgttgttctgtcggctctgtccctcagttccacagcggctctggccgctgccacgacggttaatggtgggaccgttcactttaaaggggaagttgttaacgccgcttgcgcagttgatgcaggctctgttgatcaaaccgttcagttaggtcaggttcgtaccgcatcgctggcgcaggaaggagcaaccagttctgctgtcggttttaacattcaactgaacgattgtgacactactgttgcagacaaagcagctattgccttccttggtaccgcaattgatggaactcatcctaacgtattagctttgcagagttcagctgcgggtagtgcaacaaaagttggtgtgcagatcctggacagaacgggtgctgcgctggcgctggacggtgcgacatttagtgcacaaacaaccctgaataacggtaccaacaccattccgttccaggcgcgttattatgcaatcggtgaggcaaccccgggtgctgctaatgcggatgcgaccttcaaggttcagtatcaataa

SEQ ID NO: 100624 - protein, 182 aa, Escherichia coli
MKIKTLAIVVLSALSLSSTAALAAATTVNGGTVHFKGEVVNAACAVDAGSVDQTVQLGQVRTASLAQEGATSSAVGFNIQLNDCDTTVADKAAIAFLGTAIDGTHPNVLALQSSAAGSATKVGVQILDRTGAALALDGATFSAQTTLNNGTNTIPFQARYYAIGEATPGAANADATFKVQYQ

SEQ ID NO: 100625 - DNA, 555 bp, Escherichia coli
  CDS (1)..(555): transl_table=11
atgaaaattaaaactctggcaattgttgttctgtcggctctgtccttgagttctacagcggctctggctgatactacacccacgacggtaaatggtgggaccgttcactttaaaggggaagttgttaacgccgcttgcgcagttgatgcaggctctgttgatcaaaccgttcagttgggccaggttcgtaccgccactttgaagcaggctggagcaaccagctctgctgtcggttttaacattcagctgaatgattgcgataccagtgttgccacaaaagccgctgttgccttcttggggactgcgattgacagtgctcatcctaaagtactggctctgcagagttcagctgcgggtagcgcaacaaatgttggcgtgcagattctggacagaacaggaaatgagctgacgctggacggtgcgacatttagtgcacaaacaaccctgaataacggtaccaacaccattccgttccaggcgcgttattatgcaatcggcgaggcaaccccgggtgctgctaatgcggatgcgaccttcaaggttcagtatcaataa

SEQ ID NO: 100626 - protein, 184 aa, Escherichia coli
MKIKTLAIVVLSALSLSSTAALADTTPTTVNGGTVHFKGEVVNAACAVDAGSVDQTVQLGQVRTATLKQAGATSSAVGFNIQLNDCDTSVATKAAVAFLGTAIDSAHPKVLALQSSAAGSATNVGVQILDRTGNELTLDGATFSAQTTLNNGTNTIPFQARYYAIGEATPGAANADATFKVQYQ

SEQ ID NO: 100627 - DNA, 549 bp, Escherichia coli
  CDS (1)..(549): transl_table=11
atgaaaattaaaactctggcaatcgttgttctgtcggctctgtccctcagttccgcagcggctctggccgatactacgacggtaaatggtgggaccgttcactttaaaggggaagttgttaacgccgcttgtgcggttgatgccggctctgttgatcaaaccgttcagttgggacaggttcgtaccgctagcctgaagcaggctggagcaaccagctctgccgttggttttaacattcagctgaatgattgcgataccactgttgccacaaaagccgctgttgccttcttaggtacggcaattgatgctacgcgtactaatgttctggctctgcagagttctgctgcaggtagtgcaacaaacgttggcgtgcagatcctggacagaacaggcaatgctctgacgctggacggtgcgacatttagtgcacaaacaaccctgaataacggtaccaacaccattccgttccaggcgcgttattatgcaatcggcgaggcaaccccgggtgcagctaatgcggatgcgaccttcaaggttcagtatcaataa

SEQ ID NO: 100628 - protein, 182 aa, Escherichia coli
MKIKTLAIVVLSALSLSSAAALADTTTVNGGTVHFKGEVVNAACAVDAGSVDQTVQLGQVRTASLKQAGATSSAVGFNIQLNDCDTTVATKAAVAFLGTAIDATRTNVLALQSSAAGSATNVGVQILDRTGNALTLDGATFSAQTTLNNGTNTIPFQARYYAIGEATPGAANADATFKVQYQ

SEQ ID NO: 100629 - DNA, 555 bp, Escherichia coli
  CDS (1)..(555): transl_table=11
atgaaaattaaaactctggcaattgttgttctgtcggctctgtccgtgagttctacagcggctctggctgatactacacccacgacggtaaatggtgggaccgttcactttaaaggggaagttgttaacgccgcttgcgcagttgatgcaggctctgttgatcaaaccgttcagttaggacaggttcgtaccgccactttgaagcaggctggagcaaccagctctgctgtcggttttaacattcagctgaatgattgcgataccactgttgccacaaaagccgctgttgccttcttggggacggcgattgacagtactcatcctaaagtcctggctctacagagttcagctgcgggtagcgcaacaaacgttggcgtgcagattctggacagaacaggtaatgagctgacgctggacggtgcgacatttagtgcagaaacaaccctgaataacggtactaacaccattccgttccaggcgcgttattttgcaaccggtgctgcaaccccaggtgctgctaatgcggatgcgaccttcaaggttcagtatcaataa

SEQ ID NO: 100630 - protein, 184 aa, Escherichia coli
MKIKTLAIVVLSALSVSSTAALADTTPTTVNGGTVHFKGEVVNAACAVDAGSVDQTVQLGQVRTATLKQAGATSSAVGFNIQLNDCDTTVATKAAVAFLGTAIDSTHPKVLALQSSAAGSATNVGVQILDRTGNELTLDGATFSAETTLNNGTNTIPFQARYFATGAATPGAANADATFKVQYQ

SEQ ID NO: 100631 - DNA, 534 bp, Edwardsiella tarda
  CDS (1)..(534): transl_table=11
atgaagaaaattttactgcctgttatggctctggccgccgccgctgtgagtggtcaggcaagcgcagctaacggtaaagttgagtttacgggtgaaatcgttaactccacctgccaggtaagcagcgactctcaaaatatcaacgtgtatttgggtaaatatccgacctctgcatttaaagcggttggcgataagtccgcatccaaggctttccagatcaacctggagcagtgtgagccggggagctacaccgtacgtttcgatggcaataccgttgccggtcatcctgacctgctggccgtctccagcagcggtgccaccgcggcggcgaaaggcgtgggtatcgaaattacggacgttaacggcaagccgttcccgatcgccgatcagagccagggcgatgtgcccacggtgacggttgttagcgataagaaggcgatatttaacctgcaggcgcgctatcgctcttacgccaacacggttacagccggtctggccaacgcgaccagcccgttcaccatcgaatataaataa

SEQ ID NO: 100632 - protein, 177 aa, Edwardsiella tarda
MKKILLPVMALAAAAVSGQASAANGKVEFTGEIVNSTCQVSSDSQNINVYLGKYPTSAFKAVGDKSASKAFQINLEQCEPGSYTVRFDGNTVAGHPDLLAVSSSGATAAAKGVGIEITDVNGKPFPIADQSQGDVPTVTVVSDKKAIFNLQARYRSYANTVTAGLANATSPFTIEYK

SEQ ID NO: 100633 - DNA, 555 bp, Citrobacter freundii
  CDS (1)..(555): transl_table=11
atgaaacgtaaattaatgacctcttctgttattgccagcctgatgttagtcgcaggtgctgcggttgcagccgatccggtaagcgtgagcggcggtactgtgcattttgaaggtgaactggtcaatgcagcctgtgcagtcagtactcagtcatccgatcaggttgtcaccttaggccagtatcgtactgccagttttgccgcagtaggtgatacaacggcacaaattccgttctccatcgtgctgaacgattgtgatccgaaagttgctgcaaccgcagccgttgctttctctggtcaatccgatattaccaacaacaacctgctggctgtcacttctgcagataacggtaccactgccagcggtgtcgggattgaaattctggacaatacgtccaccgcgctgaagccagatggtgccaccttctctaccgctcaggctctggtagaagggaccaacaccctgcgtttctctgcgcgttacaaagccactgccaccagcgctacgccgggtcaggcaaatgccgacgcgacgttcatcatgaagtacgaataa

SEQ ID NO: 100634 - protein, 184 aa, Citrobacter freundii
MKRKLMTSSVIASLMLVAGAAVAADPVSVSGGTVHFEGELVNAACAVSTQSSDQVVTLGQYRTASFAAVGDTTAQIPFSIVLNDCDPKVAATAAVAFSGQSDITNNNLLAVTSADNGTTASGVGIEILDNTSTALKPDGATFSTAQALVEGTNTLRFSARYKATATSATPGQANADATFIMKYE

SEQ ID NO: 100635 - DNA, 591 bp, Escherichia coli
  CDS (1)..(591): transl_table=11
atgagaaaaattacgtctctgatcatggctgttactctaatgaatagctcagccttcgctgcgatcggtagtaacggccaagcgaataacaatgatgcaagccaggctgaattgcatttcactggtaagttgacttccagtctatgccaggttgctacatcagatgttaaaaaagaaattgatctaggggaacttagcaaagctgcgttaattgcatcaggtcgagggccatcgcagtctttttcagttagtttggtaaactgtgaccccacaataaatacaattagttatgctttgcaggataaaaacggcagtgtaggtaattatcttgtaaaccagtcaggtgacacgatggctaagggggttggtgtctatattgaaaataatttaaatagccctttgaaggttgatggttcacttaatactgttggtgttcagaaagatggtgctacggctttacctgatcaggttattccgttgactgcttatattggtagcacaactccgggagctgtggccgattttgctacagtaactcctggcttagttgatgcaaatgcagtaatgactattcgtgcgagcgcaccataa

SEQ ID NO: 100636 - protein, 196 aa, Escherichia coli
MRKITSLIMAVTLMNSSAFAAIGSNGQANNNDASQAELHFTGKLTSSLCQVATSDVKKEIDLGELSKAALIASGRGPSQSFSVSLVNCDPTINTISYALQDKNGSVGNYLVNQSGDTMAKGVGVYIENNLNSPLKVDGSLNTVGVQKDGATALPDQVIPLTAYIGSTTPGAVADFATVTPGLVDANAVMTIRASAP

SEQ ID NO: 100637 - DNA, 549 bp, Escherichia coli
  CDS (1)..(549): transl_table=11
atgaaaattaaaactctggcaatcgttgttctgtcggctctgtccctcagttccgcagcggctctggccgatactacgacggtaaatggtgggaccgttcactttaaaggggaagttgttaatgccgcttgcgcagttgatgcaggctctgttgatcaaaccgttcagttaggacaggttcgtaccgcatcgctggcacaagaaggagcaaccagttctgctgtcggttttaacattcaactgaacgattgtgacactactgttgcagacaaagcagctattgccttccttggtaccgcaattgatggcactcatcctaacgtattagctttgcagagttcagctgcgggtagcgcaacaaaagttggtgtgcagatcctggacagaacgggcgctgcgctggcgctggacggtgcgacatttagtgcacaaacaaccctgaataacggaaccaacaccattccgttccaggcgcgttattttgcaaccggtgccgcaacccctggcgcagctaatgcggatgcgaccttcaaggttcagtatcaataa

SEQ ID NO: 100638 - protein, 182 aa, Escherichia coli
MKIKTLAIVVLSALSLSSAAALADTTTVNGGTVHFKGEVVNAACAVDAGSVDQTVQLGQVRTASLAQEGATSSAVGFNIQLNDCDTTVADKAAIAFLGTAIDGTHPNVLALQSSAAGSATKVGVQILDRTGAALALDGATFSAQTTLNNGTNTIPFQARYFATGAATPGAANADATFKVQYQ

SEQ ID NO: 100639 - DNA, 549 bp, Escherichia coli
  CDS (1)..(549): transl_table=11
atgaaaattaaaactctggcaatcgttgttctgtcggctctgtccctcagttccgcagcggctctggccgatactacgacggtaaatggtgggaccgttcactttaaaggggaagttgttaacgccgcttgtgcggttgatgccggctctgttgatcaaaccgttcagttgggacaggttcgtaccgctagcctgaagcaggctggagcaaccagctctgccgttggttttaacattcagctgaatgattgcgataccactgttgccacaaaagccgctgttgccttcttaggtacggcaattgatgctacgcgtactgatgttctggctctgcagagttctgctgcaggtagtgcaacaaacgttggcgtgcagatcctggacagaacaggcaatgctctgacgctggacggtgcgacatttagtgcacaaacaaccctgaataacggtaccaacaccattccgttccaggcgcgttattttgcaatcggcgaggcaaccccgggtgcagctaatgcggatgcgaccttcaaggttcagtatcaataa

SEQ ID NO: 100640 - protein, 182 aa, Escherichia coli
MKIKTLAIVVLSALSLSSAAALADTTTVNGGTVHFKGEVVNAACAVDAGSVDQTVQLGQVRTASLKQAGATSSAVGFNIQLNDCDTTVATKAAVAFLGTAIDATRTDVLALQSSAAGSATNVGVQILDRTGNALTLDGATFSAQTTLNNGTNTIPFQARYFAIGEATPGAANADATFKVQYQ

SEQ ID NO: 100641 - DNA, 549 bp, Escherichia coli
  CDS (1)..(549): transl_table=11
atgaaaattaaaactctggcaatcgttgttctgtcggctctgtccctcagttccgcagcggctctggccgatactacgacggtaaatggtgggaccgttcactttaaaggggaagttgttaacgccgcttgcgcagttgatgcaggctctgttgatcaaaccgttcagttgggccaggttcgtaccgctagcctgaagcaggctggagcaaccagctctgccgttggttttaacattcagctgaatgattgcgataccactgttgccacaaaagccgctgttgccttcttaggtacggcaattgatgctacgcatactgatgtactggctctgcagagttcagctgcgggtagcgcaacaaacgttggtgtgcagatcctggacagaacgggtgctgcgctggcgctggacggtgcgacatttagttcagaaacaaccctgaataacggaaccaacaccattccgttccaggcgcgttattttgcaaccggtgccgcaaccccgggtgctgctaatgcggatgcgaccttcaaggttcagtatcaataa

SEQ ID NO: 100642 - protein, 182 aa, Escherichia coli
MKIKTLAIVVLSALSLSSAAALADTTTVNGGTVHFKGEVVNAACAVDAGSVDQTVQLGQVRTASLKQAGATSSAVGFNIQLNDCDTTVATKAAVAFLGTAIDATHTDVLALQSSAAGSATNVGVQILDRTGAALALDGATFSSETTLNNGTNTIPFQARYFATGAATPGAANADATFKVQYQ

SEQ ID NO: 100643 - DNA, 549 bp, Escherichia coli
  CDS (1)..(549): transl_table=11
atgaaaattaaaactctggcaatcgttgttctgtcggctctgtccctcagttctacagcggctctggccgctgccacgacggttaatggtgggaccgttcactttaaaggggaagttgttaacgccgcttgcgcagttgatgcaggctctgttgatcaaaccgttcagttaggacaggttcgtaccgcatcgctggcacaggaaggagcaaccagttctgctgtcggttttaacattcagctgaatgattgcgataccaatgttgcatctaaagccgctgttgcctttttaggtacagcaattgatgctacgcgtactgatgtactggctctgcagagttctgctgcaggtagtgcaacaaacgttggcgtgcagatcctggacagaacaggcaatgctctgacgctggacggtgcgacatttagtgcacaaacaaccctgaataacggtaccaacaccattccgttccaggcgcgttattatgcaatcggcgaggcaaccccgggtgctgctaatgcggatgcgaccttcaaggttcagtatcaataa

SEQ ID NO: 100644 - protein, 182 aa, Escherichia coli
MKIKTLAIVVLSALSLSSTAALAAATTVNGGTVHFKGEVVNAACAVDAGSVDQTVQLGQVRTASLAQEGATSSAVGFNIQLNDCDTNVASKAAVAFLGTAIDATRTDVLALQSSAAGSATNVGVQILDRTGNALTLDGATFSAQTTLNNGTNTIPFQARYYAIGEATPGAANADATFKVQYQ

SEQ ID NO: 100645 - DNA, 549 bp, Escherichia coli
  CDS (1)..(549): transl_table=11
atgaaaattaaaactctggcaatcgttgttctgtcggctctgtccctcagttctacagcggctctggccgctgccacgacggttaatggtgggaccgttcactttaaaggggaagttgttaacgccgcttgcgcagttgatgcaggctctgttgatcaaaccgttcagttaggacaggttcgtaccgcatctctggcacaggacggagcaaccagttctgctgtcggttttaacattcagctgaatgattgcgataccaatgttgcatcaaaagccgctgttgcctttttaggtacggcgattgatgcgactcataccaacgttctggctctgcagagttctgctgcaggtagtgcaacaaacgttggtgtgcagatcctggacagaacgggtgctgcgctgacgctggacggtgcgacattcagtgagcaaacaaccctgaataacggtactaacaccattccgttccaggcgcgttattatgcaatcggcgaggcaaccccgggtgcagctaatgcggatgcgaccttcaaggttcagtatcaataa

SEQ ID NO: 100646 - protein, 182 aa, Escherichia coli
MKIKTLAIVVLSALSLSSTAALAAATTVNGGTVHFKGEVVNAACAVDAGSVDQTVQLGQVRTASLAQDGATSSAVGFNIQLNDCDTNVASKAAVAFLGTAIDATHTNVLALQSSAAGSATNVGVQILDRTGAALTLDGATFSEQTTLNNGTNTIPFQARYYAIGEATPGAANADATFKVQYQ

SEQ ID NO: 100647 - DNA, 549 bp, Escherichia coli
  CDS (1)..(549): transl_table=11
atgaaaattaaaactctggcaatcgttgttttgtcggctctgtccctcagttccgcagcggctctggctgatactacgacggtaaatggtgggaccgttcactttaaaggggaagttgttaatgccgcttgcgcagttgatgcaggctctgttgatcaaaccgttcagttaggacaggttcgtaccgctagcctgaagcaggctggagcaaccagctctgctgttggttttaacattcagctgaatgattgcgataccactgttgccacaaaagccgctgttgccttcttaggtacggcaattgatgctacgcatactgatgtactggctctgcagagttctgctgcaggtagcgcaacaaacgttggtgtgcaaattctggacagaaccggtgctgcgctggcgctggacggtgcgacatttagtgcagaaacaaccctgaataacggtactaacaccattccgttccaggcgcgttattttgcaaccgctgctgcaaccccgggtgctgctaatgcggatgcgaccttcaaggttcaatatcaataa

SEQ ID NO: 100648 - protein, 182 aa, Escherichia coli
MKIKTLAIVVLSALSLSSAAALADTTTVNGGTVHFKGEVVNAACAVDAGSVDQTVQLGQVRTASLKQAGATSSAVGFNIQLNDCDTTVATKAAVAFLGTAIDATHTDVLALQSSAAGSATNVGVQILDRTGAALALDGATFSAETTLNNGTNTIPFQARYFATAAATPGAANADATFKVQYQ

SEQ ID NO: 100649 - DNA, 549 bp, Escherichia coli
  CDS (1)..(549): transl_table=11
atgaaaattaaaactctggcaatcgttgttctgtcggctctgtccctcagttccgcagcggctctggctgatactacgacggtaaatggtgggaccgttcactttaaaggggaagttgttaacgccgcttgcgcagttgatgcaggctctgctgatcaaaccgttcagttagggcaggttcgtaccgcatcgctggcacaagaaggagcaaccagttctgctgtcggttttaacattcaactgaacgattgtgacactactgttgcagataaagctgctattgccttccttggtaccgcaattgatggaactcatcctaacgtattagctttgcagagttcagctgcgggtagcgcaacaaaagttggtgtgcagatcctggacagaacgggtgctgcgctggcgctggacggtgcgacatttagtgcacaaacaaccctgaataacggaaccaacaccattccgttccaggcgcgttattttgcaaccggtgccgcaaccccaggtgctgctaatgcggatgcgaccttcaaggttcagtatcaataa

SEQ ID NO: 100650 - protein, 182 aa, Escherichia coli
MKIKTLAIVVLSALSLSSAAALADTTTVNGGTVHFKGEVVNAACAVDAGSADQTVQLGQVRTASLAQEGATSSAVGFNIQLNDCDTTVADKAAIAFLGTAIDGTHPNVLALQSSAAGSATKVGVQILDRTGAALALDGATFSAQTTLNNGTNTIPFQARYFATGAATPGAANADATFKVQYQ

SEQ ID NO: 100651 - DNA, 546 bp, Escherichia coli
  CDS (1)..(546): transl_table=11
atgcagaaaattcaatttatccttggaatactggcggctgcgtcatcttctgctacgcttgcttatgacggtacaattacttttaatggaaaagttgttgatcaaacttgttctgttacgacagaaagcaagaatttgacagttacgctaccaactgtctcctctaattcattaacttcaaatggggaggtggcaggccttacccctttcacaatttcactggaaggctgtaccagtcctgcttcagcaggtgctgagaatgtgaaggcctattttgagcctaatgcgaccactgattatgatagtcataaccttaatattgcaagcggctctggtaatgcaacaaatgttcagatccagcttctgaatgccgatggtaccacaccgatattactcggtactgattctgctggtcaggcggtaacacctgttgctattaatggtacaaatgtgacgttacgttataacgcacggtactatgcaacgggtcaggccaccgccggcaacgtttctgccactgtgaattacaccatcgcttatcagtaa

SEQ ID NO: 100652 - protein, 181 aa, Escherichia coli
MQKIQFILGILAAASSSATLAYDGTITFNGKVVDQTCSVTTESKNLTVTLPTVSSNSLTSNGEVAGLTPFTISLEGCTSPASAGAENVKAYFEPNATTDYDSHNLNIASGSGNATNVQIQLLNADGTTPILLGTDSAGQAVTPVAINGTNVTLRYNARYYATGQATAGNVSATVNYTIAYQ

SEQ ID NO: 100653 - DNA, 543 bp, Escherichia coli
  CDS (1)..(543): transl_table=11
atgcagaaaattcaatttatccttggaatactggcggctgcatcatcttctgctacgcttgcttatgacggtacaattacttttaatggaaaggttgttgatcaaacttgttctgttacaacagaaagcaagaatttgacagttacgttaccaactgtctctgctaattcattagcttcaagcggaaaagtggtgggacttactcctttcacaattttgctggaagggtgcaatacgcctgccgtgacaggtgctcagaatgtaaatgcttatttcgaacctaatgcgaacacggattataccactggtaatttaactaatacggcttcttctggtgcatctaatgttcagattcagctactgaatgcagatggggttaaagctattaaacttggtcaggctgctgcagctcagagtgtggatacagttgctattaatgatgcaaatgtgacattgcgttataacgcgcagtactacgcaacgggtgtggctactgcaggcgttgttacttctacagttaattacaccatcgcttatcagtaa

SEQ ID NO: 100654 - protein, 180 aa, Escherichia coli
MQKIQFILGILAAASSSATLAYDGTITFNGKVVDQTCSVTTESKNLTVTLPTVSANSLASSGKVVGLTPFTILLEGCNTPAVTGAQNVNAYFEPNANTDYTTGNLTNTASSGASNVQIQLLNADGVKAIKLGQAAAAQSVDTVAINDANVTLRYNAQYYATGVATAGVVTSTVNYTIAYQ

SEQ ID NO: 100655 - DNA, 558 bp, Salmonella typhimurium
  CDS (1)..(558): transl_table=11
atgagacataaattaatgacctctactattgcgagtctgatgtttgtcgctgccgcagcggttgcggctgatcctactccggtgagcgtggtgggcgggactattcatttcgaaggtaaactggttaatgcagcctgtgccgtcagcactaaatccgccgatcaaacggtgacgctgggtcaataccgtaccgccagctttacggcgattggtaatacgactgcgcaggtgcctttctccatcgtcctgaatgactgcgatccgaaagtggcggccaccgctgccgtggctttctctggtcaggcagataacaccacccctaatttgctggctgtgtcctctgcggacaatagcactaccgcaaccggcgtcgggattgagattcttgataatacctcttcaccgttgaagccggacggcgcgaccttctcggcgaagcagtcgctggttgaaggcaccaatacgctgcgttttaccgcacgctataaggcaaccgccgccgccacgacgccaggccaggctaatgccgacgccacctttatcatgaaatacgaataa

SEQ ID NO: 100656 - protein, 185 aa, Salmonella typhimurium
MRHKLMTSTIASLMFVAAAAVAADPTPVSVVGGTIHFEGKLVNAACAVSTKSADQTVTLGQYRTASFTAIGNTTAQVPFSIVLNDCDPKVAATAAVAFSGQADNTTPNLLAVSSADNSTTATGVGIEILDNTSSPLKPDGATFSAKQSLVEGTNTLRFTARYKATAAATTPGQANADATFIMKYE

SEQ ID NO: 100657 - DNA, 558 bp, Salmonella typhimurium
  CDS (1)..(558): transl_table=11
atgaaacataaattaatgacctctactattgcgagtctgatgtttgtcgctggcgcagcggttgcggctgatcctactccggtgagcgtgagtggcggtactattcatttcgaaggtaaactggttaatgcagcctgtgccgtcagcactaaatccgccgatcaaacggtgacgctgggtcaataccgtaccgccagctttacggcgattggtaatacgactgcgcaggtgcctttctccatcgtcctgaatgactgcgatccgaaagtggcggccaacgctgccgtggctttctctggtcaggcagataacaccaaccctaatttgctggctgtctcctctgcggacaatagcactaccgcaaccggcgtcgggattgagattcttgataatacctcttcaccgttgaagccggacggcgcgaccttctcggcgaagcagtcgctggttgaaggcaccaatacgctgcgttttaccgcacgctataaggcaaccgccgccgccacgacgccaggccaggctaatgccgacgccacctttatcatgaaatacgaataa

SEQ ID NO: 100658 - protein, 185 aa, Salmonella typhimurium
MKHKLMTSTIASLMFVAGAAVAADPTPVSVSGGTIHFEGKLVNAACAVSTKSADQTVTLGQYRTASFTAIGNTTAQVPFSIVLNDCDPKVAANAAVAFSGQADNTNPNLLAVSSADNSTTATGVGIEILDNTSSPLKPDGATFSAKQSLVEGTNTLRFTARYKATAAATTPGQANADATFIMKYE

SEQ ID NO: 100659 - DNA, 543 bp, Serratia marcescens
  CDS (1)..(543): transl_table=11
atgaaaaaagtattattgcctttggctgccctggtattgtctgcaactgcttccaacgcaatggcagcaaacggcactgttaaattcaccggtgaaatcaaacagtctacctgccaggtaactagcgatactcagaataaagaagtttacctgggtacttacccaacttctgctttcccaaccgtgggttctaaatccgcttctaaagctttccagatctctctggaaaaatgtgatgccggtgattacagcctgcgtttcgacggtaacaccgttgccggcaacccagacctgctgtccgtaagcaacgttggcggcaccggcgctgcagctaccggcgtgggtatcgaaatcaccgataacaacggcaagccattcgctatcggcgacggttccaacatcaacgacgacgtagcgaaagtcaccatcgctgctgacggtaaagcgaccttcaacctgcaggctcgttaccgttcgttcgacagcaacgtaactgcaggtctggctaacgccaccagcccgttcactatcgaatacaaataa

SEQ ID NO: 100660 - protein, 180 aa, Serratia marcescens
MKKVLLPLAALVLSATASNAMAANGTVKFTGEIKQSTCQVTSDTQNKEVYLGTYPTSAFPTVGSKSASKAFQISLEKCDAGDYSLRFDGNTVAGNPDLLSVSNVGGTGAAATGVGIEITDNNGKPFAIGDGSNINDDVAKVTIAADGKATFNLQARYRSFDSNVTAGLANATSPFTIEYK

SEQ ID NO: 100661 - DNA, 531 bp, Escherichia coli
  CDS (1)..(531): transl_table=11
atgagaaacaaacctttttatcttctgtgcgcttttttgtggctggcggtgagtcacgctttggctgcggatagcacgattactatccgcggctatgtcagggataacggctgtagtgtggccgctgaatcaaccaattttactgttgatctgatggaaaacgcggcgaagcaatttaacaacattggcgcgacgactcctgttgttccatttcgtattttgctgtcaccctgtggtaatgccgtttctgccgtaaaggttgggtttactggcgttgcagatagccacaatgccaacctgcttgcacttgaaaatacggtgtcagcggcttcgggactgggaatacagcttctgaatgagcagcaaaatcaaataccccttaatgctccatcgtccgcgctttcgtggacgaccctgacgccgggtaaaccaaatacgctgaatttttacgcccggctaatggcgacacaggtgcctgtcactgcggggcatatcaatgccacggctaccttcactcttgaatatcagtaa

SEQ ID NO: 100662 - protein, 176 aa, Escherichia coli
MRNKPFYLLCAFLWLAVSHALAADSTITIRGYVRDNGCSVAAESTNFTVDLMENAAKQFNNIGATTPVVPFRILLSPCGNAVSAVKVGFTGVADSHNANLLALENTVSAASGLGIQLLNEQQNQIPLNAPSSALSWTTLTPGKPNTLNFYARLMATQVPVTAGHINATATFTLEYQ

SEQ ID NO: 100663 - DNA, 540 bp, Escherichia coli
  CDS (1)..(540): transl_table=11
atgaaaaggaagagattatttctattagcgtcgttgctgccaatgtttgctctggccggaaataaatggaataccacgttgcccggcggaaatatgcaatttcagggcgtcattattgcggaaacttgccggattgaagccggtgataaacaaatgacggtcaatatggggcaaatcagcagtaaccggtttcatgcggttggggaagatagcgcaccggtgccttttgttattcatttacgggaatgtagcacggtggtgagtgaacgtgtaggtgtggcgtttcacggtgtcgcggatggtaaaaatccggatgtgctttccgtgggagaggggccagggatagccaccaatattggcgtagcgttgtttgatgatgaaggaaacctcgtaccgattaatcgtcctccagcaaactggaaacggctttattcaggctctacttcgctacatttcatcgccaaatatcgtgctaccgggcgtcgggttactggcggcatcgccaatgcccaggcctggttctctttaacctatcagtaa

SEQ ID NO: 100664 - protein, 179 aa, Escherichia coli
MKRKRLFLLASLLPMFALAGNKWNTTLPGGNMQFQGVIIAETCRIEAGDKQMTVNMGQISSNRFHAVGEDSAPVPFVIHLRECSTVVSERVGVAFHGVADGKNPDVLSVGEGPGIATNIGVALFDDEGNLVPINRPPANWKRLYSGSTSLHFIAKYRATGRRVTGGIANAQAWFSLTYQ

SEQ ID NO: 100665 - DNA, 543 bp, Escherichia coli
  CDS (1)..(543): transl_table=11
atgcagaaaattcaatttatccttggaatactggcggctgcatcatcttctgctacgcttgcttatgacggtaaaattacttttaatggaaaagttgttgatcaaacttgttctgttacaacagaaagcaagaatttgacagttaagttaccaactgtctctgctaattcattagcttcaagcggaaaagtggtgggacttactcctttcacaattttgctggaagggtgcaatacgcctgccgtgacaggtgctcagaatgtaaatgcttatttcgaacctaatgcgaacacggattacaccactggtaatttaactaatacggcttcttctggtgcatctaatgttcagattcagctactgaatgcagatggggttaaagctattaaacttggtcaggctgctgcagctcagagtgtggatacagttgctattaatgatgcaaatgtgacattgcgttataacgcgcagtactacgcaacgggtgtggctactgcaggcgatgttacttctacagttaattacaccatcgcttatcagtaa

SEQ ID NO: 100666 - protein, 180 aa, Escherichia coli
MQKIQFILGILAAASSSATLAYDGKITFNGKVVDQTCSVTTESKNLTVKLPTVSANSLASSGKVVGLTPFTILLEGCNTPAVTGAQNVNAYFEPNANTDYTTGNLTNTASSGASNVQIQLLNADGVKAIKLGQAAAAQSVDTVAINDANVTLRYNAQYYATGVATAGDVTSTVNYTIAYQ

SEQ ID NO: 100667 - DNA, 537 bp, Salmonella typhimurium
  CDS (1)..(537): transl_table=11
atggagtttttaatgaaaaaggttgtttttgctctgtctgctctcgctgtagtttccacttctgctttcgctgctgaatctggtgacggcaccattaaattcaccggtgaaatcgttgacgcgccatgcgtcgtttctactgactcccagaaccaggaagttgtgctgggtcaggttaagaaaaatatcttcaaagccattggcgacaagtcttcttctaagcctttccagatcaaactggaagactgtgacatcacctctaataccaaagttaacgtaagcttcaatggcgttggtgatacagacgatgcgacactggtttctgttaacactgaagcaggtgcggcaactggcgtgggcatcggtatctacgacaacgctaacaagcttgttgaaatgaacaccggtaaatccaccactacgttggctgctggtcagaccgtgctgtactacaccgctaactacgttgcaacaaaagatactgtaaccactggttacggtaacgcagaagtggacttcaacctgtcctacgaataa

SEQ ID NO: 100668 - protein, 178 aa, Salmonella typhimurium
MEFLMKKVVFALSALAVVSTSAFAAESGDGTIKFTGEIVDAPCVVSTDSQNQEVVLGQVKKNIFKAIGDKSSSKPFQIKLEDCDITSNTKVNVSFNGVGDTDDATLVSVNTEAGAATGVGIGIYDNANKLVEMNTGKSTTTLAAGQTVLYYTANYVATKDTVTTGYGNAEVDFNLSYE

SEQ ID NO: 100669 - DNA, 567 bp, Escherichia coli
  CDS (1)..(567): transl_table=11
atgtttaaaggacaaaaaacattggccgcactggccgtatctctgctgttcactgcacctgtttatgctgctgatgaaggttctggcgaaattcactttaagggggaggttattgaagcaccttgtgaaattcatccagaagatattgataaaaacatagatcttggacaagtcacgacaacccatataaaccgggagcatcatagcaataaagtggccgtcgacattcgcttgatcaactgtgatctgcctgcttctgacaacggtagcggaatgccggtatccaaagttggcgtaaccttcgatagcacggctaagacaactggtgctacgcctttgttgagcaacaccagtgcaggcgaagcaactggggtcggtgtacgactgatggacaaaaatgacggtaacatcgtattaggttcagccgcgccagatcttgacctggatgcaagctcatcagaacagacgctgaactttttcgcctggatggaacaaattgataatgcagtcgatgtcacggcaggtgaagtaaccgctaacgcaacctacgtgctggattataaataa

SEQ ID NO: 100670 - protein, 188 aa, Escherichia coli
MFKGQKTLAALAVSLLFTAPVYAADEGSGEIHFKGEVIEAPCEIHPEDIDKNIDLGQVTTTHINREHHSNKVAVDIRLINCDLPASDNGSGMPVSKVGVTFDSTAKTTGATPLLSNTSAGEATGVGVRLMDKNDGNIVLGSAAPDLDLDASSSEQTLNFFAWMEQIDNAVDVTAGEVTANATYVLDYK

SEQ ID NO: 100671 - DNA, 28 bp, Artificial sequence
  primer
atgaataaagttacaaaaacagctattg

SEQ ID NO: 100672 - DNA, 24 bp, Artificial sequence
  primer
ttaacggtaatccagcgttacgtt

SEQ ID NO: 100673 - protein, 198 aa, Artificial sequence
  consensus sequence
  Variant (2)..(2): Xaa in position 2 is any amino acid
  Variant (3)..(4): Xaa in position 3 to 4 is any or no amino acid
  Variant (6)..(6): Xaa in position 6 is any amino acid
  Variant (8)..(13): Xaa in position 8 to 13 is any amino acid
  Variant (15)..(22): Xaa in position 15 to 22 is any amino acid
  Variant (23)..(29): Xaa in position 23 to 29 is any or no amino acid
  Variant (31)..(31): Xaa in position 31 is any amino acid
  Variant (34)..(43): Xaa in position 34 to 43 is any amino acid
  Variant (45)..(50): Xaa in position 45 to 50 is any amino acid
  Variant (51)..(51): Xaa in position 51 is any or no amino acid
  Variant (53)..(53): Xaa in position 53 is any amino acid
  Variant (55)..(55): Xaa in position 55 is any amino acid
  Variant (57)..(58): Xaa in position 57 to 58 is any amino acid
  Variant (60)..(67): Xaa in position 60 to 67 is any amino acid
  Variant (68)..(77): Xaa in position 68 to 77 is any or no amino acid
  Variant (79)..(79): Xaa in position 79 is any amino acid
  Variant (81)..(94): Xaa in position 81 to 94 is any amino acid
  Variant (95)..(123): Xaa in position 95 to 123 is any or no amino acid
  Variant (125)..(126): Xaa in position 125 to 126 is any amino acid
  Variant (129)..(160): Xaa in position 129 to 160 is any amino acid
  Variant (161)..(171): Xaa in position 161 to 171 is any or no amino acid
  Variant (173)..(173): Xaa in position 173 is any amino acid
  Variant (175)..(180): Xaa in position 175 to 180 is any amino acid
  Variant (181)..(183): Xaa in position 181 to 183 is any or no amino acid
  Variant (185)..(185): Xaa in position 185 is any amino acid
  Variant (187)..(189): Xaa in position 187 to 189 is any amino acid
  Variant (191)..(197): Xaa in position 191 to 197 is any amino acid
GXXXFXGXXXXXXCXXXXXXXXXXXXXXXVXLGXXXXXXXXXXGXXXXXXXFXIXLXXCXXXXXXXXXXXXXXXXXXFXGXXXXXXXXXXXXXXXXXXXXXXXXXXXXXXXXXXXXXXXXXXXAXXVGXXXXXXXXXXXXXXXXXXXXXXXXXXXXXXXXXXXXXXXXXXXAXYXXXXXXXXXTXGXXXAXXXXXXXY

SEQ ID NO: 100674 - protein, 20 aa, Artificial sequence
  protein pattern
  Variant (2)..(2): Xaa in position 2 is any amino acid
  Variant (3)..(3): Xaa in position 3 is Ile, Met or Val
  Variant (4)..(4): Xaa in position 4 is any amino acid
  Variant (6)..(6): Xaa in position 6 is any amino acid
  Variant (8)..(8): Xaa in position 8 is any amino acid
  Variant (9)..(9): Xaa in position 9 is Ile, Leu or Val
  Variant (10)..(10): Xaa in position 10 is any amino acid
  Variant (11)..(11): Xaa in position 11 is Ala, Asp, Glu, Gly, Lys, Asn or Gln
  Variant (12)..(12): Xaa in position 12 is Ala, Glu, Gly, Asn, Gln, Ser or Thr
  Variant (13)..(13): Xaa in position 13 is Ala, Pro or Thr
  Variant (15)..(15): Xaa in position 15 is any amino acid
  Variant (16)..(16): Xaa in position 16 is Ile, Leu or Val
  Variant (17)..(19): Xaa in position 17 to 19 is any amino acid
  Variant (20)..(20): Xaa in position 20 is Asp, Asn, Pro, Ser or Thr
GXXXFXGXXXXXXCXXXXXX

SEQ ID NO: 100675 - DNA, 1164 bp, Escherichia coli
  CDS (1)..(1164): transl_table=11
atggaacaggttgtcattgtcgatgcaattcgcaccccgatgggccgttcgaagggcggtgcttttcgtaacgtgcgtgcagaagatctctccgctcatttaatgcgtacgctgctggcgcgtaacccggcgctggaagcggcggccctcgacgatatttactggggttgtgtgcagcagacgctggagcagggttttaatatcgcccgtaacgcggcgctgctggcagaagtaccacactctgtcccggcggttaccgttaatcgcttgtgtggttcatccatgcaggcactgcatgacgcagcacgaatgatcatgactggcgatgcgcaggcatgtctggttggcggcgtggagcatatgggccatgtgccgatgagtcacggcgtcgattttcaccccggcctgagccgcaatgtcgccaaagcggcgggcatgatgggcttaacggcagaaatgctggcgcgtatgcacggtatcagccgtgaaatgcaggatgcctttgccgcgcggtcacacgcccgcgcctgggccgccacgcagtcggccgcatttaaaaatgaaatcatcccgaccggtggtcacgatgccgacggcgtcctgaagcagtttaattacgacgaagtgattcgcccggaaaccaccgtggaagccctcgccacgctgcgtccggcgtttgatccagtaaacggtatggtaacggcgggcacatcttctgcactttccgatggcgcagctgccatgctggtgatgagtgaaagccgcgcccatgaattaggtcttaagccgcgcgctcgtgtgcgttcgatggcggtcgttggttgtgacccatcgattatgggttacggcccggttccggcctcgaaactggcgctgaaaaaagcggggctttctgccagcgatatcggcgtgtttgaaatgaacgaagcctttgccgcgcagatcctgccatgtattaaagatctgggactaattgagcagattgacgagaagatcaacctcaacggtggcgcgatcgcgctgggtcatccgctgggttgttccggtgcgcgtatcagcaccacgctgctgaatctgatggaacgcaaagacgttcagtttggtctggcgacgatgtgtatcggtctgggtcagggtattgcgacggtgtttgagcgggtttaa

SEQ ID NO: 100676 - protein, 387 aa, Escherichia coli
MEQVVIVDAIRTPMGRSKGGAFRNVRAEDLSAHLMRTLLARNPALEAAALDDIYWGCVQQTLEQGFNIARNAALLAEVPHSVPAVTVNRLCGSSMQALHDAARMIMTGDAQACLVGGVEHMGHVPMSHGVDFHPGLSRNVAKAAGMMGLTAEMLARMHGISREMQDAFAARSHARAWAATQSAAFKNEIIPTGGHDADGVLKQFNYDEVIRPETTVEALATLRPAFDPVNGMVTAGTSSALSDGAAAMLVMSESRAHELGLKPRARVRSMAVVGCDPSIMGYGPVPASKLALKKAGLSASDIGVFEMNEAFAAQILPCIKDLGLIEQIDEKINLNGGAIALGHPLGCSGARISTTLLNLMERKDVQFGLATMCIGLGQGIATVFERV

SEQ ID NO: 100677 - DNA, 1538 bp, Arabidopsis thaliana
  CDS (12)..(1343)
aaacgaaaacaatggaaaaagcaacggagagacaaaggatactgcttcgtcatcttcaaccttcgtcatcttccgacgcctctctctctgcctcagcttgcttgtccaaagacagtgctgcatatcaatatggagatgatgttgtcattgtcgcggcacaaaggactgcactttgcaaggcaaaacgtggcagcttcaaggatacatttccagacgagttgcttgcctctgtattgagagcattgatagagaaaactaatgtaaacccaagtgaagttggtgacattgtagtgggtactgttttgggaccaggatctcagagagccagtgaatgcaggatggctgcgttctatgctggtttccccgaaactgttcccatcagaaccgtgaacagacagtgttcatctgggcttcaggctgttgctgatgttgccgctgccataaaagctggtttttatgacattggtattggagctgggctggagtccatgacaactaatccaaggggatggaaaggatcagtcaacccaaatgtgaagaagtttgaacaagctcacaattgccttcttccaatgggtattacttcagaaaatgtagcacaccggtttaatgtttcaagggaggagcaggatcaagctgctgttgattctcacagaaaggctgcttctgctactgcttccggtaaatttaaggatgagataacccctgtaaaaaccaagattgttgacccaaagacaggtgatgagaaacccataacagtttctgtggatgatgggattcgacctaacacaaccctttccggacttgcaaagctgaagccagtgtttaaggaagacggaaccacaactgctgggaattctagccaattaagtgacggtgctggagctgttctccttatgaggagaaatgtcgcaatgcagaaaggccttcccattcttggtgtattcaggacattttctgcagttggtgtggacccagccatcatgggggttgggccagccgttgccattcctgctgcagtcaaggcagctggtttagaactcaatgacgtcgacttgtttgagattaacgaggcatttgcatctcagtttgtttattgtcggaacaagcttgggcaagacgcggaaaagatcaatgtcaatggaggagccatagccattggacatcccttgggcgctacaggagccagatgcgttgcgacgctgctgcatgagatgaaacgacgtggtaaagactgtcgttttggcgtagtgtcaatgtgtataggttcgggaatgggagcagccgctgtgtttgagagaggaggcgatgtggatgagctctgtgatgtccggaaagtctaatgacaataaggccttttgaccaaggaccctagctaaggaccaaattagaacacagtactacaaataaacattatcacaaataaatgcgttctagatgaataaatcataacgatagtacaatacatgagggaaaacttcttgttattttttaactctcttttgttatatggttggaatatatacagatactctttg

SEQ ID NO: 100678 - protein, 443 aa, Arabidopsis thaliana
MEKATERQRILLRHLQPSSSSDASLSASACLSKDSAAYQYGDDVVIVAAQRTALCKAKRGSFKDTFPDELLASVLRALIEKTNVNPSEVGDIVVGTVLGPGSQRASECRMAAFYAGFPETVPIRTVNRQCSSGLQAVADVAAAIKAGFYDIGIGAGLESMTTNPRGWKGSVNPNVKKFEQAHNCLLPMGITSENVAHRFNVSREEQDQAAVDSHRKAASATASGKFKDEITPVKTKIVDPKTGDEKPITVSVDDGIRPNTTLSGLAKLKPVFKEDGTTTAGNSSQLSDGAGAVLLMRRNVAMQKGLPILGVFRTFSAVGVDPAIMGVGPAVAIPAAVKAAGLELNDVDLFEINEAFASQFVYCRNKLGQDAEKINVNGGAIAIGHPLGATGARCVATLLHEMKRRGKDCRFGVVSMCIGSGMGAAAVFERGGDVDELCDVRKV
